United States Patent Application Publication US 2026/0092266 A1 - sequence listing, part 8

SEQ ID NO: 1251 - DNA, 23330 bp, synthetic construct
  misc_feature 1..23330: note = Synthetic
  source 1..23330: mol_type = other DNA
caaacgcaacaccgacgcctaccctatcttgactgcacagttattaaaccaagaggaagaagtaaacctcttcgaggcgggctttctctataacgatgtccttgtcctcgccgatgtagtccaccgccgccccgacggcaccctcgacatctacgaggtcaaatccggctccgccctcagcgagacctacaaacgggatgccgccctccagcattacgtcatcgcccactgctgggaagtaaacaagttctgtgtggtgtataatgggatgtccgaccggtctgacttgtcggacaggtcagacaggtcggacaatttcaaggttgttgaccttaccgacgagctggccgcccagcactccgagatagaaaacaatatagctttgatgaaagatatcctccaacacggcgaacctgccacccccacaggccagcactgcctggagccttacgcctgcccttaccagcactactgcgcccaaggcatccgccagatgtcgctcttctgaatcaacgccacagactggccacagcctcgtcatagcggcgcagcgacccgctcttcataatagccttgtactgcttcttgtccggcaacaccgtctgatactcccagaaggcatgcaggcgggccaatatctggctgtcgccctgcaacgctgacacggcatgggcatatatcctcgcatgcatttcgcgcaccacagcaagcggctcccgacccgacaacagccatggacgtgccaacaacccccgtcccatcatcacccctttcagctttggccatcgctgcatcaccgattgcacatcttccagcgaaaacagatcgccattatacaccacctgctgggtacaagcctccacaaatgcaccgaaagtctccaggtccgggactcccttatattgttgtctcccaatgcggggatgcattgtcacatgtgccagcggcattgcattcaacacaggcaacagccgcaggcactcgcctgcatcctcctgaccaaggcgcatcttcaccgaaaaaatcacctcgccacgctgtcccatctcttctgctatctcggccagacgctcctcctgcatcagcaatccgcaccccctgccggccttcacctgcatggggaaggggcatcccatgttcaagtctatcctattccagcctgccgcctgcacagcgtcgcacagccgggcaaactcatccctgtcccgggctataatctgtggcacagtggccacaccctcattacgccggaaatcgatgtcgcgcaaatccttcttgcgcacctcgccgccctccaaccgcacaaaaggggtgtaatattcatccacccctcctgccacctcgcaatgcgcacgcctgtattcacagtcggtataaccttgcagcggagcaaaggcaacgtatggcatcacggcatcgggcatcagaacgagtagcgcacatgcagcagcacctgccaagccgagaggaggtcgctgtacacattccacttgggtttgttgaaggtatatacaccgtccttgtattccagaacggtctggctggtaagctgcttgtaggtcccccactcgctgttgagcagattggccacattgttgatgtcggcacccacctcgagcgtggttcggcgaccgttcacatcgaaataaaactcctgacacaccttcaggtcaaggcggttgtgccacggcgtcagcatggcgccgcgcttggtgtactcacccctgtgacggctcagataagcatcgttggcaataaacgtaccgtagtcggcacggttctccacactgctgaaaggcatcccctccagctcctcttcggtaggcacatatagcagacgcgaggcgttgataccacccacattgttcatcagatacgaacagtgggcatagccgacgctgttctccatcccgatgttatacccttcgtagaacaaccccagccgtgtagccgtgcgacggccttcgaacagcgtatagttggccgaagctatcagcctgtgcggcgccacataggcggtaaagcccagctcaggacagttgtcgccgtccactgtgctggtttgcgacagagtatacacagcgtcgccgccgccatccgacaccgacagcgaagagctgtaggtataggcggccatcacgtccagtccaaagccgaaatgtttctgaagctgtgccaccaccgacaggtatcggccgtgcaatccttcgacgttgtggagccggtagcccgacatgccattggcctcactctcctgttggtaagccacgcgtccacgcggctcgccgggcaggtgcagcgaatcgcccggcacgtagccaagcgtggtcgacaccacctcgttgtagttgtacgacaggatgccctccacggtacctttcacgtcccagggcagtttgacatccaacgccaacgaactcttccagctggtgggcatcttcaggttcttgtccagaatcaccggacttgaaggcagcgccatgtttccaccgccgggcacactgtttacaatctcctcgcggctggggctgaacggcatgacggggttctgggtctgcgtgttggcaacatattggtacaacatgacattagagttggaaatggcattcaccaaccacacattaggtatacggccagtgaaaagccccgtgccgccacgcagcaccaccttgcggttgcgggtcacatcccagttgaaccccacacggggcgacacattcacctgcaagcggggcatgtcgccgggattcaacccttcaaaggtgctgccgggatgttcagccacaaactgtgcaaagccggcatggtagttgtcgttggcaaaacggatgacgggtacctccagccttagcccagccgtcagcttaaaatagcggctgaactccatctcgtcctgggcataaagcgagggctggagataattgaacacatactcgggcagggccatgcggtcctcttgattggcaaaagccaccatgaacagcacagggttgcgcttgtttacaaagctgtcccacgagtcgaacacataccatcccgcgccgccaggcatatacacattgcgtatattgctgtactcgaactgcacgccagccaccatcgtgtggacgccggaattatatgtcaactcatcggtcacattgaacgtgctgacgctgttggctgtcatataggtgaaggggtccagtccgaaggtggtaaaggaggcatacttgcggctgccgtcgctactggtgtagggctcaagaatgtccaccgtggggaacaggtcgccgtaatggctgcgcggctcgttctgataagaccaggtgacacgcagattgttgttcccattgccgccccacagacggctgtccagctctgctgccaccgacgtgaaatcctgattcttatagaaacgtgccgactcgaacatcatcgaatagttcgacaggcgcccctcggaatagcggttgaacgaataccgcttgccgtcgacaaagaaggccgtgttggtgccgccgatggtgctcatcgagttcgacgcatcgaacgtggtagtgtgcgtatggctgaacctgacattgaatttgttgttgctgtttataatccagtccagacgggcaagaaagcgatagtcggaagcgtcgaccgaatagttctgatagcgtccggggtcatagccgtattcctttatcaaataattcctgatactgtccatgcggcccaccgtgggacggttgtagccgttgccgccccaggcggcattgctgtcggcacgtgcctgagccgatgcaccgggcactttctcgggtgtatactctgcattcaggaagaagaacagcttgtccttgatgatggggccgctcaacgtaaatcccgcaacattgttcaacgtattgctctgcggcagagtcacatcgccaagatgccgccccctcagccaactgctgttgtaataatcatacagcgaggcatgccactcgttgccgccctgcttggtgaccatattgatggctccacccttaaaaccgctgtgcctcacatcgaagggggtgatactgaccgaaatctggtcgatggcgtcgagcgagagcggattacccccggccggaaggctggaaccaatgccgaaagcattgttgaacgaggcgccgtccaccgtcaccgacgagctgcggtagtcgccgccgcccaccatgaagcccctggaggtgctgatgctctgcggcgtgagccgcatcacatcgtacagactgcgactggcggtaggggtagccatgaggacggaattggtgatatttgtcgaggctcccgagttctgcacattcatattagaatgagtggcctggtccacaaccactatctcgtccaacgaggtgcttgtcatcttcagttcaaaatccaacaccacacggtcgcccagcggagccgtcacatcactcatcaccaccgtacgatagcccatcagttctacccttatattgtaagggcctccggccaccaccccattgatacggtaactgcccttggcattggtgaaaccgtggtactgcatccccgtgggcacatataccgcggtgacgatggcatcggccaacggaccgttctcgtcgtttacactgcctacaatagacgatgtggtggtctgagcccctgcgggcaacgaaatcaataatcccacaaagagtgccaaaatggctcctactctacttttcataacgattctaatacaataataaatgtctataaaacactatataacagttaattacctgttaaacccataccatgggcgaggtacaaaggtacaaaaaataaactacaccactgcaagcgattcgggaattaactattattaaaaatcttttgcaattctcagcacaacgccgttccttcgttcaatcttgtatccttcatgctacgttacagcttcgttttccgttattgtaacggaaaacgaagctgtaacaatccttgatcgagcggatatcgaacgacgttagtggtacaaaaaaaacgtcatcgaagtcgagctccgatgacgttgtaaatgatatgccgcgatgcgacagcctatcaatagacggggaaggctatctcgcgttcgatgacttggtaagccacgttgttgcgatagatggtctggcgcacccagttgtcgtcctcgtcatactcgaagacgtagctgtgcttccagttgaggtgctcgtcgtagttgaacgaggagagttcaatgaggttgtcgtggtcgtcgtagtaataggtggtgagggccacgaggaaatcgtcggcatcatagaaacgccattcaatgcggttgccgtggctgtcgtacttgtagaggtaacgctgcatcagctcgccgtcgcggtcgtagaattccatctcggtgttgttgccggcgtcgtcgtatttgtagacacgcttctcggtcatggtgccgtcgggggcaaagctctgctcttcgacaaggcggttgttctcatagcgcgaggtctctttcttggtcatgtggtcgccaataaagacggtgcgctcgatgcggttgccgttcttatcgttgagataggcggtgcggccggtgagctccttggcgcggttgtactcgttccaacccaaggcatagccgtggacgtcgaagtaataggaataccaagtgtattcgccatccttggtgcggtatttgtcctggaaattgccgcgtttgtcgaaagtgatggaatcgatgcagacaagctgacggccaccgttgcggccaccgtggatgtcgtaggtgtattctatcacatagacggcatttccgttgatgcccatctcctgacgggacgatttgcggggtttattaccggcaaaagcactgccagcgaccagcaataccaacgataaaacaatgtatttcttcatgttacgaattattatacaatataaaagtcgttgcaaagatacaaatttttctttacataaaacgtgcttgtttataaaatattgcgtggaacagcctttttcttattccacaagccacgtataccggtttgttgttgtttcatgacagcactgaccggcacagctttttattgctccttgggctccttcttccttgtccagaaatagaagatggcggtggcaagcagcgtgatggcggcgccgatagtgtagcccagccagcgggggatgacggcccccaggccctctttttcggcaacgaacaggaagcagcctgtgaccatggtcatgaacatggcagggagaagggtgaggatgtagggcttgcgcttgaggaagagatagacggtgatggtccaaagggtgacggtggccagcacctggttgctccaggcaaagtagcgccagatgacgtcgaagcctttcgcgtcgataagggagtagaccagcacagcggcagtgatggcaaagatgggcagggcgacgaacagacggtttttaataggtttctggtcgaagtggaggaagtcggccacgattagacgtgcggaacgcagagcggtgtcgccactggtgatggcggcggagatgacgcccaacacacagatgacagcgatgaccttggggaaccatgtattggcgatgacgcccaccatggcgttgccgcccaaggtggcaccggtctcagggttgacggtgagttgctgcagctgggggtcgtggtagaagaccgtggcggcagcggcccagatgagggctacgacgccttcggtaatcatggcaccatagaaaacggggcgtgcctggcgttcgttggtcatgcagcgcgccataaggggcgactgggtggcgtggaaaccgctgatggcaccacaggcgatgctgatgaacatcatggggaagatggggttgtgggcagcatcgggatgctggttctggaggccgtcccaaagctcgggcagtggcggctggtaaacgacgaaggcaatgacaatggccacggccatgccgagcagcaggaatccgaagatgggatagattttgccgatgagtttgtcgatgggcaacagcgtggcgatgagataataggcaaagatgatacccacccaaaggaagatgttccagtcgggggtgaagttgctgttgagaagcacggccggtgtattgacaaagacggctccgacaagaatcatcaggaacaccgtgaagaagcgcatgaactgcttggggccgttgccgaggtaggcgccgtggatttcgggcagcgaggctccgtcgcggcgaatggagataaaccctgcgataaagtcgtggacggcacccgcaaagatgctgccgaagacaatccacagaaaagaggccgagccgaactgggcacccatgatagcgccgcagatgggaccgacaccggcaatgttcaaaaactggataaggtagatgcgccacggcttcatcggcacatagtccacaccgtcggggtgtgccactgcaggagtggcccgcttcggatccaccaccaaaattcgctcgataatcttggaatacaccaaataaccaagcactaaaagcactattgcaataagaaaagtaaccataacttaatcttttttcgggttgcaaagatacgatttttttttgaaaatttctattttcatgattcaaatcccaatttttcttcgtatctttgccaaacgaaatcaaattaatcattttactatgaaaaaatcattatttattgtcgcaatggcagttatcatggccactggagcctctgcccaagaaacaaaaaaaccaaccaaaagtcagttcaccatcaacacccgtgcatggtcatccaactattggtccaccctgctctacaacatcgcacgcgatgctgtgacctatcttgtcttcgacaacaatcccgcaattgaggccgctatccccaacgccgacctcgccttccccatcggcatgggcaaagagggatttgctaaccctaacgacatctatggtccctaccaccgtgccttcggaacacccttcaaacgcctcggcgacttcagcataggtctcgacgcctcctgggtgccctcgcttgtaggcgtctatgccggtgcctactacaagagccaggaaatatgcttcatggccaacgaccagaacctgcgcggcaactacttccagccccgtgccggactcgtgattggcggtcagcgcaccgccctcgaggctggtgttttctacgacttcaccgtcggctgcaccggcacctcgcaggttttcggcacccccaacaaagacatgattgcaagcggcttgggcctcgactttgccatctcctacgccaacaatgccaactcccgcaaagtcttgctcatgttctccatgcccctccacaacttcctcaacgaagactacaccggcggcatgctgaaaggcaaggtacgcaaagtaggctacctcatgctcacccaccgcatcatcttctaatcccataccggatatcacaacacaagcccgcgcaccccaagtgcgggcttgttttattttaacccaaatcggtcttgaggaactggatgagataaatgcgccagggtttcatgggcacatagtccacaacgtcggggtgtgccacggcgggcgtaggacgattggggtcgacttcgacaatccgctctataaccttggaataaagcagatagccaagcaataacagcacaatagcaagtagaaacgattccataataatatgttttttgaatctgtaaagatacttttttttcagaaatggcgactttttttcatcaaagtgacccattgcaatgcctgtaccaccatcgaaaaagcataatccccaatcggtcatttggccgattggggattatgcttggcatctctggcatccccgaacaattggtatagacttgcataatccaaataggcagtaaggggtatcaatttggatttgttcaatttgcgtatgttgagaaagtaaatattcgcatgccccttttaataaaatcctcgtttttcgaaaaaaagcattaattttgcatagtcaatacataaaactaacagaagatgaaaaagaccttattaattgtaatcatgacagttctgctgaccgcaggtgcttcggcgcagacaacaagaaaacaattcacattcaacacacgcacatggtcgaccaactactggaccacgcttttgtacaatctggcccacagtgcggttgtccactttgccttcgacggcaactccaccgattcgttgattgttgagtccatcctgcccagttccgacctggtgttcccgataggcatggcaaaagccggctttgaggcaccgatgcacgacatctacggaccttaccaccgtgcattcagtaacccgttcaaacggataggcgactacggtatcggcttggacatgtcgtggaaacccgtgagcatcgggctctatgccggtgcctatttcaagagccaggagatatgcttcatgcctaacgacgagagcctgcgcgggttctacttccagccacgtgccggactggtgatgggcggcaacaaacacgcccttgaagccggcgtgttctacgacaaagtggtaggctgcggcggcacctgggaagcccgcaacaaagagatgctgcagagcggttggggcctcgacttcgccctgagccgcaccgtggccaaaggccgccacaaaactatgctcatgttctccatgcccctgcacaacttcttcaacaccgcctatgccgacggctcgttgaaaaacgtgcaccgccgcgtgggctacatcatgctcacccaccgagtagtgctctaatctgccctgcccaaccctgtttgcacaagccgccaacacatcaagcaatatcaagcccggaactgactatgcggttccgggcttgctttttctagtatccactacaattacgaacaccacattaatcactatatctgtctctccatatctcacgcacttcagatacactaagacttgctgtacaattaacacattctgccaatagaacattcagaaaaaagttgtatctttgcattttgaaaaaacaattattcttatggcaaaaattgtcggacttgacttgggatcgaacagcattggatgggctgtcattgacaatgaaaagcacagcatagaagcagctggctcacgcataatacccatggatgcaggacgtttgggtgattttgaaaaaggcaactctgtttcgtttaccgcagagcgaactaagtatcgtggaatgcgacgactacgggaaagatatctgctacgacgtgaacggctgctccgcacattaaaaataatgggctttctgcccgaacattttgcctcgcaactgacccgatatgggcaactgccaacggacaaagagcctaaattagcctggcgagaagggaaagacgggaaacctgaatttcttttccaaccctcatttgaagagatggtatctgatttccgaaaggctgaaatagtccaaaagataccttacgactggacaatatactatttgagacaaaaagccctctcccaaccaatcagtaaagaagaacttgcatggattcttctacaatttaatcagaaacgaggatactaccaactgcgtggcaaagcagacgaaagcataatccctgacgaagaaaagaaggaggagaagtcataccatgaactggaaataactaaggtagaggactcaggagaaaaagacaaaaaaggcaacacatggtataacatcacactcgaaaatggttgggtatacaggcgagcattcctctcaaaacccgactgggaaggaaaaaagagaggattcattgccacatttaagttggacaacaacggcaaccacaaggacgacactccaaagctcagttcacccagcgaggacgactggggattaagaaaaatcaagacagagaacgacataaaggaatctggcacaactattggcgcatacatctatcaaagcctactgcatcatcccgaccgcaaaatcatcggagacttggttcagactatcgaccgtgaactatacaaagatgagttgcgaaaaatcattgatacgcaacgtcaattcatgcctgaactaaacgacatgaacctgtacaaccaatgcataaaagaactgtatccttcaaacaatgcctatcgcaacagcatagctacaaggggattccgatatctattagtggaagatattctattctaccaacgaccattgaagagcaaattgagccttattgacgactgtccttttgaacaaagacatggcaaagctattaaatgtatcgccaagtcacacccactataccaagaattccgtctatggcagtttatcgccaatcttaaaatctataaagacgataacgacattaccgagtctctactgcccgacggagccaaatatgcaaatctttatgactacctttccaccatcaaggagatcgaccaacagaccacattgaaatactttaagattgggaaaaaagacatgccccattaccggtggaattatgtacctgagcggaaataccccatgggtgaaacacgagcggtgctactcgggggattgcgcaaagcaggaatcaatgacaaatttctaacctttgagaaagagctcctactatggcaccttctctattctgtcaatgaccagattcaataccgaaaagcactgattacctttactctgaaacagggctgggacgagcaacggtcaaaggccttttgtcaagctttcgacagactgacagtgtacaaggaaaaagactatggagcatattcgaccaaagccatcaaacgcctattgcccttgatgcggagaggacgctattgggatgaatcagcaattgacgggcagaccctcagccgcatagaacacatcatcactggcgaagatgacaacacgttgtcgcctcatgtccgagagcttttttgtagcctctccagcatcgagcagtgccaaggactcaacacctggcaggcatgctaccttgtctataaccgccattctgaggcaatcgatgcccaaaagtggaccaagccagaagatatcgaccaatacctttcacaattccggcataactcattgaacaatcctgttgttgaacaagtagtaacagaatcccttcgcgtagtacgtgatatttggaaacagactggccacattgatgaaatacacatagagttgggacgcgaactgaagaaaaccaaagctgaacgcgaacgcttgtcccaatccatcatcgacggggagaccacaaatcaacgtatcagactattactgacagaattaatgaatccagaattagaagtagagaacgtgcgtccacaatccccctcgcaaatggagattctgaaactatatgaagagggagtaatgcaaagtggaaccgagatacccgacgacataaaagatattcaaaaacgcttcactgctgccaagaaccaacccacgacagcagaagtaaagaagtaccgactatggcttgatcagaaatacatctccccctacacaggtcgtcccatccctttagctaagcttttcactcctgcatacgagattgaacatgtaataccacaaagcagatggttcgatgattccatgtcgaacaaggttatctgcgaagctgaagtaaacaaactgaaaggccgtgagttaggccatgagtttatttcccatcaccaaggagagcgcatcaccttaaaccttggagagacagtagagattctctcactcgaagcatacgagaaactgataaaaacgactatctcaaacagcaagaagcgggaaaaactcatgctagacgacatccctgacgacttcacttcccgacagatgaacgacagccggtacatcagtcgattaatgatgcatctgctttccaacatagtacgttccgaagatgaagaaggccaccgagaagagtccgtcacctcgaaatacgtcatctcttgcagcggctcaatcaccgaccgcttgaaacgtgactggggcatcaacgatgtttggaaccgcatcattcttccacgctttgaacgaatgaatgaaataactggaaccaacgactatactgctatcactgacaacggacatcatatcccccaagtgcccctccatctgcgacaaggcttcaacaagaaacgtattgaccaccgacatcatgctatggatgctattgtcatagcatgtgccacccgcagccacgtcaatctactcaataaccagaatgccaaaagtaacacccgttacgacctacagcacacccttcgagcaacagattactatcttgacgagcaaggtgaaaaacattcgtgtcccggaaactttatcaaaccttggcccactttcacagaggatgtataccacaccttggaaagcattgtagtcagtttcaagcagaacctgcgcgtcatcaacaaaacatcaaaccattatacttccctccaaaatggcaagcccgccgtccataaacaagagaaaggcgatagctgggctatccgtaagcccctacacaaagagactgtattcggagaggtgaacttacaactaaaaaagagagtaaagattagagaggccgtcgccacccctaaagccatcgttgaccgagaactgaaagaaaagattttgcactttttgtcccatcaacattcagtcaaacaaataacagactacttcgacaagcacaaagacatttggccagaggtctcagacggcaagatagaaatatattacttcacaaaagaaacaaaagaccgctactttgccactcgcaaagacctcatcggaattttcaaagacatcactactgagtctgctgcacaaaaaatcatagacagtattactgacagcggtatccgcagcattctccaggcacatcttgcctcggagaacaataaccctgttgaggcattctcgcccgatggccttgaacgtatgaaccggaacattcgcttcctgaacggtggtcataaccacatgccaataaaaaaggttcgggtgtatgaacaagccaacaaatacagcgtcggaaatcatggacagaagtccacaaaatacgtcgaagccgcaaaaggcaccaatctattctttgtcatattcaccgacaagaaaggctcacgcggatatgcgaccgtcccgctcaatgtggtaatcgagctacaaaagcagtatgaaaagcattggaaagaacacctatcagaacgcctacaacaagaagaccttggactaatgcccttggaagcgaatctgctttatatattgtctcccggcgacttggtgtatgtacccaatgaagaggagaggaataatggtatatcgtctcaagaacctaatagaatatacaaggttgtctctatgactggtattcaattcatgtgtatatctaatcgagttgctacacccattgtaaacaaaatggaattcacaacatcaaacaaaatggagaaaactatgaatggagaaatgatcaaagaagtctgcattcccattcaagtagaccgattaggaaacatcacaaaaataggatagtaaccatgattaaacggacactctgtttctccaatccagcctacctgtccatgaagaaccgacaactgtcaattcggttagaggaccacaacggcgagcctggtaagcaaaccaccattcctattgaggacatcggaatggtagtattagaccacccacaaataacagtcacccacggcctgatggcagcactattagacaacaacgcctctgtcatcacttgcaacaatagccacatgcccgtgggactgatgctcccactagaaggacacaccgtacagagtgagcgattccaagaccaactatctgcctcagttccattgcgcaaacagctatggcaacagactgtgcagcagaaaatcctcaatcaggcagccttactgaatgaactttatgggacagaaaacgggaatatgctccaatgggctgcagatgtccgttctggcgacagcaccaacctcgaagggcgagctgctgcttactactggagccagatgttccctgacataggcggattcaaccgtggacgcgatgggctatatccaaacaactttctcaactatgggtatgccatactgcgtgctatcatagctcgggcactggtcagcagtggactactccccaccttcggcatccaccaccacaaccgatataacgcttattgtttggctgacgacattatggagccttaccggccctacgtggaccgcctcgtggtggctaccactaagcagcacccccgcacagcagaagtcaccacagacataaagcgctcactactctcgatccccaccctcgaagtacacatcagcaaccaacgcagtcctctaatggttgccgcctcgcagaccacggcatcccttgcacgctgttttgctggtgaaatacgcaaaatatcctatcctgacatgtgatggaccgcttttcagaataccgcatcatgtggttgcttgtattcttcgacctccctaccgataccaaaaaggagcgcaaagccgcagccgactttcgaaaacatctcttggctgacggtttcactatgttccagttttctatttatgtacgccactgcgcaagtcgtgagaacgccgaagtccacctcaaacgcgtccgatccctcctgccccaatatggccaagtggggtgcctaaccatcaccgataagcaatttgcggacatagagctctacatttgcaaaaaggaagtcccgcccaatgcgcccggacaacaactggagctattctgacgtcagaataagaaaaacactcatacataataaaaaatcccgcccaaatggacgggattttttatttcattgacatgttctgggacattataattcaggcagatactcatatcgtggtgtttatcgtaagtgtcaatgtcctctttttaagcaattcacaacttggatcgctagtaatcattactgtgtttcggtgtttatcgtaagtgtcaatgtcctctttttaagcaattcacaactttcgcgggcttcctgctcgaggttgaattggtgtttatcgtaagtgtcaatgtcctctttttaagcaattcacaactccacttgcggccatacattgatttgccgtggtgtttatcgtaagtgtcaatgtcctctttttaagcaattcacaactattcagttacgttttacaatgttgaaaaggtgtttatcgtaagtgtcaatgtcctctttttaagcaattcacaactaaactcggtcttatttatccctgttttcggtgtttatcgtaagtgtcaatgtcctctttttaagcaattcacaacgacattcgtccgctgttcaatcgattgcttggtgtttatcgtaagtgtcaatgtcctctttttaagcaattcacaacatactatattattaatatgtggaccccccgggtgtttatcgtaagtgtcaatgtcctctttttaagcaattcacaacaggtttatgtttcaattacttacaaaggttggtgtttatcgtaagtgtcaatgtcctctttttaagcaattcacaacgggtggatttgttaccgttttataggggtggtgtttatcgtaagtgtcaatgtcctctttttaagcaattcacaactgccttcgagctgccattgaacaaacatttggtgtttatcgtaagtgtcaatgtcctctttttaagcaattcacaactggcacagaagaagaaaaaaaaataaagaaggtgtttatcgtaagtgtcaatgtcctctttttaagcaattcacaacaggggcgttggagtatgcaagtgataatgaggtgtttatcgtaagtgtcaatgtcctctttttaagcaattcacaacgctctttcctccacacttcaattacacggggtgtttatcgtaagtgtcaatgtcctctttttaagcaattcacaacctctttagtggtcttatatttctcagtctcggtgtttatcgtaagtgtcaatgtcctctttttaagcaattcacaacaaggagccatccacgatgatgaactcagcgggtgtttatcgtaagtgtcaatgtcctctttttaagcaattcacaacacgatgaggactaaccctccgagggtggcaggtgtttatcgtaagtgtcaatgtcctctttttaagcaattcacaactaacaaggtttctgttcccaacgtcggggtggtgtttatcgtaagtgtcaatgtcctctttttaagcaattcacaacttgtaactacctctcattctcgtagcattaggtgtttatcgtaagtgtcaatgtcctctttttaagcaattcacaactatccgttatgacgataactgacggatgtaggtgtttatcgtaagtgtcaatgtcctctttttaagcaattcacaacttgctcagcacgttcaaaggtgattacctggtgtttatcgtaagtgtcaatgtcctctttttaagcaattcacaacaacgtggcaacatgtcatttcgcattaccggtgtttatcgtaagtgtcaatgtcctctttttaagcaattcacaacccacttggggtgctgaaataaagtcggtcgggtgtttatcgtaagtgtcaatgtcctctttttaagcaattcacaacaaaacggagattattgactgttagtgatttggtgtttatcgtaagtgtcaatgtcctctttttaagcaattcacaactgaacgtgtgggtgaaaactttataagagggtgtttatcgtaagtgtcaatgtcctctttttaagcaattcacaactgactgcggggggttaataatcccagtcttggtgtttatcgtaagtgtcaatgtcctctttttaagcaattcacaacacagacgcttggcaatggcaattacatctggtgtttatcgtaagtgtcaatgtcctctttttaagcaattcacaactaaagacggtgcaacatgtagctcccccgcggtgtttatcgtaagtgtcaatgtcctctttttaagcaattcacaactgattggggagggggtggagttcctgggggggtgtttatcgtaagtgtcaatgtcctctttttaagcaattcacaacttgtcgatatacttgcaaggttgcaacccggtgtttatcgtaagtgtcaatgtcctctttttaagcaattcacaacactttttcattctttgttttttttgattggggtgtttatcgtaagtgtcaatgtcctctttttaagcaattcacaacgtaagttgttaagtataagcttgtgaaagggtgtttatcgtaagtgtcaatgtcctctttttaagcaattcgcaacaggtgaattatgactcggagtatggggagtgttctgaacaatcagaggtttgttgggctggtcgactatgtcttttttgtgaggtttatcaataatttactacactcctaataaaggcgacggaggatagtttcctccgcccccttgttagttttcacaacggaataatccttattgtgaattgcttaaaaagttttgcaaagatactacttttttttgaattgggaaaatgttttttagttggtcggtggtgggtgagttgaggaaatctgattattcgaatggttctgagagggttgaacttatcggttgtttcggtagtttatacgactttggtacatacgttcttttatgccaccctctttcacgaaacgggtttgcattgtgaccagcaacttgtgaagcatgtatatcgcctgatgtatgagcgtgatgcagaggttggctatttcttcatcgttcatgcgctgtatggtggcggcatactctttcttgatttcctcactacgtgcatattgtcgcatcttctcatagcgcggatgaagaggcccccactgctgcatgtttcgcaccctgaggtaatcctcgtagtcgtcgagcagttcttccagactggctttggctacattggtcagtttgatttctgtctcgcttgatgtagcagcggcttggttgccctccgctatattctgtttgccgctgcgcgcggcttgaaccatctggtccacggtgcggtcgcctttggacaggtagtgttgtgtgaaatagtaggtaatgtcgtaaaccatctcggtgacttgatagacacggaggtttcgataatggccatgcttcggtaggaaggttactgggtgggtcggaggactctgagtattctgagggctctgaatactctgattattctgagtactctgattactcagagtaatcggaggactctgagtactctgattattctgaatactctgagtgctcttgggggttggggtgttctgattctcctggttcattcttcacagctccacttcttggcggaattcggggatttctactcggttccagcctacttcgtttagggtgtcgcggaaatgctcttgcgtggcggcctcgccatgaacgaggaaaatttttttcagacggcgcttctcttggcatccgatgtagttgatcatctcgctgtagtcgccatgtccggagagggactcgatgcggcgcagttcggcacgcacttcataaatgtggccaaagatggagacggtcttgtcgccccgcatgatgcgagcccccagggtcttgggttcgcagtatcccacacaaaggatggttgttgtggggtcgtcgatatgattggcgagatggtgcttcacccggcctgcttccatcatgcccgaggcggagatgatgacgcagggcttgtgacggacattcaaggcctttgaggcctcgacggactggatatactgcaggcggtcgaacccaaaggggtcggggtctttcttcatgtattggaggatggaggggccgaagcactcggtatgtagacgcataatgttggtggccgagacactcaggggactgtcaacgaacacatctatgtcgggcagcaggtcggcggtctcgaggcggtcgagggcataaataatctcctgtgcacgtcccacagcgaaggagggaatgatgagcttgcctttcttcttggtgcaggtgtccaacacggccatcagcagttcctgctcggcatcctcgatggtcgtgtgcagacggtcaccgtaggtggattccattatcagataatccacttgcgggaatggttcggggtccttcaggatgcgcttgttgtaacgtcctatgtcgccggtgaatcccagtttgacggtgcgacggccgtctttgatttcaagatacacacagctgctgccgaggatatgtccggcatcgaaaaactcgacggtcacctcgccttcgatattgaactgcttgtgataaggcacgctgatgaagcagctcatgcactcctgtgcatctttctcggtgtagatgggctccaccgggggcagattctggtccttgcgtttcttgttgaacgtgtgggtatcggcctcctggatgcgtccggcgtcggccagcatgatggcgcagaggtcgcgcgtggcgggagtgcacagcacggtgccacggaagccctccttatagatatagggaatcaaacccgaatggtcgatatgggcatgcgaaagaatcaggtaatcaatctcggcagggtcaaagccgaggtcgcggttcatggcatcggtctccagtcccttgccttggtacatgccgcagtcgagcaaaatattcaatcccttttttgttgtgataaggtgcttgctgccggtcacttccctggcggcacccatgaatttcagtttcatacctatagtgtatttctatgtttcaactcaataataatcatttccatacagcctcacaccccgttctgggcgggagacaacaacaaagcaaagatacactttttttttcaaattgaaacaatccactcatccctccggagagtgagaaaactcgttcaatagaaaaaaatgcgtatttttgtaatgacgaatggggagcggaattccgcacaacccactatatattagcaaataatactaacacaatatggcactgaaaagagtaatggtactgaccgggggcggcgactgccccggcctcaacgccgtcatccgcggcatcgtaaaacgggcctcccaagagaaagactgggaggtgataggctgcatcgagtccttcaacggtgtgctgcgcgagcccaccgagattgtcgaactgaacgagaaagccgtcgagggcctccagatacagggaggcaccatcctcggcaccaccaacaaaggaggcccattctcatggcctgttcgcaacagcgacggcacctggactactgtcgaccgcagcgacgagatgatacgcaaactgcgttacatgggtgtcgacgctgtcatcaacattggaggcgacggctcccagcgcatctccttgggtctggctcagaaaggtctcaacatcgtgggcgtgccaaagaccattgacaacgacctctcctccaccgactacaccttcggtttccagaccgccgtgcagatatgcaccgaggccatcgacaagttggtgaccaccgccgccagccacaaccgcgtcttcatcatggaggtgatggggcgtgatgccggctggattgccctgcactgtgccatcgctggtggcgccgacgtctgcatcattcccgaaatcccctatgacatcaacaagataaaggagaagatagagcagcggtacaacaaacgccacggctactgcatcatcgtggtggccgaaggggccaaacccaaaggcggcaccaccgtaggtgctgaaagcagcgaagtgggctaccagcacatacgcctgggcggcatcggccaccagttggctgccgacctcaaggccgccggagtggagcacgacatccgctgcaccattctcggccacctacaacgcggcggcacacccgtcgccttcgaccgcatcctggcctcccagttcggtgtccgcgccatggaggaggtcatcaaaggcaactacggccagatggtggcctaccgccaccccgacatcgtcgccgtgcccctcgaagaggccgtccgcgcccagaacctcgtcgaccccaacggcagccttgtccacaccgccaaaggactcggcatcgagttcggtcagagcgacccctgctgatacattttttttcacacaacgaataatcattgaagataatatcatgaaaacaatgaaactcatccttgccgcgaccatcgtggcactgactgcagccagctgctgctcgaagagcaacgcccccaagacgctggtgctttattattcactgacaagcaataccaaagccgtggccgaagagatagccaaccgcctcggtgccgacatagaggagattgtctgcgtcaacccttacgacaccaactttcaaggctgcatccaacgctgcaagcaagagcgtgagcaaggcgtactccccgacatccagcccgtaaaagccgacctcaaccaatatgatgtcgtcttcctcggctatcccgtctggttcggcacttacgcaccgcccattgccaaatacctcctcatcgaagacctcagcggcaagaaggtagttcccttctgtaccttcggtagtggtggtctggaatcaagcattgacgacctcaaagctgaagagccctatgccgaaatcctgcccggctacggtgtccgcgccgcccgcatggatgccatgcccaaggaggtggagcaattcctgattgccggaggcttcatcaagggcgaatacacaccgcttgcggacttccccgaacagcatgaagtgtctgccgaagaggccgccatcttcgacgctgccgtcgacgctatcccatgatacatgcccaagccgtcaccgttgcctcccgggccctgcccaacggttccgaatacctcttcaccgccgaggacctgccccgcgaggacaagcccgacatgcctgccaataagttgcaggtctatgtcaccgtcgccgacggccaagcccccgtcttcaccaaagtcatccgctaacctgtcaacttaatccagtcgaagggcacaaaagtgacaatctaaatcagcaaaccacaataattccaaacagacattaacaaaagtacaaaaaaaatgaacagcaacaagaaaagggagtacaactctcccgaaatggaaatcctgaacgcccgcgttgagcgcggctttgaagcaagtgcagtaaccgacaacacgcccagaggcaacggcaacgagttggtcggagacagcggaaacaattacaacaacgctattttcagttgattaaatcgcaagaaaaatgaagagaatagcagtatcgtttttgtcgcttttgaccattgcaggaattgtgagctcctgccagaaagaccaacatgccggtaacggcagcaagtttaccgccaccatggagtcctgcacttccagccaaggaaagactgtgctggacg

SEQ ID NO: 1252 - DNA, 23219 bp, synthetic construct
  misc_feature 1..23219: note = Synthetic
  source 1..23219: mol_type = other DNA
gccggcacccacatcagctatattacccaaaactactttgcccctccctttactgcgcttggtctgaatcaagatattcgtgggatgggagccatcggcaaccggcgtaccggcgtgacacaaatggaatatttgctgaactacaccaaacaaatccatccgtcgcactttattgatttgctggcgggatacactacccaaaagactgaaaccaaatacgctatcgcgcaagccaatcatctggcgtctttcgacaatttggccggcactacaaaaatcttattggctcccatttccaaagggctggatggttatttatactcaatactgggacgcataaactatagcttgctgggacgctacaatcttacggctactcatcgcatcgacaaatcctcccgcttttccgccggacatgaattggagcagttttcctccgtcgggctatcatggaatgtgcatgaagagcagtttctaaaacccattagtcctgctttgagtgtgttgaagcttcgcttgacgtacggagattccggaaaccaggagattggcattaatgaacatgacgaggacttcaatatcggcagatatgatggcaaaccggcctatcaattgtccgtaaccgaaaagacaaaccttagatgggaaacgactgaagaatacaatgccggtattgacgccggattttggaacgacaaactgtcattagtcgctgatgtttattccaaaaaaactcgcgacctgctcatgcaaatgtctgtcgagtcgtggactggtgcgagcgaaatgcaaaccataaacggcggtagcgtgaccaacaaaggtgttgaatttgccgtgaacgccaaactgatagacaataaacgtctggcctggtcggtgtccggcaacattgcccgtaacatcaacacgcttacctcaatgggagatttgggtgactatcaaaccctaggtcaagaccaggagcaaattttgaaagtaggcgaatcggtaggctccttttacggatacattttcgacggcatcgtgcaaaccggtgatgatctctctatcttacccaaagtagaaggaaaagaaatcgtaccgggcgcagtaaaattgcgagatattagcggccctgacgggaaacccgatggagaggttgttagagactatgaccgcaccgtgttgggaagcattcagcccgattttacttacgggctttcctcctcactcacttaccggaattttgatttctatctcgccttccaaggttcgcaaggcaatgaagtgtacaactacctgcgccgctttttggaaggaagatccaacgattcctataatatgtcggccgcgctgctgaatgcctggacggaaagcaacccgtcgcgcaccatcccccacataaaaagcgttcgtatcgctcaacttgacagtcgttttgtggaagatgcctctttcctgaagctcaagaacattacgctcggatacacactgccgatacggattcaaacgctaccggtgaaattcagagtgtttgcatcggcgcaaaacctcatcacctggtcgaaatacaaaggctatgatcccgaagtggcaagcggaattgactcgggcgtctatccagctgctaaaacgcttttagcaggatttgaaataacgttttaattaatatatttattcacttaaaaaatttcaaaaatgaaacgaaattatttgtttattccagtagcgctacttgcgctttcttccatcgccttccaatcttgtgaagacaatgatgctcctaaaaagcatgtggtaacccccagagaagaggccgaaggccttgtcaatggcacgttcggaccgttgcaaacgctcagttcgtcctactctttccttttggagtcggctaccgagtcggctatcagctttgaagaagtgatcgacaccaaagacggtccacaggttagtatccttgaaacggacaaaggaaactggtatccgatcaaagtgttcagccgtctttacaaaagtattggattggctaacaaagcgatcgaatacatttcagcgatcaactcaaccacagtcaacaacgatttgacacaggaagaaaaagatctacttattgctcgcgccaaatttatcagaggctacgactatttccaactggtacaaatctttggcgaagtgcccttgtttttgactacaacagctactgaaaaaaaccgtgcgtccattgacgatgtttacacgcaggtggtaaaagatttgacagaagcctatcctgttttaccggcgtttgacgttatcaaatcaaacccaacgcaaagcgctgtaaatacgattttagccaaggcatacctcacttggggacaaaaaccgctttcacaagacgaggtagaggccattaaaaccaatagagtagaccctgtaaagccggcggtagataccgaaaagctggagaaagcgatcgaatacgccgacaaagtgattaacagcggtaaatacaaactgcttgacgatttcaataagatttggggcgtttcaaacgaaaacaatgacgaagccatattctctattcatcatgacggtgacggtattgacgcgcaaggcaaccaccaaacgcattgcagtttctctgctccccgcgaaccacgttctgatccgcatatcagctacgccgacatctcatttgagaataaacttatcaatacagacaagcgcaaattgtattcatacgtgacgcaaacaacctacgccgatggcaaaattgatacattaacctggccggtaagtatcgttcgcatgggcaaatggatacaccgcgcacaggatggcacaaacattgccctgaatgatcaacccaataatattgaccacattgatttccgctatgccgaagtattgcttattaaagctgaagcattattcttcacagacaaagccgccgaagcattaccgcttatcaatcagttacacaaaagagcaggaatcgctgagttgactggctttactctggaaaacctgtacgaagaatgggaaagtgaattggctttcgagcaaaaacattggttgaatctggtacgttggagaacccttatttcaagcatcgtggacaaagttcctacctatgagtattataaagacgactataagacggctaaaagcatcaaagctgcattccctacccttggcgacgaattaaatataccgttctatcttcgtgcttacatccatttgcataaaaaagtggaaaacatcaatgggcatttctatcgtttcccgattccattgagtgaagattcgaaagaacagggtatcattccacaaaaccctggctacggaatataaacagtaatcggcacccgttcggatgtgcttgccacaccaacgcgggtgccgataacaattaaaataaaataataatgaaaacagtaacaaatgtattcaagctgatgctattagtctgcatatcagcagtaatcgtatcctgcgaaaaagaggatgaaaaagagggtaaaaaagcaacactcatctatgaccagattgatttggtgttggtaaaagggggtacctttacccagggagcaaccggagaagttggtgatgatatagagagacctgcccatcaggtaaccttgcatgattattacattgcgagattggaagttactcaaaaacaatggttcgatgtacttggacgttggccggacttaaagccggacaatgtcaatggcaagggtgataattaccccatttactatgttacttacgaagacgtgcaggactttctaacggaattgaacaaacaaagcggtaaaagttatcgcttgcctaccgaatcggaatgggagtttgcagcacacggaggcctgaaaagtaaaggctatacatatagcggcagtaatagtccggatgacataaatatctattatggcattgctaaaggaacattcgtagttggcaccaaggcgcccaacgagctgggcctctacaacctgagcggcaatgtttgggaatggacgagcgactggtttggcccctacacggccgatgcacaaaccaaccccacagggcctgcaaccggcacacatcgggtaatccgcggaggtacatgggtgaatacaccctatggaatccgtgttacagcccgttacggcgaggatccggaagattcaaataagttgtggggcttccgtgttgcacacgatgttgagtaattattcgcattgaatgaaagagtttaatttttagtgcatgtgtcagtgttggatattgccttgttgtcgttttcggtaacaaggcaattccttaattaataattatttatccgaatgaaaacagtatttttaaacaccagtttcaaattgttcctggcggtaatcgttggattattgttgggacaagttgccaacgaaggtgttatacgagtcatacttccgctgaaatatgttttggggcagctcatctttttcctcgtgcccatcatcattttcgggtttatcaccccttccatcgcgcggttgaagaagaatgtatccaggttattgggtgtttccctgttgctggcgtatctgtcgtcgttgggagtcgctatttttgccgctttagttggctacaatgtgatcccgtttctgcatatccatccggaggtggaaggcatcaaagaactacccgccctgcttttccggctcgacattccgcctctcatggcggtgatgagcgcgttggtattggcattaacggttggcttgtccgttacctggaccaagtcggaaaagattgaacaggccttgtatcagtttcaagacatcgtttcggtcatggtcaaccggtttttgatacccattctgccgtttttcatagcggccaatttcacggtattcagttacgaaggcgccattgtttcgcaattgcccattttctttgccattgtattgatagccatcgtttgtaatgcgttgtggctgacgtttttgtatggcgtcgccggtgtatattcgcgaaagaatccttggcgagtgttgaaacactacgggccggtcgcattgacggctatgggaacgcaatcttcggcggctacgttgggcgttgccatcaaagcagcgaaaaagagtgatattctgcgggatgatgtacgggatttctccattccgttatttgccaacgtccatttttgcggttcggtgttggatattgtgtttttggttattgtcatctctcaggttctgtacggtggtttgccgacaccggccactttagccgttttcattcccctgttgggaatattcgccatcggtgcgcccggattgcccggtggaacggtggtcgcctcgttgggcatcatccaatcggtcttgggatttgatgaggccggcacggctttattgctgacggtttttgctttacaggacagttttggaacggcaaacaatattgtgagcgatggtgcactgtcgcttatcctatccacgtattccgataaaaataaacaagaaaaaacatgaatatgaaaacgaatcagttcaatacaatcgcctggttgaggcgactggctgtttgcagtatcggtctttggttggtggcttgcgaaggaggcgatacgcgctcggagcaggtgattatctttgataatattccgccggtgaactttattgacgggtctcttcagttgacggcaagcgtttcgtcgggactgccggtgacgtttaccagtaccaataccgaagtcgcctttgttgaagaccatcgcctgatatttattcagcctggagtaaccgatgttacggccagtcaggcaggcaacgggggatttaaggaagcgaaaagcgaaacgcgtcaagtgattatccgcgactatgatccgaataaaaaagaccagacgattactttcgtccttcccgttaccgaatggaaattgagccagggaaggctgcaattggatgctacttcaagttcgggcttgcctgtttttctgagcttggacaataccgatgccgcctacattgattccgatcatttttttaagattacggattgccatgccgcctcgcaggttacgataacggcttcgcagaatggtaatgaggaatataatccggcgccgaatatttcatacaaactgaatatttttccttgatccggatatgaaaacgatacattatatactgcttctcgccatgatcctctgttgggcaggctgtgacgatgataagggcgaaaacagtccgttgccggtgattgttccggaaccggaagagaccattcagccgggcgaggtagatccgaaagcgcggttgaaaaccgttctgtcatttaccggtacggatgacaaccagtatgtattgacgctgcttgatccgaaaaagccgcaggaaggagccaacctgataacggcctatatccatcggcaaaaagaggacaaaagctatgcgctcgtaaaaacctttaaattgaaaatcgacccgcgaatgccttccatgggcaatcatgcctcgccgaataatgtggacttgacatgggatgactcaaacaaagtttatcacggaacggtcaatttcagcatgaccggctactggaaaataaacctcatcctgctcaatgaagcaggcgaaatcatacaaggcaatgctgtaaccggcgaggagaaggcgagcagcatctattttgaaatagaagtatagtttttagtataaacagtaattattaaacaaaatgaaacggatatatacctttctattatttgcgctattcgttagcgcctctcatagtcagcctgttgcaggcttatctgaagcaacagtagccggactttccgcgggtgacggcgaacataccttccatttttacacagcggacggaaaactggcacgaggctattccgaagtttttattgccctgaccgacaaggacgggcattgggtggaagattttaccgtcagtaatttcacccccatcatgaatatgggtatgagccaacattctactcccgttgggcaagtggagaaagtggcgggcaaaccgttgtacaaaacatggtttgctttcctgatgcataccggtcagatggacggtgcatggacgctggactttgattattccatcggttctgcatcgggaaaaatcacgggagcatcgcctcaggtggatgcctatcccgctaatgccaaatggatacaggcgtttacctgtaacagcgagagttattatctgacccttgttacgcctcagtcgctcaccgaaggaagtcaaaccgtgcaagcctatatcaacaaacaagaagatgcgttgcagccttattccgttgttgagggtggattcaaaatagaaattaccccgtggatggccgccatgaatcatggttcgtccggcaacacgcctttggagtggaatgttgagcggaaggtttatgaaggaaccctcaatctgggcatggagggagattggcggatttatctacaagtattggatgccgatgccgatacggttattgccggcgccggtggaacggaaagtaccctttactgggatgttcaaacgcatcagccggccggattatcaaccgtgacaacggcgaaagccgcgtccgtttatccgactttgtcgaaaggcgaaataacagtaaaaacgcaagaaagggcaacaatcagcgtgattgatattgcagggaaaacgcttgcatcctatctggttggagcaaatgaagcgtttcccgtaggactgaattatcccaatggcttatattttgtggagatagaaaatgaaaaaggcatcacggcggttcataaagtgattttgcaacgatgaacatcccaaagtgcgcaccggtgtttgggttctggtggctgttgtcctttccgactttctcgcaaaccgttgctgttgacaccgtttcgtggtcgttggatataaaggaggtcgttgtaacgggcaagcagggtattgaccacaaccggcaggtaaagcccatatcgtcggttgaagaatacctgcaaacttccgaaaaggtcaatatgatcaagcgtggcggctatgcctgggaggcgaccatcaacaatatgacctccgagcgcattgccgtaaccattgacggcatgaagatattcagcgcctgcaccgacaaaatggatccggttacctcctacgtggaaaccatcaacctgagcaaggtgagcatcggctccggctttagtggcgctcccaatgcctcaaataacatcggaggcagtttggacttgcaactcaacaaaagtggttttggcggtacgaattgggacgcacaacttaattccggctacgaaagcaatggcaactacttggtggaaggcgtttcgggagcatattcagatgcaaatttttataccaatgccggactcttttaccgtcacagcgataattatgatgcagggggaaggaaagagttgccgttctctcagttcacgaaaaagaatgtctttaccaatttgggttacaaaccggcttcggggcacattatcgaaagtacggttatttatgatatcgcctccgatgtgggttatccagccctgacgatggatgtgagtacagccgaagggttcattacttcgctcagttaccggcgcgaagatttctcgcggattttctcgaaatgggagactaaaatctattacaatcgcctcacccacatcatggacgatacacatcgtccgaatgtggtgttacacatggatatgccgggaaaaagccgtacctccggcgtttattccacgctcaacgggctgcaagggcaacatcggtacatcttcaattgggacttatacgataaccggtcgtatgccgagatgaccatgtatcccaccgaccccaccgaaatacccatgtttatgcttacctggcccgacatccggacgctgaacagcggtctgtttgcttccgatgaataccggttggatgaacggaataccatccggctttcgtccaaaatatccatccaaaggagtagcgtagagagtagttcgggacttaaaaccttgcaaatttatcattcaggcatgcagccgtccaacaaccgcctggtatggaacgttgccggacagtatcaatttcgcaccggaggctgggaacttgccgccgaagggggctacggcatgcgggcgcctgcctcatcagaggcatacggatactttctgaacaatactttcgatggatatgactatctgggcagtccaaggcttcgcaacgagcggtccattgaaggcaatcttgcgcttgggtggaaaagcaagaccatcagtatgaatatagaagcgaccggtttttatttcacggattatatcattggaaagccggatgcaacgctgtctccgatgaccattggcgcttccggcgtcaaagtatatcaaaatctgcctcatgcgttgatgggaaataccagtgtatcatttcgatcctatttcctggattatttcgggtggaaaagccgaatcacatacagcatcgggcgcgacaacaacggcgcctccctgcccctcatatctcccctcagtggcgctacgtctttatcattcaaccgctatcctttttcggcagaaataagtatggacggagctgcgcgacaagtgaatttcagtcccgaatacggcgaagactctacggcagcatatcttatcggcaacttttcgttgggttacagtttccgcatcaaggcaacagaattgaatgtaaaagctggaatagaaaatctgttcgatacatactattccacttattcggattggaagaatattccccgcaaagggcgaaacatttttattaacttgggaatagctgttttgtgattttgttttgtttgctttgccgatgagcctttattttcaacgacttgtgtggtgttttaacgaaaagcgaggactttcatccccgcttttaatgttttcacaacggaataatccttattgtgaattgcttcaaaaattatacggcaaaaatacatattttttttgagattccacaataaattattaattttacattttattgtaaattatttgatattatgaagaatatacttggattagacttggggacgaacagcatcggttgggcgttagtttcaagaaacgaagaaaataaaattgaggggttaaaaggacttggaagccgcattattcctatgagtcaggatattttgggaaaattcgatagcggaaattcaatttctcaaacggcagaacggacggggtttcgaggaacacgacgattgcgggaaaggcatttattgcgtcgtgaacgcttacaccgagttttgcacctgttgggatttttgccggagcattacgaacagaccattgattttgagaaacgtctgggaaaatttctacccgacaccgaatccaaattaccttggaaagaaatagaagaaaagaaatatgaatttctttttcaggattcatttgaagaaatgttgtctgattttgcacaaatacaaccgcaattattaaccgaaaacagaaaagttccttacgattggacgatttattatctgcgaaaaaaagcattgcaacaaaaaataacgaaagaagaattggcatggatactactgaatttcaatcaaaagcgcggttattatcagcttcggggagaagaagaggaggaaaatcccaataaacgagttgaatttcatgccttaaaagtagttgatgtcactgccgatgagccacaaaagggcaaagcggatatttggtataacctgattttagaaaacggttgggtttacaggcgctcaagtaaaacgcccctattcgattggaaagacaaaataaaagaatttattgttaccaccgatttgaatgatgacgggagcataaaaaccgataaagaaggcgttgaacggcgttcttttcgggcgccatcgccggatgattggacgctattaaaaaagaaaaccgagctggatataaacaaaagtgataaaactgtcggaacgtatatttacgatactctattgcaaaatccaagtcagaaaatacgtggcaaattggttcgcaccattgaacgtaaattttataaagaggaattaaagcaaatccttgaaaagcaaaaggaattttacaatgaactaaacaatgatgacctttttcaatcctgtgttacagagctttatccttacaatgaagcccatcgaagcatcctccaaaatagtgactttacgggattgtttttgaatgatattattttctatcaacgtccgctgaaaagtaaaaaatcgttgattagcaattgttcttacgaatttcgggcttttaaaaatgaatcgggagttatagaaaaattgccgataaaatgtatatcaaagtcacatcctttgtatcaggaatttcggttgtggcaatttattcacaatttgcgaatttatgagcgggaaaaagaagtcaatgggaaatttcaaacagatgtggatgttacgactgaatttcttcagaccatagaagacagggtcaatttgtttgattggttaaacgaccgaaaagaaattaaacaagatactctgcttcaatcttattttaagattaaaaagagaaacaaatcggatgataatttaccttatcgttggaattatgtggaggacaaagaatatccctgcaacgaaacatcttcacagatacacagccgattatccaaactgaatattcctgtagatttttttggtaaagaaaccgaatttgccttatggcatattctttattcggtggaagataaagaagaaataaaaaaagcattaaaatcatttgccggcaaataccaattgagcgatgaatttgttgatgtatttgcaaaatttccaccattcaaaaaagaatatggcgcctattcggaaaaagccatcaaaaaactcttgcctttgatgcgaatgggaaagtattgggatgagcatgcaatttcggacgaaacaaagaaacgtattcaatctattcaagaacgattagcagacttcaaagaaacagaaaagaaaatagaagatgtttcagacgatgatattcccaagcaagtcttgaaaagttttgtcgatgtggagaatccgtattcgggattaaacacttttcaggcatgttacgccgtttatggacgtcattcggaagcaagcgatctgacaaggtggaaaactccggaagatattgacaattatttagctgaattcaaacaacattcattacgaaatcctattgtagaacaggtaattacggaaactttgcgagttgtacgggatgtttggaaaaaatatggcgatatagctgaaatacatattgaattgggtcgggaaatgaaaaatcccgccgacaaaagggcgcaaatgacagctcggatatcggaaaatgaaaatacgaatctacgcatcaaagcattactgatggaactaaagaatcattcagatgtggaaaatgtgcgcccgtactcccccagtcagcaggaaatattaaaaatatatgaagaaggtgcgttaaattcggttgctgaaataccggatgatattcttaaaattaccaaattaagccaaccgacacaatcggaattaatccggtataaactttggttagagcaaaaatataaatcgccttatacagggttagtgattccattgggaaaattattcacttcagattacgaaattgaacatattatcccgcaatcccgttactttgatgactctttgagcaataaagtaatctgtgaatcggaagtcaataaaaagaaagacaatcaattgggatatgagtttgtaaaaaagcatgcaggggaaattgttgaccttggcttcgggaaaaaagtgcaaatacaatctattgatgcttatgaacggtttgtccaagagaattacgggaaaaacagaggaaagttaaagaaattgcttttggaagatattccagaatcctttatagaaagacaattgaatgacagtcggtatattagcaaaattgttatgggattattatccaatatcgtacgagaagataaagaacaagaagcaaaattggataatgttattccttgtacaggaggcataacaactattctgaaacaagattggggtttaaatgatgtatggaatcgaatagtaacgcctcgttttgaacgcatgaatctgctgaccaagagcaactcctttggagaatgggtaaataagaatgggaaaaaggttttccaaacagaattgcctatagaactacagaaaggtttcaataaaaaacgtatcgaccatcgccatcattccctggatgcggtaattattgcttgtgctacgcgagaacacattcaatatctgaataacgaacatgcgcattctaaaaataatgatgttcgttatggactaagaaataaactccgccgaatagaagacagagaaattgaacgaatagaaaatgggaacaaagtgcgcaagacaattaaagtagcttgtgaatttcacaaaccgtgggatacttttacgcaggatgttcaaaatgctttagaaaacactattgttagtttcaaacaaaacctgcgagtaatcaacaaaacggtcaatcatattcagtcttataaagatgaaagcagtaacttacagcttgaccggaatgggaaacccataaaaatcagtcggaaacaagtgaaaggagataattgggcgattcggaaaccattgcataaggataccgtagcaggacatgtcaatttgcgtttcaaaaagcaagtcaatctgtctgtcgcaatagaccaatgggaaatgttagtagataaaaatctgaaaactaaaatcaagcaactgattaatgatggattagacaaaaagaaaattcaaaagttctttgcggacaaagagaacagttggatggggaaggaggtttcaaaaccggaagtatattatttctccgacgagaaagaaaaattagtagcatcacgggtaactttggatatctcgttcaattcaaaaaaaattgaatcaatcaccgatacaggtattcaaaaaatattgcggcaacacttggaaaaatacaatgaagagaaagatgggaaaatcatagagtatccggaattagcctttgcaccggaagccatagaagaaatgaacaaaaatatttcagctttaaacaagggtaaatttcatcaacccattctaaaagtacggacgtatgaaccgaaaggaaataaattcaacgtaggtgtcaatggaaacaaaaaagataaatttgtagaagccgcaaaagggacaaatcttttctttgctatttatgcagatgaaaatggtaatcgctcgtatgaaaccattccgttgaatattgttgttgaacgattgaagcaaaggttgaacgcggtgcctgaaaagaatgaaaaaggatattctttgttgttttatttgtcgcccaatgatttagtgtatgttccgacggaggaagaaatagataatccttactcagttgatactaaaaatttaacaaaggaacaaaaggaaagaatttataagattgttagtttcacaaacagtcgtttgtacggaattccatacgttgtagcatctccaatagctaataaactggagtttactcagttaaacaaattagaatttgtggaaaatcgagcattgaaagagaattgctgtaaactgaaagtagatagattgggtaacttgctgtaaaacaaagaaataaagaaacggctaagcagggaaaaacaacttagccgaaaagaattaattatttttctttttttctttgacccaaaaatgaaaaaatttactacttttgggcatgatttttttgccattctttataatacttcggcaaaaaacttctacttcgtctgtaattttatccatgattttaaaattgcagattaacaatggaggtaacagagcctcttgtaagcctaatcaaattcgcactttgattaggcttttttgtaaaaaaggcataagaaagaatttttgaaagcaattcaacaacacttttactgatttatataaagcaaatatatcctatgcctttatgctattttttctaatactttttattattgtttatacttttactatttatataaagcttttaaatatgcttgcgccggcaaaattaaaaaataataattaaaacacaaaatatttcaataaaaaatttatctttgcagtcttaaaatgctctaaagtaactactaatagtcgaaataaatttccatgattaagaaaaccctttacttcgagaatcccgcctacctcagcatgaaggacaagcaactcattgccaagcttccggaggtggaaaaaaacgattcattacccgaatcgttcaagtcggggagcataaagactattccgattgaagacattggagttgtcattttggataacaagcagataactatcacgcacggattgattgaagctttgttagcgaataattgtgccttaatcacttgcggaagtaaccggatgccggttggtttgcaactgcctttggatgggaacacggtgcaaagcgaacgttttcaggcgcaaatagacgtatcgcttccattaaaaaaacagttgtggcaacaaaccattcagtcgaaaataaccaatcaggcgtatgttttggataaatgtagaaatggaggaattcaaaaatgcagtaatgtgcctgtgggtaatatgcttgcgtgggtaggtcaagtgaaaagtggcgatagcgacaatttggaaggacgtgcggcagcatattattggaaaaaccttttttcgtccatagaagattttacacgtggacgggaaggagttccgcccaacaatttattgaattacggttatgccattttgagagcagtcattgctcggtctttggtagcgagcggtttattgccgacattcgggatacatcatcataatcgttataatgcctattgcttggctgacgacattatggaaccttatcgtccttttgtggataaattggtggtggaaatttttaatgaagaaatgacgaaatgcaggaatgtagaaattaacccgcttgaatttgaattgacgaaagatataaaagcaaaattacttcaaataccggttttggatgtgattgtcaatgataaacgaagtccgttgatggttgcagccggtcagacaaccgcttcgttagccaaatgttatttgggagaaatgcggagaattgcttatccgtcttttgagaattgaggaatttagaaatgtaggaatttaggaattgaaaaaatgagaaataaattttgtatagatgaaagagaatgttattaagggaaagagttttgaatttgctgtcagaattattaatttgtataagtatttgaataccaataaaaaagagttgattttatcgaaacaaattttacgcagcggcacttctataggagcaaatgtggaagaagctattgcaggacaaagtaaaaaagattttgttgcaaaactttcaatatccttgaaagaagctaaagaaacgcattattggttgcgcttgttatctcgttgtgaatatattgatgagcagatgtttaactctataataaatgattgtgatgaaattattgtaattttaacgcgaatacttcaaacttcaagaaaaaatggcaattaatttctaaattacttcatttctaaattactaaattctcaaggtggaacgtttcagcgaatatcgaattatgtgggtattggtgctttttgatttaccgacggaaacaaaaaaagagaaaaaagctcactcggatttccgtaaaaaattagtaacagatggatttaccatgtttcagttttccatttacctccggcattgtcccagtcgtgaaaatgcggaagtgcatatcaagcgggtaaaaggtttcttgccggaaaaaggatatgttggaattttgtgtatcacggacaaacaatttggtgcgatggagttgttttatgagaaaaaagagaagacggtattcactccatatcagcaattagaattattttaaaaatgaaaaaaacaaaagtagtattattgattattgtaatcggattggctatcattgccggtggtgcggtgtatatgtttggtgtttcgttggacaaaaaagtaacgtccaccgacgaggcagatgcttacgagtttctgttcagccacgatgccagtttaaaaccgtgggtggatagtttacaggcacattcggcattgtgcgatacgtttatcgtggcggatgatggcagcaaacttcatgcgctgtatgtgaaatcggcgaccgcatcgcccaatacggcactcattattcacggatataccgataatgccattcggatgttgatgattgggcatttgtacaatcaagaaatgggatataatatcctgcttcccgatttgcgagcgcacggcaaaagtgatggagactgcattcaaatgggttggaaagaccgtttggacgttctgaaatggatagatgtttgcaaagaaatctatggcgatacgactcgtatggtcgttcacggcatctcgatgggtgctgcaaccactatgatgctgtcgggcgaaaatttaccggaaaatatcaaatgcttggttgaagactgtggctacaccagtgcttgggacgagttttcatacaaactgaaagaaatgtatggcttgcccgcatttccgatattgtatgcgacctcttggtatgcccaaatgaaagtgggctggaatttcaaagaggcttccgctttgaatcaattaaaaaactgtccattgcctgtgttttttattcatggagataaagacacgtatgtgcctacgtggatggtctacgacctttatgacgctaagccgggagagaaagaattatggatagtgcccaatgtggaacacgccgatgcttattgggattgtacagacgagtatgttgctaaaacaagggcatttgtaaataaatacatctaaagaaataacattatggaccaaccaaaaattgaacgattattgcgcttgatgaaaatgctgaccggcaatatttcatacaccgttaccgatttgtcgaaacggttggatatgtctgtgcgcacgatttatcgctatatcgacacgtttcgtgaagccggatttatcatcaaaaagcaaggagatatgatacggcttgacaaatcatcgccctatttcaaggatattagccaattgattcattttaccgaagaggaagcctatatcctaaaaagtgctattgagagcattgacgagaataatttattgaaacaaaatctcaaaaagaaactctcgactgtttatgattacaaaattttggctcaaaccgttgtgcatgataaaaatgcacgcaacgtcaaccaactgattgaagctattgaaaatcggcaacaagtaatgctgtgcaattacagttccgccaacagtaagtccattcgtactcgcaaggtagaagcctttgcttttaccaccaactatgtgcaagtgtgggcgtatgaggtggaagaaaagaaaaataaactgttcaaaaccgaccgaatagaatccatacaaattttgcccacacaatggcaatacgaatcggaacataaggtgggctacattgatattttccgtatcagcaattttgagcgttatccggtaaaactgcgattgggtttgcgttctgcttcccttttgacggaagagtatcccttggcagaccagtatcttacgaaaataaatgacaatgaatggatgcttgaaacgaatgtttgcagttacgaaggggtagggcggtttgtgatgggattgttgagtgatattgagataattgattctcccgaatttaaagtgttcatactcgaaaaaataaaattgtatgaaaaaataatgtctgtgtcataaattgtcaaaaaacggttgtttctttgcagcatatttcaaaataaaacaattaaacaggaggacaaaattatgattaacagacattttttaacaacccacattgcgggatttgcctattatgacggcatagatgttattgagaaattaaacattggaacggaactaagtttacaagccgaaccgacaaatctacatgatgccgatgccgtagccatctatttagatgataccatgttaggatatattccatccgaagaaaatgaacgaatcagccaattcttgcaacttggttatgatgatttgttcgaagtgaaaataaatagaatatcgttggaagttcatccggaaaaacagtttggaatagtggtcagaataaggggaaaagcaaaatgtataaaataaaactattatgaatttatatcgtttcttttataagataaaagaatttccacgagacctaaaacattggtatcaaagggctaaaaaaggatattcttacagagatttgtggagtatcgactattggtttatggaaatcatgcccaaaatgttggcggattttaaaaagaatcttcatggttgtccatctcaatttacgactcatgccgttggcacgaaatatcaggacgtagataaaggaatgaaagattgggaaaccgttatcgaccgaatgatattttgttttaccgaaatgcacgaaaatacttgttcaatgaaaaacgaatatgaagatgaatatcaccggcaactacatcaacctaacgaaggtaaacctgtaaaagaatggtttattccctgtgaagatacttataagggcgagaaattgtatcgatggaatggaggcgatgtcgaaccagacttaaaagaaaattggtacaaaaaagttcttgacatagaagaatatcggggaaaaatgaaaaacgaaggattagaattgtttagtaaatatttttggaatttgtgggattaacaacttgattaagaaatcaaaagcgttaccttgtttttacgaaaatcaaaaatattttgatggagagaattggataactattttcagtaaatttgagtttattcgtagaattaaaacgtatgatgattatacaagtatttgcggagaagtgaaaactccgttgggaacattaattttatacggaagtattatcggtagtatgcctattttagaaatgatttggaacggcaaaaagaagatattgacagattgagtaaaattggcaatgtatgtttaacatttcgtttttaggctttcccctatccgagtagagtgatacggcaagaaatgaatgttttttttgaacaatcaattgataaatactactcaacaacacgaaaatagtgttattcacattattttgagcgaaaatttaacatacgaattagaaattaaatcacaaatgatttcgatagaaaggaaaaattccgatcataatttggtagtgacagatattaatctcaaataaaatccatcactatgtcctacttaaacaataaaaaatcccactaaacaagtgggattttttatatccgaacagtttttttgttttctaagaacatctgtaaataattgacaaacaataaaatatggcaagcgtactgttcaagatgtcaaagataataatttttgagagcaattcacaaccgccagtgggttaaagaagatattaacactactgttcaagatgtcaaagataataatttttgagagcaattcacaacccaagtttgcataggattcactctgttggtactgttcaagatgtcaaagataataatttttgagagcaattcacaaccgtatcacgcattgtatgtaccttctttactgttcaagatgtcaaagataataatttttgagagcaattcacaaccaagaagcgcaaaacgcacttgcccaaagcactgttcaagatgtcaaagataataatttttgagagcaattcacaacaacatcattgttttgtatatcttttctatactgttcaagatgtcaaagataataatttttgagagcaattcacaacccggtattgccggggccgcttccgtagcaactgttcaagatgtcaaagataataatttttgagagcaattcacaacaatatgcgtacctatccttaaaagtttttaactgttcaagatgtcaaagataataatttttgagagcaattcacaacaaaattgataatcttctaaattatagctaaactgttcaagatgtcaaagataataatttttgagagcaattcacaaccttacgttgagcattgttctctagattgttactgttcaagatgtcaaagataataatttttgagagcaattcacaacaatttgaaactgaaattgaaggggatagaaactgttcaagatgtcaaagataataatttttgagagcaattcacaacacctatggatggaggaagaacaggaaacttactgttcaagatgtcaaagataataatttttgagagcaattcacaacggtaatccggcgctttcgggactaaatggtactgttcaagatgtcaaagataataatttttgagagcaattcacaacgaatattcggatgttttgtcagcaatttttactgttcaagatgtcaaagataataatttttgagagcaattcacaacaagtatcaatgtcttcatcttcactatccactgttcaagatgtcaaagataataatttttgagagcaattcacaacgaatgcaagaaggtgttttctgaaagtagtactgttcaagatgtcaaagataataatttttgagagcaattcacaacgcacagtggaaatcattgatagaacatcttactgttcaagatgtcaaagataataatttttgagagcaattcacaacgggttacaggtttcaaaccgggtttggttactgttcaagatgtcaaagataataatttttgagagcaattcacaacaaaagactgccggaaactttttccgctgttactgttcaagatgtcaaagataataatttttgagagcaattcacaacaaattgttatactaaattttaatagggtgaactgttcaagatgtcaaagataataatttttgagagcaattcacaactgtttggtaaacagacgagaaataccgtcgactgttcaagatgtcaaagataataatttttgagagcaattcacaacgggttacaggtttcaaaccgggtttggtttactgttcaagatgtcaaagataataatttttgagagcaattcacaacacgcttcttgtagtccttttcagacacattactgttcaagatgtcaaagataataatttttgagagcaattcacaaccagtcttcccatgtttcacgacaaggacggactgttcaagatgtcaaagataataatttttgagagcaattcacaacagcttcttccgaatcttcaatccagtcaccactgttcaagatgtcaaagataataatttttgagagcaattcacaaccgaaatccccggctatttcatctccggatgactgttcaagatgtcaaagataataatttttgagagcaattcacaacgattgcagggtggtgacgtgttgcagccgcactgttcaagatgtcaaagataataatttttgagagcaattcacaacactaaccggttccggtaattcataaacggcactgttcaagatgtcaaagataataatttttgagagcaattcacaacaaaatcgaatcctggccgaacgtcgtccatactgttcaagatgtcaaagataataatttttgagagcaattcacaacacgcttcttgtagtccttttcagacacattactgttcaagatgtcaaagataataatttttgagagcaattcacaactattgaacgggcacggcttatgatgctttcactgttcaagatgtcaaagataataatttttgagagcaattcacaacgcattgagttcggccaaggcagtccaagttactgttcaagatgtcaaagataataatttttgagagcaattcacaacttcagttccttcaggaacggatatcggtcgactgttcaagatgtcaaagataataatttttgagagcaattcacaacggacggtgcgcgttgaaatcgtaacgtcttactgttcaagatgtcaaagataataatttttgagagcaattcacaacactaaccggttccggtaattcataaacggcactgttcaagatgtcaaagataataatttttgagagcaattcacaacaattattgtttttaataaatattttgaatactgttcaagatgtcaaagataataatttttgagagcaattcacaactgtttggtaaacagacgagaaataccgtcgactgttcaagatgtcaaagataataatttttgagagcaattcacaacgaa

SEQ ID NO: 1253 - DNA, 23169 bp, synthetic construct
  misc_feature 1..23169: note = Synthetic
  source 1..23169: mol_type = other DNA
ttggtaattatagtgatttaatatattcactgggtgttattccttcaatttgtttaaaaactctgttaaatgtagattgatttgaaaatccagcctccgaatatatatagagcatggtaagtttctgcaaatcacttttttcgatcattttttttacatgaataatccgcaatgtattgatatagtgattaaaatttttgtaattattgatctggatggcttttgatatatagcttggatttacattcataatcgaggcgagtttggaaaggctgaaatcaggatctttaaagagcttttgactgttgatttctgagtctgttttctcaaataattttttcagcaatgattcatcaatattaacagttttgttattctcgcttttcttcggttcttctttcaaattttcttcttctttactgttgagtatttcctgaatacttttggtttctgctattttaattttttctttataataaataagtaaaagaaccactaaaaaatttgctaaaaatacaatcgtgtccgacagcagaatttcatttctggaatacactctgagattcaaatgaaaatgagtagaaataatatacactaaagctatcaaaataaaagtataaaaagagtacatataacactctcttttactcaaaaaaatgtatgctgcaatgggaatcgggaaaaaccaaactacattcagaatggtatatttccagaaaacaaataataaaaagcaggcatataatggagcaacgaataaatagatctttataaacttaaatggattaaagttgttcagtgtattcaaaacaactaaaagtatcagaattattataaaaccgcaagcagtataataggtcaacagggaatctttaacgtaaaaaagatacattattgtaaacagcattaataccgaaagcattatcttaaagtaagccgacaagaggttttttatttccttttctacccctttttcataaatctcttctatcatgtgtgctttattttcttatttattgaatttgattaatttaaaatattgatttacaattatttatttttttataaatgatttattgtttttcatttatcacaaatatttatccctatgttcaagtgtttatttttgtaaagcgaaaattaaaacaagataatttctgtaagcgcaaatatagttattgtttaaaaaaaatcttgtttaaatactaaaaatagcaaaatatggaatttatattttgtttttcatcagaataatacaataaatacagtcaacatgaaaaaacacattatgtttgttttactgatctcgtcagtatctctttttaacagtcaagtaggtattaatacagctaatccccaaggtatcttccatgtagatggaggaaaagataatagcacatctggaattcctacagaatcacagcaagccaacgattttgtcgctacagcttccggaagtgtaggagtaggcacagtagctcctgatgcttcatcaattttagatttaacaagttccagcaaaggttttcttgcaccacgaattgccctaacttcaaatacagatacgacaactatttcttctcctgctgtcggattgcttatattcaacaaaggaactggaggtcttagttatgtaggatatgtcttttggaatggaacagagtggagaacattcaatggaggttcacttgcaaatggtactataggaagcattctttgcgatcaggtagctcttactccggaaacatatgtgcttggtacttcctattccggaactttaacggtgagatatactggtggtaatggaggcatttatgccgctcagtcaatagcttctaccggtgttacaggacttactgccacgttagcttcaggaagttttgaagcaggttcaggggtgctgaattataatgtaacaggaacgcctagtgcaagcagcccagcgactgcccattttgcaattaatattggaggtaagagttgtgacgttgagataggctcaggattatctttgggtcaggcgaaatattggtatggctctatgcccgcaaatgtaggttccggaggtaccaatactgctactgttgttaccgcaaattatcttagcagttacaacaacggtgttaatgcagttccaagcattgatgggatgaggttcgactattatgctattgctcctgtaaccggaaacggtactatttcaggaattccacgtttggtaaatatttctggagaaaatataaaagtaagttttgccgccttttcaacagcgcaaaattatggcactatgaataaatggctgagtgacggacagttcattaatttagatgacggaatatggaacggttatggtgccaatgaaacaacaagcactgttcctaccagtttgtcgacacctccaacaggacttacagaaattgaaacgttggatatctggttgaacgagcgttggtatagagttacttactttcctgtgattgataataataatacaataagcgcagcagatgatatcagaaaagtggcaatttctgtgaccaggctgaaataattttcgaaatgttagaaaagccaagttagtctagaatatcaacttgttgaaatagattggtttattgttttctgcaaagaaagattgtatgattattgacttcaaaatttcagaaaactgacaaataaaaatactttagactgtttaatatttctgcttgtctaggaaaaataaaataaaccatacttttttagcaattaatttgaatattttttcttcactattaggctggaatcaccataaaagctatatttgcagcctaaattttaaaaataatgaaagaactaattgaaaaaatcaacgcagaatttgaagctttcacaactgaagcaaaccaacaagcagaaaaaggaaacaaggcagctggaacaagagctcgtaaagcagctttggaactaagcaagcttttcaaggaattcagaaaagtttctgttgaagaatcaaaaaaatagttgttcccaaaaccggcttttcagtcggttttttttattgaatttttacaaagaaatttagttttttaaatcatcactcttatgtagtcttgatttgcggattgtaaatcaaaagcgaatctcattcacccttgactttttcaccattcactattcaccagcaaccattcaccatcaccaaaccctttccgcgttttcccatttccgcgaatctctttatctttagggctacaatgattaatatgaagataaacagatttcttgcattgcctgttatgatggcgatgacgcaattttctctggctcagaatgccgtttctcaggaaaaacttaatcccgtagttcagaatttcgtgaatgaagtaaacaataattcccagcttgaaacgatggcgtatgaacttttggacggaatcggtccgcgactgattggaactccggaaatgcttgccgccaatgaatggacggcaaataaattgaaatcatgggatattgaagccagcctgcaacagtttggaacatggaaaggatggcaaagaggaattacccatgtggatatgacgtttcctcgtatgaaaagtttatcggtaacccagttagcatggagtccggcaacgaaaaaagcggtggaagcagaagttgttattctcccgaaagtctcttccaaagctgaatttgatcaatggatgtcttccgtgaagggaaaagttgttttgatggcacaatatcagaaaatcggtcgttcagacgatcaaattaaagaatttgccacgcctgaactgtatgaaaagcttaaaaaagaaaaagagcaggcttcaaaagagtatcagaattatataaaaagcattggctataataacgaaacgcttcccgaagctctggaaaaagcaggagcggcaggaattgcgatttccaactggacaggaattatgggagccaacagaatttttgaggcaaaaacgaaaaatattcccatgttcgatattgaactggaagattacggaatgttgtacagaatggcggaaaacggcgcaaaacccaagatcaggatcgaggtgaagtcaaaaatccttcccgaagccaaatcgttcaacaccatcggaatgattaaaggaaaagaaaaacctgatgaatacgttattctttctgcgcatctggattcgtgggacggcgcgcaaggcgctacagacaacggaacgggagttttaaccatgcttgaagcgatgagaattcttaagaaatattatcctgataacaaaaggacgattattgtaggactttggggaagtgaagagcagggactgaacggatcaagaagttttgtagcagatcatccggagattgtaaagggagttcaggcggttttcaatcaggacaacgggacgggtagagtagtaaacattggcggacagggttttgtacatgcttacgattatcttgggaaatggctgaatgcggttcctaaaaatattaaaagccagattaaaacagattttccgggaactccgggtggaggaggttccgatcatgcttctttcgtcgcagcgggagttccgtcatttgggttgggttctttaaactggggatattttggctacacatggcatacgacaaaagatacgtacgacaaaattatctttgatgaggtgaaaagcaatgtgattctaacggcaactttagcgtatatggcttcagaagaccccgaattttcgaaccgggaaaaaagagcaatgcctctggatgataaagggcagattactaaatggccggaagtgagaaaagcggtaagggattttaaggattattaaatatatttgcaaaaaatataagcaaccatgaaattattaaaactaggattggcggtattctgttttgcaatagccaatacttttacttatgcacaggaaactaatgaagccaaggcaaaatcgatcattgaaaagggaattgatgcaatgggcggaaaagagcttttcagcaatataaaaacgctatatacaaaatccgctaccataactgatgggagaaatgtatattttattactaaggaaatggctcccaacttaggaagttttgagatagaatatgaaggaaggactgtttaccgttcttggtttgacggcagtacaggctttgaaatggtaaatggtcaaaaaaagttggctgatcaggaagaatttaaagataaacccggaaggaagtatataatgaatgaactggcttatctggatccgtcattatataaagttgaattcgttgatacagataaagctgaaaatcttcataaaataaaagcaacagcaactgatggcagtgtagttaatttattttatgatacaaaagattttcttttgaaaaaagaaataaaggaaaatcctgtaaaaaattctttctctaccattctgtgtgaaaaatataaaaaattcaaagatttggttcattgttcaaaaaccgtattgagatcagaagacggagatcagattcttaatttagtcgatttgtcttacaacaaaaatattgacaagaaagattttaaataaataaaaggcgattcatcaactgagtcgcctttttatttaaagttgtgtatgaagaagcttcctgatctcttccatttttatttcttttacaatgtaggttttacagatctcgttgttgaaatgcatatgaaaatccatccgcatggatttgtttgatgattcattttctggctgttcataattgatccaaaaaaagaaaagatttgccagacaaagcaaatttcttgcaaatgatttcagaatattgggatagttaccgtaatcatcaattacttttattttaaaaatctttttgccaatagtacatccgaaaaaatgttctgttattgatcctaaaacaattgcacacggaattgaaagaatcagagctacaataaggggtttatgcaatatgaaaacgaaaagcagggtaaagggaatcatgtctataattttagaacacaatctgtccctgcggttcttttcgtaggtagtatcataagggatttcatattcaaaaaattcatagatacgtcttccttccgaatcaaaatttcgggttgccctgcgtgttgttttattttctttaagctctgaaattttcatcttaccatgtgtttgcatttcatttcaaccttttgtgttatgctgaacagaattttattagtaattataaaaccaaaatcatttaaaattcagttattttagatttttcaactccacttcgtttcgctcaaaatgacaatttcgtaaataaaataactatctaaacagacttgaatttaaaaccttaatcattcttacaaaaccatactcagctgaattctttttctcgcttcatcaatctccgttactcttacctgaacgtgctgatgcagttttaccacttcatttacatcggaaacgaagccgtcttttaactgggaaatatgaaccaatccgctttccttgattcccagatctacaaaacatccaaaagcggtgatgttattaacgattccgggcagaatcattcctgtttttaaatctttgatgctttttacattcggatcaaattcaaaaattttagccgcttttcttggatccagtcccggtttttcaagctcttttaaaatgtctttgattcctaaaattccgatgtctccggtgatgtagttttcgggttttaccagtgcgatcttttctttattggcgatcagctcatttgtttttatgcctaaatcttttgccattttttcaacaattccgtaggcttcgggatgtacggcagaattatccagcggatttttggcattatgaattctcacaaatgcggctgcctgctgaaacgctttttctcccagtctcggaacttttttaagttgttttctatcctcaaaagctccgttttcagtacggtagttcacaatgttttctgccattttttctccgattcccgaaacatagcttaataaagatttactcgctgtattcagattgattcccacagaatttacacatttcatcaccgtagaatccagttcgttttttaattgggtctgatctacgtcatgctgatattgcccgactccgatggatttcggatctatttttaccagttctgccaacggatccgccagtcttcttccgatggaaacggatccgcgaaccgtcacgtcatagcttggaaattcttcacgcgcaattttactcgcggagtacaccgaagctccggcttccgaaacaacgaaaacctgtaaaggtttgtcgaatgcaattttcttgatgaaaaactcggtttcgcggcttgcggttccgtttccgatggaaatggcttcaatgttatacgcattcaccatggaacggatttttttcattgccattccgctttcattttgcggagcgtgcggataaatggtctcgttgtggagcagatcgcctttttcatccagacagactactttacagccgcttctgtagcccggatcgattgcaagaattcttttttctcccaaaggcggagcaagaagaagctgtgtaaggttttcagagaaaatctcgatggcttttttatcggctttttctttcgcttcctgtaacgtttcattggaaattgctggttccagtaatcttttgtagctgtctttgatcgccagtgaaatctgttccgatgtttcgttgttggatttgatgatggcattttcaataaaatcaatagcttcttccttatcgatcccgacattggttttcacaaaaccttcggattcggctctcaacatggctaaaaggcggtgagaaggcattctgttcaggctttcttcccattcgaaatactgcgagaatttctgtgcttcttcttcgtcttttttggctttcactacttttgaagtaaccattgcttttcgctgaaataatcggcgcagattttttctcacatacatattttcgttgatccattctgccatgatgtctcttgcgccctgcaaagcttcttcttcggacgcaacctgatcgttcaggtattttgaagccaaaaactgcagatcctgaactttctggctcataatgatttttgccaaaggttccagccctttttctttggcggcatcggctttggttttctttctttttttgaaggggaggtaaagatcttcaatttcctgaatatcaaaactttcttcaattctctgtttcagttccggcgttaaagcattttgttcttcaatcgattttaagatcgattcttttctttttacaatttcttcaaactgtttactgagtttcgaaatctgttcaatctgtgtttcgtcaaggtttccggttttatcctttcggtagcgggaaatgaaaggaatggtgcagtcttccgccagtagttctaaagtggcattgatgcttttttcggatatgttgagggattgctgtatgtattgtgttgtgttcattttaaattttaaacggctaaaataatcaaaatgtcttttgtaaacacattttaaatttaaccatactgtttacaaaagctttactgtcttatttaaatttaacaaagacaaagaaagacattgtctgtttaagattttaagtttgtcatgattaaaattcaaataaaggaaaaattgattgtaataatacaaaataagatgaatatgctttgcttgaagataaactttaagcttttttaccacaaaagatgcaaaagatttaaacactttagttgtttaagtttaatccttaattggaaagaaagggcacgtaagttaaaaaaatctttgattttttctctttgcagacttttgaaatactttacataaatcctataaagtcttttgtctcttttgctgttaaatttataattgatttaagcaaacctgatacaaagatttttaaatgtaccatgtctatttaataatccttattttagcggaaaggtcactaatggaaactctgaaatttgatttcttgatgtatgataagataaaagtgtgggatgttttctatttttgtttccggaatttagaaattcagaataaactttaaacaatttaaataatatgaaaaaactaagtgttattgcattggttgcagtaggattggttgcagcgtcttgtaacaaagaaaaatcggctgaaaatgcagcgacttctactgagcagaaagtagcagaaagcaaaggggaagtattgcctgtagatacggtaggttctgtggtaaactggaaagcattccacaaagggggaatggctccgcgttggggaactttaatggtaaaatcgggagatttgagcattgaaaacggaggcgtaacggcaggaaactttgtgatcgacatgaactctattaaagtagatccggcttctgtaacggaaaaagataaaaaaccggcagatcttgaagcgcaccttaaaaaccctgatttcttcgacacggcaaaaaatccgacggcagatttcaaaattacaagtgtagcagatcttaaggaagctccaaaagatgcagtagcaggtgccaacaaaacagtaagcggaaatcttacgttatccggaaaaacaatgaatgtaacgttcccagccaaagtggatgtaacggaaaattcagcggcaatccaggctaaattcacggtgaacagagcagactggggaattaaattcggaacttccgaagccgatcctgcagaatggatgatcagcaaagacatcgaaatcgctgtagacgtaaaagctaaaaaataatattgttagatatttcagatttgtaaagctgccttttttgaggcggctttttttgtgtttgggattttgcatttccctcctgaaacagaagaaggcgagttgccccgccttaaatgttttcacaacggaataatccttattgtgaattgcttttcaaaattattgatacaaatataaaagaaaaattctttgaatggtttacggaaaacctcatttttaataaattttttcttcttatttttatctattatgaaaaactaaatagctatgactaaaaatatacttggactggacttgggaacgaactctattgggtgggctttaataaagcaagactttgagaacaagaaaggtgaaattcttggaatgggaagccggatcattccgatgtcacaggatattctgagcgattttggaaaaggaaattctgtttcgcaaactgcagaacgtacaaaatacagaagcgtaagaagattacgcgaacgatttcttttaagaagagaaagactacacagagttttacatattttgaatttccttccggaacattatgcttcacaaattgattttgaaaaacggtttggaaagtttaaagtggaaactgaacccaaattggcttggaaaaaaattgacggacagttttcatttctgtttcagacttctttcaatgaaatgcttgaagattttagggtaaacggacaggatgtaaaaattccttacgactggacaatttattatctccgaaaaaaagcactttcccaaaaaattgaaaaggatgaattggcttggattcttttaaattttaatcaaaaacgtggatattatcaattgcgtggtgaggaagaggaagagaatcctaataaactggttgagttttattctttaaaagttatagacgttttggcagatgaacctcagaaaggaaaatctgatatttggtattctttgattttagagaatggatggatttacagacgttcaagtaaaattccattatttgactggaaagataaaacacgggattttattgtaaccacggacttgaatgatgatggaagcattaaaaaagataaagacggaaatgaaaaaagaagtttccgtgcgccgagtgagaacgattggactttggtaaaaaagaaaaccgagcaggaaatcgagcaatctcacaaaaccgttggaacctacatttaccaagcacttcttgataatcccaaacaaaaaataaagggaaaactggttcgtaccattgaaagaaaattctacaaagaagaactcagacagattttagaaaagcaaaaggaatttcatcaggaattacaaagtgataatttgtataatgactgcgttcgtgaattgtaccgaaacaacgaagcgcatcaactgactttgagtaaaaaagattttgttcatcttttgatggatgatcttattttttaccaaagacctttgagaagccagaaatcttctgtttccaactgtactttggagtttagaaagtacaaagatgaaaatggagtagagcatacacaatatttaaaagccatcccaaaatctaatccatattatcaggaattcaggatttggcaatggatgtacaatttgaatatttatagaagagatgatgaacagaatcctgttacaggcgaatttttaagcacgaccaaagattttgaaaatctgtttgaatttttgaacaatagaaaagaaattgagcaaaagccattaatcaaatttcttttagagcaaaaagatgtaaacaaaaaattattgaatgttgaagctgaaaaatatcgctggaattttgttgaagataaaaaatatccctgcaacgaaaccaaaacgatgatttcttctcgtttggataaagtcgaaaatatttctgatgatttcctaacaagggaaattgagcagaaaatttggcacatcatctattccgtcaatgataaaatagagtacgaaaaagccttaaaatcttttgcgagaaagcatcatctggatgagagttcttttttcgaagctttcaggaaatttcctccatttaaaagtgaatatggttctttttcggaaaaagcagttaagaggttgttgcctttaatgcgattgggaaaatattggaattatgccgatattgataaatcttcaaaagcaaggattcagaaaattatcagcggcgagtatgatgaaaatataaaagataaggtaagagaaaaatcggttcatcttaccactgaaaatgattttcagggtttacaattatggttggctcaatatattgtgtatggaaggcattcagaagcatctatgattggaaaatggaattctgctgatgatctggaagaatttttaaaggattttaaacagcattcgcttcgcaatccgattgtagaacaggtaatcacagaaacgcttcgggtagtaaaagatatttggttgaaatatggaaacggagcaaaagatttcttcaatgaaattcatattgagttgggaagagaaatgaaacttcccgctgatgatcgaaaaaaactcacgaatcaaattactgaaaacgaaaatacaaatcttagtattaaagctttattggctgaaatgatgaatgatagttcggtagaaaatgtccgtccgttttcgccgatgcaacaggaaattctgaaaatctatgaagacggcgttttaaattcaggtattgagatcgaagatgaatatttgaaaataagcaaaaccgcacagccttctccatccgatttgaaaagatacaagctttggctggagcagaaatataagtctccttatacggggcaaattattccattaaataaactgtttacaccggaatatgaaattgaacacattattccgcaaagccgatattttgatgatagttttagtaataaaattatttgtgaatcggcggttaataaattaaaggataattatatcgggcttggatttattaaacagttcggagggacgattattgaacttggttttggtaaaagcgtaaaagtttttgaaatggaagaatacgaagatttcgttaaaaaacattatgctaataatcgaagtaaaaggaataagcttttattagaagatattcctgaaaaaatgattgaacgtcaaatcaatgacacacgtcatatcagtaaatatatttcgggtgtgctttccaatattgttagaattgatgatgaacaagcgaaaaaaataattgaagatgccgaaattttagcaagaaaagaaattgataaagataaagctgatgaaatcagaagaaaagcaaaatcattagcaactgatgatggcataaattctaagaatattgttcccggaaatggaaaaattacaactcaattaaaacaagattggggattgaatgatgtctggaatgatttgattttaccacgttttgaaagaatgaatcaattgagcaattcaaaagattttactgcctggaatgaaaatcatcagaaatatttgccaactgttccaatcgagttttctaaaggattttcaaagaaaagaatagaccaccgtcatcatgctttggatgctttggtaattgcctgtgctacaaaagatcacgtgaatttattaaataatcaatcggcaaaatcggataccaaacgctacgatttgaaaaagaaattgatgaagtttgaaaaagttgtttaccatcatacgcaaacaggggaaaaaatagaaagggaagtaccaaaacaatttttaaaaccttgggaaaactttacctttgatgcaaagcataatctggagtctactattgtaagttttaagcaaaatcttcgtgtcattaataaagctactaattactatgaaaaatatgtagagaaagacggaacaaaaaataagggtagagtagaacagaccggaacaaactgggcaattagaaaaccaatgcataaggatacagtttccggaaaagtagatttaccttgggtaaaagtaccaaaaggaaaaattttaacagcaacaagaaaaatcctcgatacttcatttgattcgaaatcaataggatctattacggatacagggattcagaaaattctcagaaattatctggagtttaaaggcagtccggaacttgcattttctccggaaggaattgaagatatgaataaaaatattgagaagtataatgatggaaaacctcatcaaccgatcagcaaagtaagagtttttgaactgggaagtaaatttcaggtaggacaaaccggaaataaaaaagataaatatgtagaagccgcaaaaggtaccaatctgttttttgcagtgtacgaagataaaaacggcaagagaagttatgaaaccattcctttgaatgaagtgattgaaagacaaaaacaaggtttgtctgtggttgatttaaaagggagagaagatttctatttatgcccgaatgatttggtttacattccttctaatgacgaattagaaaatataaataatatagattttaaaaatatagcaaaagagaaaaatgaaagaatttacaaagtagtaagtttttcaggaagtcaaattttctttgtaaggcaagatattgctacttctatagttaataaggcggaactttcaaccttaaataaaatggaacgtgcaatggacggttctatgattaaggaaaattgtgtaaaattaaatgtcgaccgtctaggaaacatatcaaaagcataaaaaatgtcaaaagcagcattgaaagaagagcttcaaaagcttacaaaagaacagattattgaacagattttagatttgtatgaaaagaataaggctgtaaaagaattttatcaattctacctcaatcctactaatgagaaagaattggcagataaatacaaaaggcttatcaggaaagagtttaacgtagagaatccgatgcggagtacagaaaagttttctgttgcaaaacgcgccatctccgacttcaaaaatctccagccctcgccggaatacttagtagatgtcatgctttatctgccggaaagtgcctgtgaacttacttctttgtatggtgatttttccgagcagttttataacggaacctttaataacttcaaagcagcattggaatttttaaagagaaataatcttttacaatcttttaaagcaagagctgaacaatgtgtgaaatggtcagaatattgtggctacggtttcgctgatgatatggagtatatttttaatgaatattatcgttaaataattcaaatttaaaccatgatcacccgttccatctacatcggcaatcccgcctatctcaagctcaaagacgagcaattgaaaatcctctgtcctgaaaccaaaacggagaaggggagtgttcctgtggaagatttggggttattaatgctagatcattatcagattaccatttcgcaccatctgattcagaaaatgatgggaaataatgtcgtggtggtgagttgcgatgcccatcatttaccgcacggaataatgcttccgttgtacgggcataccgaacattccgaccgggtaaaagaccagctggaagccagtgaaccgctgaaaaaacagctttggaaacagacggtggaatgcaagatcgaaaaccagaaaaatgtactgatgaaactgggaaattactatgaaccgatgattgaatatcagagaaatgtaaaatccggcgatataacgaatatggaagggattgcggcgcagcattactggaaatacctcattagtctggactttttgaggcagcgttttggagattcacccaatcagttttttaattttggatacgccgtgctcagaagcattgtggcaagagccatcgtagaaaccggactgttgcctgttctcggcatttttcataaaaataaatacaatccgtattgccttgccgatgatttaatggaaccttatcgtccgtttgttgatttactcgtgatgcagtggctgaaaattcatccggatactgaagaactgacgaaagaatttaaagcgcatattctccaggttgcgaccaaagatgtgcgtattgatgacaaaacaagaccgttgctggttgctgtaaaaacaaccgcttcatcgctttacaaatgctacacaggagaaaaacgactaatttcctatccggaattgatgtaatttttttatggcagctttatccgcctggagtttatcctgagcggagtcgaaggataaaaatctgcaaaaagagctccactcaggtcgggctgcaaacgttacgacaaacaaacaatagtcaccaaaaatgaacgccgaaaggtttaatgcataccgaattatgtgggttttagtattatatgacctcccgaccgaaacgaaagcgaatatgaaagatgcaaaccgttttcggaaagctttgattgatgacggatttactttatttcagttttcgatgtatgtgcgtcattgtccgagccgcgaaaatgcagaagttcatatcaaaagagtaaaatttatgcttccgaaagccggaaaggttgccattatgtgcattaccgataaacagtttggagacatcgaaatcttttttgccagaaataaagaagaaccgccaccgagcttccaacagctcgaattgttctgaattttaaatcctgaaaataaaaataatctactgaaaatcagtagattattttttgaggttgtccttcatcacgaagataataattttgaaatccgcagccggataagcgtgggcggattcgacgaaaggcgttggattcgatttggctgagtcaaagcaattcccaaatagaaaatcaaaaaagataattagagatagattataattaacttttagagattttgttatttttaaaatataaaataatccattgaaaaccaatggattattttttgaagttgtccttcatcacgaagataataatttttgaaagcaattcacaacaaagagactgcgtaagaagcaagaaacttagttgtccttcatcacgaagataataatttttgaaagcaattcacaactacaaagatcgcattatattggtggtgatggttgtccttcatcacgaagataataatttttgaaagcaattcacaactaggcttatactttgaatgatatgtttttagttgtccttcatcacgaagataataatttttgaaagcaattcacaacaatgatacaaaatgaacaaaaaagacctgtgttgtccttcatcacgaagataataatttttgaaagcaattcacaactaaagcccgtttgttacatctgagatgattgttgtccttcatcacgaagataataatttttgaaagcaattcacaacatagtaaaaacatttgcaatgatacaaaatgttgtccttcatcacgaagataataatttttgaaagcaattcacaaccgcctatgtaattttcacgatttaatttctgttgtccttcatcacgaagataataatttttgaaagcaattcacaacggatttgtaccacgatactctgattataaagttgtccttcatcacgaagataataatttttgaaagcaattcacaacttagatcactatgcaccgaaacgctggattgttgtccttcatcacgaagataataatttttgaaagcaattcacaactgtagtaatctgacaaactaagtgagtttggttgtccttcatcacgaagataataatttttgaaagcaattcacaacaagaggtctatttgcatctatagagagcttgttgtccttcatcacgaagataataatttttgaaagcaattcacaacaagaacaagcaaaaacagccgaacaacaaagttgtccttcatcacgaagataataatttttgaaagcaattcacaacccgtgcaaacattgacaaaaatcctttgtcgttgtccttcatcacgaagataataatttttgaaagcaattcacaacggaaatcattacggcgttattcacatggaagttgtccttcatcacgaagataataatttttgaaagcaattcacaactttttcattgtatgtcacattttcgacaaagttgtccttcatcacgaagataataatttttgaaagcaattcacaacatacgtatctttcaaatagttgttgaatccgttgtccttcatcacgaagataataatttttgaaagcaattcacaacctcgacatgaacgaaatcactacttctttggttgtccttcatcacgaagataataatttttgaaagcaattcacaacttaaatatatgtccggtaatgttgatgttagttgtccttcatcacgaagataataatttttgaaagcaattcacaactaatttcaggagtgagaaaagaccttccaagttgtccttcatcacgaagataataatttttgaaagcaattcacaacagtatcactttgaattactaaattcactgcgttgtccttcatcacgaagataataatttttgaaagcaattcacaacaagaagaatttctttcacaacatcgcttcggttgtccttcatcacgaagataataatttttgaaagcaattcacaacttccagacttccgcgccgtagcggtgaacggttgtccttcatcacgaagataataatttttgaaagcaattcacaacggggcaacctacgatgttttgagggaagtagttgtccttcatcacgaagataataatttttgaaagcaattcacaacactgtttaaggtgattaaaaatttaaattcgttgtccttcatcacgaagataataatttttgaaagcaattcacaacagtgtaaccatgtaaccatcgcgccgataggttgtccttcatcacgaagataataatttttgaaagcaattcacaacggcaagtgctataaactgctcgaatccattgttgtccttcatcacgaagataataatttttgaaagcaattcacaacactctcaaggtaattatagtggtcataatggttgtccttcatcacgaagataataatttttgaaagcaattcacaaccagggctcttcctctaattactcaggagatgttgtccttcatcacgaagataataatttttgaaagcaattcacaactgttctcgacattcataacattttccacaagttgtccttcatcacgaagataataatttttgaaagcaattcacaacttgttgtttgatgcatcaaagatacgaatagttgtccttcatcacgaagataataatttttgaaagcaattcacaactctctcccatttattacccgaaatgttaatgttgtccttcatcacgaagataataatttttgaaagcaattcacaactgtatgtgttcatgatttatttatttaaagttgtccttcatcacgaagataataatttttgaaagcaattcacaaccaaacctttctatatagctgcttattatccgttgtccttcatcacgaagataataatttttgaaagcaattcacaactacaccgcgatattatattagaattaacaggttgtccttcatcacgaagataataatttttgaaagcaattcacaacttacataggtgtaactaaaatttggttacagttgtccttcatcacgaagataataatttttgaaagcaattcacaacgaaaaagagtttcaagaatcattcgcaaaggttgtccttcatcacgaagataataatttttgaaatccgcagcaggaaaggcgtaggcggattcgacgaaaagcgtttgattaagccaggctgagtcaaagcaattcacattaaacttttgttgtcacaaagacaatagttttgaaatccgctgcaggaaaagcgtaggcggatttgaaaaaaagggtttcattaagttaggctgattttacagactataaaaaattagccataaccgaactacagtcggctatggctaaaaaatattttagtaaaaacgaaattaaattccgtcgatgatttcatttaaaaccgtacttggtctcatggcagcatacgttttgtacgtatctgttttgtagtaaccgtcaatatcctgaggttttccctgagcaccaattaattctgcgttgattacttcttcgttttccttcattgcctctgcaatcggagcgaattgtgccgctaattctgcatcagcagtctggtttgctaaagcttcagcccagtacattgccagatagaagtgggaacctctgttatcgatttgtcccacttttcttgcaggagacttgtcggtagctaagaatttagcattagcttcatccagtgcgtccgctaacacctgagattttgtattcccctgagtttgtgccaaatgctctaaagaagcctgtaaagcaaggaattcacctaaagaatcccatcttaaatagccttcttcgatgaactgctcaacgtgtttaggagcagaacctcccgcaccggtttcaaaaagaccacctccgttcattaatggaacaatagaaagcattttagcagaagttccaagttcaagaattgggaaaagatcagttaaataatctctcaatacatttccggatacagaaatggtatcttttccttctctagctctttttaatgtttccgtcatggcgtcttttacatccatgattctgatgtctaatccgttggtgtcgtgatcagctaagtatttttcaacttttttgatgatttctctgtcgtgtgctcttcctttatctaaccagaaaatagctggagtatcagataatctggatctgtttactgctaattttacccagtcctgaatcggagcatcttttgtctggcacattctgaaaatatctcctttttctactttctgagaaagaagaacgtttccgttttcgtcctgaacttcaatggttccttctgcagaagcctggaacgttttgtcgtgagatccgtattcttcagctttctgagccattagaccaacattcggaacagaacccattgtggtaggatctaatttcccatgtgctttcatatcatcaataacagactgatagaaacctgcgtaagaacggtccggaataatacaaaccgtatcttcttcttttccgtctttgttccacatttttccgccgcctcttaccaatgcagccatagaagcatcaacgatgatatcggaaggaacgtggaaattggtaatccctttatcagaatttaccattgccactctcggtccgtttgccagagccgcttcaatatctgctttaatatccgcttcctgagcatttcctttgattttttcgaaaagatcagcaagaccgttgtttggattaacatctaaagatttgaaggtttctgcatatttcgtgaaaacctctttgaagaacgtttctacaatcgctccgaaaataatcggatcggagatcttcatcatggtcgctttaaggtgcgccgaaagaagaacgtttctgttttttgcttcttcaatagcttcctgtacaaaagctttcaaagcattcagattcattacagaagaatcaattacttctcctgcctgaaggttggcaaaatctttcaattgcgtttcagaaccgtcgtttcctttgaaaacgatcttaaattttgtagcattttctaccgttgttgaggtttcagttccgtagaaatctcctccgttcatgtgcgcaacgtctgttttgctgtcagaagcccagtcgcccattctgtgagggtttgcttttgcatagtttttaacggcttttggagcacgtctgtcagaatttccttctcttaatacagggtttacggcacttcctaaaactttggcatattttgctttaattgctttctcttcatcatttttaggctcagcaggataattaggcactgcaaaacctttagactgcaattctgcaattgcttcatccaattgaggagcagaagctgaaatattcggtaacttgataatgttggcatccggctgagtcgctaactgacccaattcagccaaagcatcaccgatcttctgatcatctttcaaaaattccgggaagttggctaaaattcttcctgccaaagaaatatccggaacggcgatctcaatgtttgcagattttgtgaaagcttttacaatcggtaaaaacgagtgtgtagccaacataggagcctcatccgtaagcgtgtaatagatttttgatttgtctgacattatactgtaatttattatttgattttttaagactcacaaatttagtgattatgattgttttataaagatattttgcccaaaaattgcgtaaagtaacagtgaagccgataatttatgagcagattaaatcttttttggaagatggaattttgtattattttttaatttttaaaaacagattgaataaagatcattctataagtgaatctatttcatgatttctacggataatgaagactttgttaaatgaaatttttacccgaaatgtaagtggatggctgattgaagcagatgaatcatttttccggatatttttaatttgaaagggtaggagtgttgttattatgctgttttacgaaagatgtcaattatattgaaaacttttttaattgatcctcagaactaaattctgaaaactggtaaaaccctgtagccaggctgttgagtggatcataaggaaaaaccagatcttttctgggttaactaaggattggttctcagattctccatggtttgctggtcaactttttttatttcataaagtgatccatgcaataaataattgaatcttattctgacagctcattatatttactaagaatatttgtaagattatatttttcacatatccttattaattcgttgtcaaacagttcagtctgatcttcttcacttacgatcaattgaggtaaatattcaatttcatctataaaatcatacatttctttgtgaggaactttatttacactcattattttaacatgtatcattaagtcatgaatagcaagaattaacttattaaaacttctatttcgtaccatatattttggataatttaaacattaatctaataaaatttgccttgcctgagcatttctattcgctggttgtatataggtagacgacgtctgtccatttggcgggataaattttgaaattaatgatttcatttgagaataaaagatttttttgttaaaaacacagcagcgctataaaacacaaaatccaatgtaattgcgttgggttatttttatccgctaaaagtcgggatacttttgtgcagtatgctgttaccatatttttattattcctttctgattttctgctccttctatttcaatcctaatggtatcttttcggggttagcgaagtactggctcccagactttctacggctctccagtctacctcggcaatatttccgttgtatttcgggacaacattatttcctgaaaactgatctgtatccggattttcgatcccctcgcgactggtatattttatcttgtaggaaaa

SEQ ID NO: 1254 - DNA, 23110 bp, synthetic construct
  misc_feature 1..23110: note = Synthetic
  source 1..23110: mol_type = other DNA
aatctatggaaagtgtttctgtagttatgattacattaaataccggtgccgatgtaaacttcttactaaccgatgcccaacgtaagattaatgccgtcgttaacgatttgccagacgatgctaaaacgccatctttgagtaaattctctcttgatgatgttgcgattatgaacctatcggttacttcaaaattaaccgagaaagaattatatgatttattagatcaaaaaattcaaccggtttttgctcgtatcaatggtgttgcaaaagttgatatggttggtggtgaagagcgtgaaattcaagttaaggtttatcctgaaaaattagttggttatggcttaacaatcaatcaagttcaacaaatcatagctgcttcgaacttagatttcccaactggtaatattaaaacgaaatcaaatcaaactaccattcgtttatctggtaaattcagttcgttagaacaaatgcgtaatctaccaattaaaactccttctggagcttcgattcgtttgagtgatattgctgaggtttctgatggaattaaagatattgaaaagattgcacgtattgatatgcaaaacaccattttgttacaggtgttcaaacagtctgatgctaatgcggttgaagtttctaatttagtgaaacaaactattgctacagttcaatcggattatgcagctcaagatgtgaaaatttctatcgcatccgattctacagattacacaattactgctgcaaatagtgtggtattcgatttaggtttagctattgtattggtagcattcattatgttgtttttcttacacagtttgcgtgatgctgcgattgctacaattgcaattccattatcgttaattgcaacgttcgtagcattaaagctttttggttataccttaaacttaatgactttattaggactttcgttggttgtaggtattcttgtggatgatgccattgtggttattgagaatattcaccgtcatatggagatgggtaaaaataaagttcgtgcatcttatgatggagctaaagaaattggatttacagtaacagcgattacaatggtaattgtggttgtgttcatgccaattgcactttcatctggtttagtatctgatattttacgtcagttctgtgttacagtaatgattgcaacgatgttctcattcttagtttcgtttacggttgtgccttggttatattctcgttttggaaaattacaacacattagcaagcattctttctttggaaaaatattaaatggattcgaagctggattgtctaaattaacaggtggtatttctggaattttagtttgggcgttaaaaaacagatggaataaaattattactttattgataacaattgttatgttcttcgcttcgattggattagttgctggaggatatatcggaggagatttcttcccaggaagtgataaagaagagttttatttacaatttgagttagataaagatgcgtcaatcgaacaaacgaatttattgatgcaaaaggcagaagcttatttagctaaaaagcctgagattgcaaaaatgattaccactgttggtcaagcttctgatggtatgatgacaagttctggtacgaaatataaaggtgagattcaaattttcttagaagacaatcacaagaaaaaagaaccaacaaaagtttacgcagctaagttaatgcgtgagatggagaaggttgcgattggtgctaaagtaaaaacagttaacgttagtattatgggagcagaacaagcgccgttaaacttaacggttattgctccgacacaagctgaagctttagaatatgcagaaaaagcagctgatttattagctaagattccaggttcgtctcagattaaaattacatcagaagatggttcgccagaagttgttgtgaaattagatcgcgataaaatgaactctttaggtttaaatgttgcaacagttggtggagcaatgcaaaccgctttttctggaaatacagatacaaaatttagagctggtgatacagaatatgatattaatattcgttatgatgatttaggacgttcatcaattgaagatgtaaaatctactaagtttattaataatagcggagaaagtatttctttagagcaattcgcagatgttgaatatggttctggaccttcgttgttagaacgtagagataaatctccatcagtttctattcagtcgcaagttgttggtaaacctgcaggtactttagctgatgaatggcaaaaagaatttgagaaattagaattaaaaccaggagttacattcaaatggggtggaaataaagaaaaccaagatgaaggttttggtactttagggattgctttattagctgctattttattagtttacgctgtaatggtaattttatatgatagtttctctaaaccatttattatcttattctcaattccgctttcgttcatcggagctttattgttccttgcattaacaaacgaaactttaaatattttcacgattttaggtatcattatgttgattggacttgtggccaagaatgcgattatgttagtcgattttgcgaatcataagattgaacttggagcaagtgtttacgattcattaattgctgcgaatcacgcgcgtttccgtccaattttgatgacaacaattgcgatggttatcggtatgttaccaattgcaatggcaactggtgatggagctgatacaaaccgtggtttagcaattgtaattatcggaggtttattatcgtcgttattcttaaccttaattatcgttccagttgtttactcaatttttgatagtattggtagaagatttggtaaaaaagataaagaggattatactgaattaatgtcagcagattatgttcctaatgagaactatgttgatgaattcgatgatatgaaataatctaagtttatatttatatttaaagcctttcagagcaatctgaaaggcttttttttattggttcatgtagataatgattctaatgtttagtaagcatttgacgtcactattaaagtttgtttctcgatgtagctgtttgtttttgattaattaaggaagtagaatttgttttgtaacaattcattttgcaatcattttaatcaatcgtagttagtataatcaagcataaggggtatgctgattttattgattcaatacatcaagacatgtgcattgttatttctttttagaaataaaaaaaaactccagttagaattctaactggagtttagtttttgtgttttttcaaaacgaaatatatctaatttcatcaatatatagtaatcccattctattggttctatatttaatgatttgtatatagttatcgtaaatagtaactattatttatttactatttaaagtttggtattagttttgggctgtattttttgctcctgcagctgtatagattacatcaacaattggactatcgatataaccttctaatttagcttgaactttaaatgtaccactcaatgtagaagtgattgaagtgccatcaatttgacggttgtttacataataagtaacttggtcagtaacttcagtaccatttagaaaagtcgttagtaaaactggggttccaacactaacatttttaccgctagcgtacaaagcaagctgatttttttgaatatttgatgagttttcgtcgtcaggaatctctaatgattctttatctgtttgtgctagtttagcagattcgtcgtctgctgaacaagaaactatcggaagtactagtactaataaaatagctaatagtgtaaatatttttttcataaaaagttattaattaaataaaaacgaatttattaaataaatcttaatatcaaaaaaaaaccttgttaaaaccgaaaaaatattgatttaagtgtataaatattttttattaattcgagttgatgctaaaagcgacgcaaaaaaggctaaaataaaaatggtaagaaatacaattattgcatttgagaaatttatctcaacaggatagggtacttgttcagagatagtaataaattgaaatttatattgtaaaaaaacaattcctaaacctaataataaacctagaatagctccaaatgtagaaagaatcataccttggaataagaaaattctttttaaatttctgatgctaattccaatgtcatttaaagtttttagattttcctttttttctaaaatcatcatgattaaagctccagctaacgaaaatagtgttacaatgataaccaaagtaaatattaaataaatagcaatgctttctgtttgaagcattttgtgtaaactatcatttagttctgaacggtttttaatttgatatttgtctccaaaaatcccaaccaatgcctttttagcttggttttcagaaaattcgtttgcaactttaaactcaatttttgagaattgattcttattccattctaataattcttgagctaaatgaatatcagcataaatatattttccgtctatatctgaattttgaagcgaataaattcctgatggataaagtgtgaatttattatatgcatcttctggagaatcaaatgcaccttcaccaggtttcattgccaagacttctaaaaaatgctcgtcagtatatgtaccaactgataaattatttgagatgatttgtcctaagacaacttggtttgtattaggaagtaaccaatcaccataaagaatgtgtttatcaatattagttactttattgtataaagaatcgatgcctttaatattagcaaccaattgtttttctccgtagttaaaaacaacacgctcctcaacaacaaaagaataagctaatatttcttttaggttgtttagtttttgaatttcgttttcagtcacagaaatcgatttgccatgtactggctcgataaccaaatcaggatcgatttcattagtaaatgataagttaaacgttttcaatccgctaaaaaccgatagtaccacaaacaaagccatggagcttactaaaattcctatcgtagaaattttagtaatggtattgattgctttagttttacttttactaaaggcatatcgtttggctatgtaaaatggtacgttcaaactattttttctttctacgttctaataaatctctatgcataatcggattttcttctgcttttaatgcattatctattttttcgatataatccaaactatcatcaatatagaacattaaattaggtactttacgtaattgattttttacgcgttgagccaaatcatgtttgattaaaggcgcgtttgttttaattgctgttagtaattctggagctttttcgtttggaaaaatacttaaataaaccttagcaatagataaatcggtagtaacactcactttagaaaccgatataattaaatttgtaattccgtttttacgtacttcaccttgcaagatatcaactaaatcaccttgcaataaagcacccattttcttttgtctgttcgtttccataatgcaaaagtacaaatttcataagatatatttatctttgctgatataatacataaaaaaatcatgagaaaaattgaacatatcggtatagcagtaaaagatttacaagcttctaatctaatttttgaaaaattatttggcgctcctgcgtataaagaagaagaagttgcgtcggaaggtgtaaaaacatctttctttatgaacggtccaaataaaattgaattattagaagcaaccaatccagattcgccaattgctaagtttttagaaaaaaaaggagaaggaattcatcatatcgcttttgatgtagaagatatcgtttcggaaagcgaacgattaaaaaatgaaggattcactgtgttaaatgagattcctaaaaaaggtgctgataataaattagttgcattcttgcacccaaaaacaacaaacggtgtattaattgaactttgccaagagataaaataattttttgataaagcttgtgaaaatgcagaatttgcattaatattgcactcgttaataacaattgacgccggtcctatagctcagttggttagagcacctgactcataatcaggtggtccctggttcgagcccaggtgggaccacaacaaaccaaagttgtaaaaatattggtcctatagctcagttggttagagcaactgactcataatcagtaggtccctggttcgagcccaggtgggaccacaaattcaaagcctttgtagaaatacagaggcttttttatttatatcaaaaaaatattttttagtctaatctaaatttataattttgtactatctaaatttatagttagaatgaacaaaatatatataatagcctcatttttatttacattccaatgtttttctcagacaggaaatataaaaggaagtgttttttcagataaaaacgttttaggaaatgctcagattgttattcaaaacacagatctggaaacattctcaaatacaaacggtttttatgaaatccaaaaccttccaatcggtcaacaaacaattcaagtatcttatattggatttcaaactcaaactcaaaccgttgaaatcattgatggagaaactattgaattaaattttgaattacttgatgattttctagggttggaagaaatggtaattacctcaactcgtaaacaagtcccagtttataaagctccagttgtagtgagtcgaatcaattcgaaaacgttcgagactacacaatcgttagctttgtcagaaagtttgaattttagtccaggtttgcgaatggaaaccaattgtcaaaattgtggttttactcaagttcgaatgaatggtttagaaggaccttacacgcaaattttgatcaatagtcgtcccattttctctgctttaatgggagtttacggtttggatatgttaccaaccaatatgattgatcgcgttgaagttgtccgtggcggtggttcagccttatacggtggaagtgcgattgcaggaactattaatatcttgactaaagatcctatcaaaaattccttttctatcgggtcaaatatggcttttactgactataaagttccagatcgtaccataaatataaacggaagtgtggtaagtgatgatctaaataaaggattgagtttttatgcttacaatcgtgacagaaaaccttgggatgccaatggagatggtttttcagaacaaacattattaaaaaatacaactttcggattcgatgctttttggcaaacttcagatttgagcaaattgaaattaaatgtttttaatatcaatgaattccgtcgcggcggaaataaatttgagcttcctgcacatcaaacggatattacagaacaattagaccataaaattttgggtggtgccctttcgttcgaacaatcttcatcggatttaaagcataaattttctgttttcacatctgcacaaactgtaaatagagatagttactatggaggcggtggtcgtattttagaatctggcgatcaacttaccgatgctgatattatggcaatcaatgcttatggaaattctaatgatattgcaattgttgctggtggaaattacaattacgaattcaatgaaaaatacaatgttttggcaggaatcgattataattttaatcaagtggaagatataatgccaggttacaaccgttctatagatcagaaagttggaacattaggcttttacggacaacttgaaatgaaaccaatagataattttacgtttttagttggtgctcgttatgatcatgttaaaattgatggattgtatgattttgatgttgaaaaatccgtagatagaaaagatttaaacgcttttgtacctcgaattactgctatgtatgaaattacagattatttaaaagctcgagcttcgtattctcaaggatatcgcgcacctcaagctttcaatgaagatttacatattgaaacagttggtggagcagcttcctttactgtactttcacctgatttaaaaacagaaaaatcgaatagtataaatgcatctttaaatttttctaagaatattggtagcgtacaatcgaatattgtaattgaaggatttactacgaaattaaatgacgtttttattacggctgatgcaaaagaattacctagtggtgtttcggtcttaactaaaagaaacggttcgggtgctcgtgtaatgggtttaaatttagaagcgagttttgctttaaatagaaaatggaatcttcaattaggagggactgttcaaaatgctaaatatgatgaagccgaagaaatttggaaatcagaagatggaacagaggttgtggtaactaaaaatatgttgcgtactccaaatgtttacggatattacacgctaagttacaatccaataaaacctttgactttatcaatgtctggagtttatacaggaaagatggatgtgatgcatttagtagatccagaaacagaacgaacggtaatcaaacgggttcctgatttctttgaaaataatattaaagtagcttacgatttcgatttcaaagacaattgcattcaggtttataccggaattcaaaatatgttcaatgcctatcaaaaggattttgatcgtggagctttacgtgatgcaggttacatttacggaccaacacgtccgcaaacgtttttctttggcgcaaaatatacgttgaattaaaaaccaaacaaatgtttttaaagcagaaaatactcttggttatttttagtttttggatgagcttcggattcagtcaagtcaaagtaaatgcgattagtgaaatagattccttgctgagaatacaaccaaaaccgattttaattttattatcgacagattggtgttcctattgtaaagtacagaaaaaattggtgcaaaaaagtgagggattcaaaataaaagcatctaacttttattatgtcgaatttgatgcagaaagtacagatgatattatttttaacggtaaaatgattaagacttcaagtaagaaaaaccgtaaacaaacccacgaacttactttttatttattaggaaacagcaaaccgatttatccaacgtggttacttctcgattctggatataacgtactatttaaacaccaaggattcttaaaacctaagtttttggatgagttggttgaaaagatttattgagtataaaaaaaataactaatcagaagtatttttgattagtcattttaatttgaaagttattgttttttaaatgtagctgatgtaaatagctcattaatgcgattaaactttttttggaggaagatcaaacgctatcgcttcatgctcaaaatgtcctttgtgagcaccgtcacagaatggtttgtttttagacaaaccgcaacgacaaatcgaaagcaccgttctttcttgtaagccatatacatttcctgctttatctacgatttcgaaatctccttctatttttactgatccattatcattaatggtaagttttgtttttgacatagttttatctataaataggtttaaatacaaaactagacataaagttgaatttttttatggtcttatccaatttagaaacattccttttaatatgtttaaattgaaattatcttccattaattgtgaacaaatcttattgcgctttgatttgtaattatttaaaataattaattcagtatctaatataacacaatttacagtcgaagtaaaacaataatctttatatatttttttagattctgattataatcaaatatttaatcatcaaggatttttaaagccaaagtttttggatgaattggttgaaaagatttaaaatataaaacctcgtagcgatatgaggtttttttgtgaggtaaattttaggcataaaaaagccccacagataggcgaggcactaaatgttttcacaacggaataatccttattgtgaattcctttcgattcaaatataattaaaatattttataaatgaatattttatattaaaaatatacttatttttaaataaaataaccaaaaaaacaaatgaaaaaaatattaggacttgatttaggaaccaattcgattggttgggctttaatagaacaaaattttgagaacaaagaaggaaatatcattggggtaggaagtagaataattccgatgactcaagatgtgattggagaatttggaagaggaaattctatatctcaaaccgctgagcgaacaagttatcgaggtgttcgacgattacgtgaacgtcatttgttacgtagagaaagactacatcgtgttttgaatattcttggttttttaccagaacattatgctaaccaaattgatttccagaaaaggttagggaagttttttccagaatcagagccaaaaatagtttatcataataatgaatttctttttaaaaattcatttaatgaaatgattgaaaattttaaaaaatcacaacctgattttctcaaagataagaatggtaaagaatgcttagtcccttatgattggacaatttattatttacgtaagaaagcattaacacaaaagattgataaaggagagttagcttggattattttaaattttaatcagaagagaggttattatcaacttagaggtgaagaggaagaagaaaatttaaataaattggtggagtttcactctttaagaattgtggatgtaatcgctgatgaggaagcaaataaaaaaggagaaacttggtattctttacatttagaaaatggatggatttacagaagatcaagtaaaatatcattagctgactggaaagataaaattcgtgattttatagtaacaacagatatcaatgatgatggttctgaaaaactagataaagacggaaatgtaaaacgtagttttagagcaccaggtgctgatgattggactttgttgaagaaaaaaacagaacaagaaatagataattcaaataaaacagttggcacctatatatacgagcatctattacttgatcctaagcagaaaataaagggtaaattagttcgtactatcgaacgcaagttttataaacaagaattagaacaaattttaaagaagcaatcggagtttcattcagaattaatggatggaaatttattgtcagacagtgctcgagaattatataaaaacaatttaagtcagcaacaaatcatatccgctaaggattttgttcatctttttttgaatgatattattttctatcaaagacctttgagaagccagaaaaatcttatttcaaattgtactttagaaagtagaaaatcgaaggatggcgttgtttttccaataaaagtaattgcaaaatcaaatccttattttcaagaatttagattgctacaatggttacaaaatttggcaatttataccaaagaagatgataaaaacgtaacgcagaattttttagatagcttagagaaatgggaagcgctactgaattggttaaaaactaaaaaagagataaagcaagatgcgttaatcagatatttgttagaagcccaaggttttaaatctaaagctttgacggcagaaatggctaaataccgttggaattatgtacaaaataaagactatcctgcttttgaaacaagacatcttattcaatctcgattagataaagtagaaggtgttccagttggttttttgaatgcagaaatggaaatgaagttatggcatttgattttttctgtaacagataaattggaatatgagaaagcgcttaaaaagtttgcttcaaaatataagcttgatgaagtaagttttgtagaagcatttaagaaagtcccaccttttaaaagcgaatatggctcgtattctgaaaaagcaattaagaacttattgaccttgatgcgttttggttcggattggagttttgaaaacataaataaaaatgctaaaaatagaatagagaaaattcttacaggcgaatacgatgagaaaataaaaaatcgtgttcgtgaatttgtggaaaagcgcgggatacaagccgaatttgattttcaaaatttaccattatggttggctcagtacattgtttacgatcgacattcagaagcagcaattgttggaaaatggcaatctgttgaagaattaaatcaatttgtaaacgatttcaaacaacattctttacgcaatccaattgttgagcaggtgataacggaaacgcttcgtgttgttcgtgatatttggactaaatatggaaatggtgcgaaagatttcttttctgagatacatattgagctaggtcgtgaaatgaaaaatacatctgatgaacgtaaacgactgactagtatagtgactgataatgaaaatacaaatcttcgcattaaagcattattggcagaattagcgacagatagttcagttgaaaatgttcgtccttattctccagtgcagcaagatattttgaagatttatgaagaaggagctttaaatgctgtagaaaatattgaagaagatattttaaaaattagcaaaacagcgcaaccttctaactcagatttgaagcgttataaactttggttagaacaaaaatataaatcgccttatacaggacagattattcctttgaataaattgtttacacacgaatatgaaatagaacatatcattccacaaagtcgatattttgatgatagtttgagcaataaagtgatttgtgaagctgcggtaaataaactgaaagataaccaaatcggctttgcgtttgtcaaaaaacatcacggagaaatggtttccttgggtaatggaaaaacggttaaagtattcgaggtagaagattatgaagaatttgtaaaacaacattacgctaaaaacagaaccaaacgtaataaattattgatggaagatattccagaacaaatgattgaaagacaactaaacgatactcgatacattagtaaatatatttcacaattgttatctaacatagttcgtgatgattcgccagaatcttcagatgatggtgttaattctaaaaatgtattaccaggaaatggtaaaataacgacaaaattaaaacaagactggggattgaatgatgtttggaatgatttgattttaccacgatttgagcgaatgaatgaattaacttcatcttcagattatacgtcgaaaaataccaatggtaaattaattccaacagttccattggaacaatctaaaggtttttctaaaaaacgtattgaccataggcatcacgcaatggatgctttagttattgcttgtgctacacgtgaccatattaatctgttgaataatgaggcggctaaatcaaataccaaacgtttcgatttacaacataaattacgaaagcaagaatcatatatcaatagtgaaggtaaagaacaaaaagcatttaaaaatttttacaaaccttggaaatcatttacagaagacagtaaaaaggctttagaaaatactgtagttagctttaagcaaaatacacgcgtaataaataaagcaacgaattattatgaatcctataacgatgaagatggaaatcttcgtttggataaaaatggacaaccttcaaaagccttggttgctcaaaaaggaacgaattgggctgttagaaaagcattgcataaagaaaccgtttctggtaaaattcaattggatagaataaaagtagcaaaagataaaatccttactgctacacgcaagtcattagatagttcttttaatgaaaaaactattctatctataacggatacaggaattcaaaagatattgttgaattatctaaaatttaaaagtaataatcctgaaatcgctttttcaccagaaggaatagacgagttgaatagtaatattgctcagtttaatgatggtaaaaaacatcaacctattctaaaagttcgtgtttttgagcaaggttcaaaatttgttctcggtgaaacaggtaataaaaccaaaaagtttgtagaagctgcaaaaggaactaatcttttctttgccatttatcaagatacaacaaataaacgtttttatgaaactattcctttaaatgtagttattgaaagacaaaaacaaggactaaattctgcgcctgaaacaaacgataaaggacattcattattaatgactttgtcacccaatgatttggtttatgtgccagacgaaagagatgtaataaaagcagataatgtttataaaatggttagttcaacaggaagtgagtgtcattttgttaaatcaaatatttcaactttgattaagaattatgacgctaaatctaaaattggagaattagggagtctgaataaattagaagttaccaatgatgctagatttagaattaaagaggtttgtatcaaattaaaagtagaccgtttagggaatatttcaaaagcttagttgttatgctcaaacgtactatttacattggcaatccgtcttatttgaagttgaaagacaatcaattgaagatcgaagaaccaacgaccaaagaagttaaaggttctgttccgattgaagatttaggtttcttggttttagatcattatcaaattacgcttagtcatcaattgatggtcgccttacaacaaaataatgtagcgattatcagttgtgacgaaagtcatttgccttttggtttgatgttgccaatgtatggtcatgtagaacatagcgaacgtttaaaacatcaaatcaattgttccgaacctttgcgaaagcaattatggaaacaaacgattgaagctaaaatttatcaacaaaaagaagtgcttcgtaagaataaattgccctatgaagcgatgattggttatatgaatgaggtcaaatctggtgactcaacgaatatggaaggcattgctgcgcaacattattggaaatatttctttgatgatttcacgcgtgaacgtaaaggagattcacccaataattttctaaattttggatatgcgattttaagaagtatggtagctcgggctttggtttcttcaggattaaatcctacgattggaatttttcatcgcaataaatacaatccgtattgtttggcagatgatattatggaaccttatcgtccgtatgtagatctattggtattggattggatgcgaaaaacaagcagtcctattttagataaagacgcaaaagcacattttttacaattggcaacttatgatgtgtatattaatggtttgcaacgtccgttgataactgctttgagtatttccacaagttcgttgtgtaaatgtataatgggagaaagtagggtaattcattatccgttaatcaaatgagttttagtagatataacgcctatcgaattatgtggattttggttttttttgatttgccaaccgaaacaaagaaacagcgaagtgtggcttcaaagtttcggaaacagttaattgatgatggttttaatatgtttcaattttcgatttatttacgacattgtccaagtagagaaaatgcagatgttcatattaagcgtaccaaaaagaatttacctagtgagggtaaagttggtattttgtgcgtaactgataagcaatttggacaaatggaattgttttttgccaaaaaagagactcaattaccagatatgccacaacagttagaactgttttgatagaattaaaaaagaacgatttttcattagagaaatcgttctttttttagtttttttctaagacttaaaatctgaagaagtcaataaaatcaacgttttaggttgaggttgtaattctaaagattaaatctacaaaatttgaaaggaattcacaacctggatttacagccgtttacatcacagttagttgtaattctaaagattaaatctacaaaatttgaaaggaattcacaacgaatacgcggtagcgggtgcaagcgatttagttgtaattctaaagattaaatctacaaaatttgaaaggaattcacaaccctcctgaaaaagcactagaatcgtttggagttgtaattctaaagattaaatctacaaaatttgaaaggaattcacaacaagcaatcggaatttaatcataaaagtcctgttgtaattctaaagattaaatctacaaaatttgaaaggaattcacaacacgcgactccgctgcttctgcccgttctctgttgtaattctaaagattaaatctacaaaatttgaaaggaattcacaacgtacttcttccatttcttttctttgttaaagttgtaattctaaagattaaatctacaaaatttgaaaggaattcacaacacaaacgcaccagtattccgtaagtagtatgttgtaattctaaagattaaatctacaaaatttgaaaggaattcacaacttaatttcaatgatattatctcattggacggttgtaattctaaagattaaatctacaaaatttgaaaggaattcacaacacacttgaacaccagtagtttcacctaaaagttgtaattctaaagattaaatctacaaaatttgaaaggaattcacaacagccttcgagcaacgtcaacaattcattttgttgtaattctaaagattaaatctacaaaatttgaaaggaattcacaacagttataaagttattaatgatgaaatatttgttgtaattctaaagattaaatctacaaaatttgaaaggaattcacaactacggtggaagcgtattcgattatggtacagttgtaattctaaagattaaatctacaaaatttgaaaggaattcacaacatattaccaaaagaaatactttttatttttgttgtaattctaaagattaaatctacaaaatttgaaaggaattcacaacacaagcaataaagcacaatggatttccaaagttgtaattctaaagattaaatctacaaaatttgaaaggaattcacaaccattagcacagtattcaatccatagattacgttgtaattctaaagattaaatctacaaaatttgaaaggaattcacaacttacgccgttttctgtaaattggatttttagttgtaattctaaagattaaatctacaaaatttgaaaggaattcacaaccaaaacaacgacgtaaaaacattgccagaggttgtaattctaaagattaaatctacaaaatttgaaaggaattcacaacgtattcgatttgattgtcttttgcactcatgttgtaattctaaagattaaatctacaaaatttgaaaggaattcacaacacgaaacgaggcgctggattgccgaatttagttgtaattctaaagattaaatctacaaaatttgaaaggaattcacaacaagcaatagcctctaactctgttgagattggttgtaattctaaagattaaatctacaaaatttgaaaggaattcacaacgaagtttattcggagtagtagattttaaaagttgtaattctaaagattaaatctacaaaatttgaaaggaattcacaacacaatttagttaaaattgaatctaatacaggttgtaattctaaagattaaatctacaaaatttgaaaggaattcacaaccagcaccagcgattttcttagcctttaggtgttgtaattctaaagattaaatctacaaaatttgaaaggaattcacaacaatcttcttcgtatttcttatcaacctcttgttgtaattctaaagattaaatctacaaaatttgaaaggaattcacaacgttgggctgtatgttaatcctccagcgtttgttgtaattctaaagattaaatctacaaaatttgaaaggaattcacaacctacattaataataatataaatctataatagttgtaattctaaagattaaatctacaaaatttgaaaggaattcacaaccaatagaacctatgcaataccttatatcaagttgtaattctaaagattaaatctacaaaatttgaaaggaattcacaacgcatctaaccaagcgttttaaaatatcaaagttgtaattctaaagattaaatctacaaaatttgaaaggaattcacaacaataatgtttatctaaaccctttgcaatttgttgtaattctaaagattaaatctacaaaatttgaaaggaattcacaacatattctatttctataacttcatttaatgggttgtaattctaaagattaaatctacaaaatttgaaaggaattcacaaccctatctaatggtgttagtggtaattggttgttgtaattctaaagattaaatctacaaaatttgaaaggaattcacaacatttactgtattttgtatttgtgttttttcgttgtaattctaaagattaaatctacaaaatttgaaaggaattcacaacatatttccgtctaaaaccgaaatcaatattgttgtaattctaaagattaaatctacaaaatttgaaaggaattcacaacaagtataaactaaaccatcagttgctacttgttgtaattctaaagattaaatctacaaaatttgaaaggaattcacaacgaatatcgatagctacatttaaactgctaggttgtaattctaaagattaaatctacaaaatttgaaaggaattcacaactacgcagagagtaaaacaaataagcgttgcgttgtaattctaaagattaaatctacaaaatttgaaaggaattcacaacttaattctctaacagaaaaattacttttacgttgtaattctaaagattaaatctacaaaatttgaaaggaattcacaactgtccgctaatttaaaattatttattatgggttgtaattctaaagattaaatctacaaaatttgaaaggaattcacaacgataactcaaaacatgataaaaccgttcaagttgtaattctaaagattaaatctacaaaatttgaaaggaattcacaacgcgaaaatcctttgaaatgaagcatgtcttgttgtaattctaaagattaaatctacaaaatttgaaaggaattcacaactaatttctttcttttcttttaataaagctagttgtaattctaaagattaaatctacaaaatttgaaaggaattcacaaccccctaaaccgtaaacgctccatttaaaaggttgtaattctaaagattaaatctacaaaatttgaaaggaattcacaacatggtttagtttatcctgattatacaggcggttgtaattctaaagattaaatctacaaaatttgaaaggaattcacaacaatataaattaaatgatcagaaaattgggagttgtaattctaaagattaaatctacaaaatttgaaaggaattcacaacgcggcgtatgtcaatcgcttttgttcccgggttgtaattctaaagattaaatctacaaaatttgaaaggaattcacaactaatattgattttaaatgataagattgcaggttgtaattctaaagattaaatctacaaaatttgaaaggaattcacaactgttggtaagaagttatttgtatttacttcgttgtaattctaaagattaaatctacaaaatttgaaaggaattcacaactgctaataggccaaactatgaggagcttttgttgtaattctaaagattaaatctacaaaatttgaaaggaattcacaacgtttattgatgattttttcaaacccaaaatgttgtaattctaaagattaaatctacaaaatttgaaaggaattcacaacgtcggctgtgctacgtttgaaaacggtgctgttgtaattctaaagattaaatctacaaaatttgaaaggaattcacaaccgccccggctgtccctgttgctccggaactgttgtaattctaaagattaaatctacaaaatttgaaaggaattcacaaccacgcgaatatggtggattattagataaccgttgtaattctaaagattaaatctacaaaattagaatctagtgtgataaattttttttgaatacaaaaggttttaggtttgaatccaatcgaagttacaattcataagaagtttaagaaataaatatatttcttacctttgcatagtaaaagcgcccctttatacattctgctataaagcagcactataaaattaaaatattagcctcagacttgttctgaggtttttttgtaactaaaaaagcgtcttaatttatttaaaaattaagacgctttttagattttaaaactcaaactcaccaatcaagattttgtcatcacctcggtcgggtttgttgttttggaaagtaataagacttcgaatttcttttcctgagctatacatcaaatatatttctgccgaaatagttgttggcccagaaagcgacatttgattttcaccaaagaaatttgtcttaattttatattttcctttgacagcttttttgagcataaattgttcaggtccgaaaccttgtgtaatgtcgttgctcattcttccaccaatttgagtggtcggacttccgtaataacatgtttcgccatttggatcttcaatccacaaatcaatatctgtgttgtctttgttccaattgattaccacacgaatatccaccggaatatcagcaatcattcttttatctatttttgaaaggtctaaattattaccgtaaagcgatattaaattgttgatttcaggaatcaatatttcagaaatatttttatttctacgagaaaattccgcatcatacgaatttgtaatcgtttgatataaatggcctaaagcttcttgataacgtttgttatcttgtaatgccaatgcataatcacgatgactttgtgcatcaaacgggcgagattttaaaactttttcagcgataaatagttccgtttcatacatttctaattcttttaatttataagctaaaagtttgtataattcggcattttccaaacctagttctgcaattgaactcaaaatctttgtacctgtttctttatctttttgttgtatgaagtaggtcgcaacgtcataataaaaacttggagtttcttgatacgtttctcgtaattctaaataagtttcgtacggacttttagaagtttctattagtttaacgtaatctttgtctgattttatatcaaaggttttgatttcaggaacgtagtttctgtttggtttagattccttctttctgtctgatgaaccagctgattccataacaacggcatccattgttgctacgctttcattttgaacagttcttgctacttgtgagcttgaacttgcttgttcctctgcggcttcgacagctgcaatcatatctgcttgtggagcttcgttttgaacagccatcattcttagagcttgatttccggttggaccgatttctttagcaggaactggatattttttcttatttttcgaataatcggtattccaccatttttttaaatcttctgttgtttgaatagctgcatctaccaaatttttattttcattagcaatattgtcgcgattgtttttcacgatttggtcatattcaacttttaattcgtcaggcggattgattttatatcttacataatcataaacatcttccaagacaatcaagctggtgtttgaagtcacaattccaaattgatttccgatttctaatatatcttctttgttttcatctggattttgttctaaataattcaccttgttttgtgcccaaactttactaatttcaaaagtttttgatgcgtttttcaaatcgatttctttagtgaaaagaacttttccatttcttccaaattctaaaataatagtatttaatgacgatggacaaattccagttacagcaaattctttttcgatttcggttccgattggcggataaacttcggttatatttttgtcttttactccaataaattgtaagttgttttcattgattttctgatatgctttttcaaccgacatttcagataggtttatgaatttcccaagatttttctgagcaatattgtttagaactccaaagtttgaagtcgcagcagatccaatggtgtaaatgggtttgttagatttgaattggttcggaccaaaggttgaaattccatcagaaaacattagatattcgttcgctgtaagtttggatggattaatgacggcataatttgttgctccatcgtaaactgttttttcaagataatttttcaattccgaccattcgccgtttttaatttggaatgtttttcctttttctaattgaatattcagtaaaacaacttcaatggttaagttattttgctgttgaataattttccctaataattctaattctttggtgtgatttcgtttcaaaccactaagcgaattatcccaaataatacctaaattatttgaccaaatcttaggttctgatttgctatttatgatcgtatttgcgtaaaaatacatcgaaccatcagtatttttttgcgtaaatgcttcaatcttattttctgcttttggtaattgaatcgttaaagattttgaaatagaaaaatcagttttagataaactagcttcatagacattgctattttcagagaatgtaaaagttctatcaggtgattcaattaattttggtttttccgaagcctgaaaaactttaaccgttaaatcaaacttgccaattttttcagacgaatctaaaggtaaatgatattgatagttgttgttttctaaatttaattcttgataatacgcaatttgaatggttctgattccatttgcaggaatcggtgaaattcgggttttgaaattatttccttcaactttttctataattcctgggtcaacatttcgtttctgaatactttcaaaaacttcagttgcacgttcttttggaacaggaaccgcatttctaagttttccatttatgtcaattgcataactgctaaccgttgtgttttcgggtaatggaaaggttagattaccttccaaaacccgatttgaattgtttttgaaaactaatgttgaagtcgtttttgcaagatttccaaaaatttcaacattgatttgcatcgattccaaagcaaccgaatttttatattcttttgattgaatttctagtttcggaattccactattttgcgcattgctttttgtgaacgttataaaagcacaaaaaagaaatacaatttgaattatttttttcataagaattggtttagtttaactaaatatacgtattatgattcataacctgagttcgattaataaatcaagaaaaatagttggtaaaaaaaagaaatagttgt

SEQ ID NO: 1255 - DNA, 23099 bp, synthetic construct
  source 1..23099: mol_type = other DNA
  misc_feature 1..23099: note = Synthetic
tcgtattgcttttagtagattgagaaataaatatgctgttactgagttatttaaagaggtttcagtaaaggtgggcgatagaccaggaggatatactcgtattatcaagttgggaaatcgtttgggagataatgctgaaatggcattgattgagttcgttgattataacactacgtacaacgtagaaaaatcagcagctaaaaagaaatctacgcgtcgtagtagaaaaaaagctgagacaacttcagcttctgagacagaaactactgcaactgaagagtaattaaaagtgtaaagaaaaaacaagccatctaattttttagatggcttgtttcgtatttgaatgttttaagcgttttggatatgataagatacagggcttaaattcgttcttttactttgtagcgtttttctttgcgtttgttacgtaggataatttcgcctaaaaatcctgcaacaaagaattgggttccaataatcattgttgttaatgccatgtaaaattcaggtctgttagcaatgagtcggttgctagggtttatgaacagtttgtctactcctaggtagaaagcaaataaaaaaccaataaagaacattaaaactcctaaagcgccaaaaaagtgcattggtctcttaccaaagtgggaaataaaactgatagtaattaaatccagaaatccgttgatgaatcggttcattccgaattttgtttgcccgtattttcttgcttgatggataacaactttttcagttatttttttgaatccagcattttttgctagtacaggaatatagcggtgcatttcgccgtttacatcaatatttttaactacttcatttcggtaggctttcagtccgcaattgaaatcgtggagctttagccctgatgtttttcgtgctgcccaattgaataatttagaaggtagatttttagttaattttgagtcatatcgttttttcttccaacctgaaactaaatcaaatccatcgactttaatcatttgatataattcgggaatttcatcggggctgtcttgtaagtcagcgtccattgttatgactacatcgccttttgcttttttgaatccgatgttcaaagcctgtgattttccgtaatttttgaggaaacgaataccaacaacacaagggtcttgggattttatgtctttgatgatctgccacgagtggtcggtactcccatcatctataaaaagaatttcgtaagaaaattcgtaagaaatcattgtccgacgaatccattgatgtaattcaggcaatgattcttgttcatttaagaggggaataacaattgatatgtttgtagtttgattcatacagacacagattacttaaacacgaattcctacggaaagcattccttggtattctttgttttttctgaaaaaggaaaccgcttttgagcaagttggaactacttttaatcggcgttcggctatgttttcgagtacttttttcatgaagtcatcaaaaaaagtggcttcagcattttcaggaatatatattcttgttaaaaaaatcttgatgtcttgcaccgagtattcaatgaaggcggtttcattgttaacttttgtttgaaactggcgagaaaattcgctgtcaataatttcaatcatatttattttaattcgtatgattagtgattaatgaagtgtcaatgttgtttttgattttggtaaaaaaatagtatttttacgtcctgaaaaaaaacaaaaagccaacttcggcacaaagttacaaaataaaatttaatttagaatggaaaaaaacaaaaagcatatttatctaatgccaggaatggcagcaagtcctaaaatttttgaatttcttgaatttccatcgaattatgaaactcatttattggactggatttcaccgattgaggaggaatctctttcggaatatgcttttcgtttgactcagcaaattacacatccgaaacctactttattgggggtttcgttcggaggaattattatacaggaaatcgctaaaattattgattatgaaaaaattatcgtagtttcaagtgtaaaaactaaatatgaactgcctaaaaaaatgctattggcacgttatacaaatttgcataaattgttgcccgttggtttagttaattcattggaatattggaagcaattttcttttattgattccattacaaagcgtatagaactttatgaaaagtacattgggatgcgatcaatctcttatttggactggagcattgataaaattgtaaattgggagcaaacagagcctttgccgaacacaattcatatccacggtgataaagatgcagtttttccaatgaaatatatttctgatgctattgtagtaaaaaatggcacacatattatggttattaatcgttacaaatggtttaatgagaatttttcgaatctgttgtaataatttccgtataccatttctacttcaattttgctgagataaaaggaatagtaaacgctttgttttaggatgtttattattatggaagaatgttttttgtagggaagttttgtatattttgtttcatagtatcaacggtattttacagttgttttgtgtttagaaatattctattattctgctgtagttttaaaaatctgtgaaaataaccctttttttcttgcaaatcttcaaaaaaaatagtaaacttgcacaatgtttcgagattagaaaaactcgaatttaattcattaatcaaaaaaacttcttatattttgaatgaacttgttttagaactaaccgatattcatccacagcagttcttcggcgaagatgaggtaaatattaaaaagataaaatcttgttttccgaaattgaagattgtagccagaggtaataaaattttagcttttggagaggaaaacttgttaaaagattttgccaaaaaaatagaattattgcaggcgtatttcagtaaatacaaccgattggatgaacgtagcattgatagtatttgcaatgctgatgatactgagcctatagaaacaataaatcagaaggaaaccgacgtgattgtccatggagtgggagggaaggtcattcgtccgcagaccaaaaatcaattcaaattggtagagttgatgagaaagaatgatatggttttcgctgtaggccccgcaggaacaggaaagacctatgtaggtgtagcacttgcagttaaagcactgaaagaaaagcaagtaaaacgaattattcttacccgacctgcagtggaagcaggggaaaatttagggtttcttccaggggatttgaaagagaagctagatccgtatatgcaacctctttatgatgctttgcgtgatatgattccttatgaaaaacttagtggttttattgaatcaggggtaatagaaattgctcccttggcgtttatgcgtgggcgtacgcttgataacgcttttgtgattttggatgaggctcagaatactacccatgctcaaatgaaaatgttcctcacacgtatggggcgtaatgctaagtttatgattacgggtgacccgggtcaaattgatctacctcgaaaggtatcttcagggctgaaagaggctttgttgattctgaaaaatgtcaaggggattggtatgttacatttagatgataaagacgtggttcgacatccgttagtacgaaatattattgaggcgtacaaaagtattgagaatatagaataaacgtaagtgcgattcagtaaatgacatcagaacatttagatattaaaattcagaatgttatttcacaacgtgtaacataaatttttctgcaccttaagagctaaataattgaaaaataatataaaacataaatatattacataaaaatatgaatacaacattagtaattttagcggcaggtttggggagtcgctttggttccgacaaacaattagaggaaattcataatggaaatgctttgtttgattatgggatttatgatgcgattgaagcggggttttcggacgtagttttgattattagaacccagattgaagagcttactaaaaaacatttagaaaatcgtttcaaagggttgcctgtttccttcgtatatcaagatttacaaaatccagaaggcattgtgcgtcaaaaaccttggggtacaggacatgcaatgctctgcgtaaaagacgtggttaagaatccgtttttgattatgaatgctgatgattattacggaaaagatgcgttttcatacatggtaaaagctttaaaatcaggtaaagaaaaaactttttattcagcaggttatttattgaaaaacacattgagcgaaaatgggacagtttcaagaggagtttgtaatgtgaatgaaaataatcatctgcaatcgatagttgaggctacaaaactcagaaaaattgacgaaaatatggctgttgatgaagaaacaggcgaaaaatatcctttaggaacgttcgtttcaatgaatttttggggattcacaccagaaatttttccaatggcacagaaattatttgctgaatttgtagaagctaataaagaaaatccaaaagcagagtttttcattccgttagtggtacaacatgctattgaaaaagaagggtatactttggaagtgttgcctaataacgatgcttggtttggaatgacctaccgcgaagatttattgaaagtacgagaagaaattaaaaatttgactgtagcaggaggatatccggagaatttctaattaaggaatcaaatttcttacttgctcaacagtgaaggtttcacgagattttgacttatagagataaggagtttattccattttgctaaaattagagattttttaaaactctcaattagtgttacaatctctgaatgtcgaatttacatagatttttttgttatacacaaaaatcttcatatacatttgatttaccaattaaaaatataaaataaaatgaaaaatacagctgaaagaattgctcctttgtttgattttaaaggagatatcgtttccgttgagccttttggaaatgggcacatcaattatacttttttagtgaaaactactgaacaagagtatgtgcttcagggaattaataccaatgtgttcaaaaaaccacatgcaatcattaaaaatattgaattgctttgggaaactgttgctgataacactattattctgaatatgttaccagtcaaaacgggaggtttttcggtagaagcagacaatgctttgtggcgtgcggttccgtttgcgaagaattatgtggcatacgaatttgttaaagaagcatggcaggctgagaaagctgcatcggcttatgcaacgtttatcaaaacatttgaaaagatagatacttcaagattggaggatactattcctgattttcataacgggatgaagcgttttcaacaattagaagatgcttttgcacaggcgaagtccgaacgtatcgaaaaggcacaacatctctatgattttgcaaagtcgcacaaggtaatatttgatgaagtacagaaagctgtggatgaaaaacgtatccctattcgtgttactcataacgatacaaaaataaataatgtattgattcacaaggataatccgaacgatttcaaagttattgacttggatacagtaatgcaaggaattttattgtatgactttggagatatggtgcgtacctctgtgagtcctactaatgaaaatgaacctgatgattcaaaaattgtgttcaatgaaactttctttgaagccatttgtaaaggattttcagtgatgaaagacgtaatgacagagaccgaaaaacgtatggttttggatggagctaaatatatgatttttattattggagtacgtttccttacggattattttaataatgacatttatttcaaaacttcattccccgaagaaaattttgttagagcaagaaaccaatttgttctattacaacgtttagaagataaagaacctgcattgagagcagttgttgataaatggtttaaataaaataaacaataaaaggtaaaaactgtctgaaaaaaagtgtacatttgcaacttggttcagacagtttttttatgataagaaatatttttgtactcctattaaccatttttcccatttatatttattcccaaactcaagtttcaggtaaagttattgatgatcaaggaaaaccacttccttttgcgaatatcatttttgtgaattctacgaaaggagtagtgtcggatgcttcaggaaaattctccttatactcagagaaaaaccataattatattgaagtttcttccttagggttcacatctaaaaaaatacgattacaacataaaatcacaaaaaatcttattgtagaacttactgaaggagaagagcttgaagaggttgttgtagtaggaaaaccaaccaagtcactttcgaaaaaagaaaacccagcctacacagttctacaaggtatttggaaaaataagagtaaaaaaggacttaaaaattcacaagcatatgagtataagaaacatagtgtctcagagttgggtatcaatcaattagatacgattttcctaaaaaaggttttaggaaatgattatgccgagtttgaacaaactcttatggaacgaaaaaacaggggctttttttcaatgccgatttatattaaagaaaacgtacaaaaggtctacggtaacaaccaaatcaataaacaacgagttgatacagaggcagaacgctcacaaggagtagctcaaaatggttatggtttagagcgaatcaccaaggcatttgatgaatttgacatctacgaaaattcatatttgattttaaatcgcccatttgtaagccctctctcggaatatggctacgggacgtatcactatgttttaaaagatactttagtagaagagaatcgaaatttctatcgcatttatttttttccaaaaatagatgctgatttggctttggaaggaaattttattgtggatactaaaacttttattatcaaaagtatagagatgaaaactactcccaaaaccaatttgaatatggtgcggggattgtttttcgaaaagcattttaccattgaaaatgatagtatttattatcttgaaaaagaaattcaagaagctgattttacgattctttctaaggacatagaagagaaaggcttgtacattcgtaataccataggatactctgatgtggtcctgaatcaaccaaaagcgactcttttttatgaacaaaaaatagttcaaaaatatagggatcaatttgttaaaggggatacatattggcaacaagcaaccgtgaagtcggcaaatatttctaaaacaactcggttgattaaggaagtggctgataatccgaaagttaaattaattactacacttgcagatattataggtacagggtatgtatcgttaaattcaatccctttgggtaaaggactgcaattcggtacatattggcaggtgtacgaatcaaacgatgttgaaaagcatcgacttagattaggcttcagaacatttaattcaattgaagatcgttttcgctcttatttttacggagcttatggcattggagataagcggtttaagtatggattaagtgctaaatatttactttcggaggaacctcgagtgacgtttggaggtgcttatcaggatgactatttgcaattaggaaactatttgattcacgatgatggtaatttcacattccgaagaggaagtaacgccattattaatcgaggagaaaactattttttgaccagaaatcaaaagacatcagcggctataacgtatgtgccgttaaaaaacattgaagttagtgtttttggagtatatcagcactcacaatctgccgatcctgaacatttttttatagcctttcgcgatttgaagaataatcaaacatataccaattataccgatttcaacacagggttgaatatcaaatttaccccaggaagaaacgtctttggctatggggtggagcaacgttatggagagaaaatacatgatacttacgtgttaaaatatactaaaggagcatcaggagctttaggaagccaatttgactatgataaattacaggttttaatcaaaaaacctattactgtttggaatttaggaatgctgaacacaacttttgaggcagggaaaatttttggtaccgtaccgttgactattttgacaccaacgcctgccaatcaagcctattcgattatacctcagtcgtttgcgttgttagattattatgattttataaatgatacctatcttaatggttattttgagcatcattttaacgggtttattttgaataaaattccacttgtcgacaaaacaaaattacgaagtttattatttgctcgttttgcttatggtactataagtcagcaaaatagagatgctcaccaaacgaatctaatatacaatacgcctgaaaaattgtattgggaatacggttttggtattgaaaatataggttttggaaatattcgcccgtttcgtttagattttatatggcgtggtgattttaatgatgttaacggtactcggaatcccaagtttggcattcgttttagtgtcatgcctaatttttaatgtcagcagtacaaaaattatttttcgactaaaatactcacagcatttcctccaaaaccaacagcgttaatgagtattttttctattttttcaggtttcttttgtttttcaacataaggaacgctataaacttcctgtttttggagcatacatattgccatttcaagactcaaagcaccacttgcaccaaatgtatgtcctattttccatttattattagtcataaaaggaacagattctttgaaaacttctcggatagctgtgatttctgctaaatctcctttaatagtacctggagtgtgggtgataataacgtctatatcacaaacgtctgtatttcgtaaagccatcatcatagatttttgtaagcattcgccattggccgaaagagatacattgtgagttaatttctcagaagcaaatccgaatcctgttattcctgctaatcgattgtctttcaatccattttctaagcaaaaaacagaagctccctcgcctaaaaccattgtattttgttttttgtgtacgtccattgctcgacaagggaaatgatccgtgagactgctataaatttttaaagctttggcttgagctatagtaaagggagttaacggagcttcgcttccaccgactaaaaatcgctgttccataccactttgaagccatgcaataccattaacgacagcgtgtaaagatgttgaacaggtgatggaatgagacatttcaaaacctatactccctaaatcttgaccaacccacgaagcaatatttcctaacgtagtagttggagaagctaaagtttcacatgctttattttcaatgaaataggagtgatgtttttcaaaaagagttgtcgctccgcgagaagaaccgatatttacaccaaaattaccatcacgccaattagcctgtttgactgcttgtcgggctgatgtaattgcaaataaaactgtatcgtccaagttggtatatgccggtgatgatagtcgtaagttgtttacagcagtcagaccgctttcagagagttttcccatgggaacctcaccataaggctttaataaagatattggattttgatatgacaggcagacttctgtaaaagaatttcctaaagcagaaatcgaacccattccgacgattgatatgttcacagtttaaaagttttatatgcaaaagtaaggaatttttattatttaggatttgaaaagtgtgattttccccaatttcaaaggcttaataggaaataattaagtggatgaaaaataaaagccccgcagataggcgaggcactagatgttttcacaacggaataatccttattgtaaaatcctttcgatggtgcaaagttaactaaaataatttgaataaacaaaatattttttataattttacctcataaaaatttaaaatatatagatatgaaaactatactcggtctcgatttagggacaaactctattggttgggcattgattgaaagaaatatcgaagaaaaatacggaaaaatcatcggaatgggaagcagaattattccgatgtctcaggatattttaggaaaatttgatgcaggtcagtctatttcgcaaacggctgaaagaacgggttttagaagtacaagaaaactatatcagcgagataatttgaggagagaacgactacacagagtgctgaatattttaggttttttgcccactcattatgccaatgccattgattttgaaaaacgattgggacaattcaaggaaaatcaagagccaaaacttccgtatgctaaaaatgaggaagataaattcgagtttatttttaaatcaagttttgaggagatggttgctgatttcagaaaacaacaaccacaattattttatacaaaacccaatggaaaggaaagccaaattccttatgattggacaatctattatttaagaaagaaagcacttaatcaaaaactctccaaagaggagctggcttggctattgttgcattttaatcaaaaaaggggctattatcagttaaggggtgaagacgaacaagcagacgaaagtaaatctataaaattctatgcccttaaagtggtaaaagtagaagaagacggcaaggataaaaaaggggatacttggtacaatgtgcatttggaaaatggttgggtttatcgtcgcaccagcaagaattttttggattgggaaggaaaagtaagagaatttattgttaccgaaaaactcaatgaagatggcaccattaaagtcgataaagaaggtaaagaagacagaagttttaaggccgtaaattcagaagaagattggattgcaattaaaaaaagtacggaggataaaatcaaccattccgaaaaaacagtaggtgcttatatctatgacacgctactgcaggaacctaatcaaaaaataagaggaaaactcatcagaaccattgaaagaaaattctacaaagatgaattgataaaaatccttaaaaaacaaatagaattacaacccgaaatctttaccaaagcgttgtataaagcctgtattgaagagctatatactcataatgaggcacatagaaaaagtatttcggacagaggatttgtctatctttttgtagatgatattattttttaccaaagacctctgaaaagtaaaaaatcactgattgcaaaatgttctttggaagagagaagttttgttgtagaagaaaacggaaaacgagaagagaagattgaaggtataaaatgtatcgccaaaacaaatcctatttatcaagaatttagagttttacaatggatgtataacttgaaaatttatgaaaaatttgataataaagatgttacttcattatttatcagttcaatagaagataaagaaaatctgtttgaatttttgatgaatcaaaaagaagttaatcataagcatattttagattattttgttactcaaaaagttaaaaatgagtttcctaatgcaaaaccaaaagcatttaaagaggaagtcaaaagacaaatggctctatatcgttggaattatgtttatgacgaggtaaaagacgaatcgaaaacctatccgatgaacgaaacagggtatgaaattcgtaagagattcgagaaggtaaccaatttgccagttgatttttataccaaagagaaagagtattacttgtggcatttaatttattctgttacagataaattagattttgaaaaagcattgaaaaaatatgctataaagtatggcttggatatagaatcttttgtggaatcttttaaaaacataaagccttatccgagtgaatatggaggtttttcggaaaaagccatcaaaaaattgttgccattgatgcgttttggaaaattttgggatttcaatcaaatttcaaaagcaatacaatctcgtattcagttcattatcaatggggaatttagtgaagatattcctttgaatgtacgagagcaagtgtttaaattccaattgaataaagaggctgattttcaagggttgccattatggttggctcaatatgtagtatataatcgtcattccgaaagtagtgatttacaaaaatggacatcagttgaagacttgcaggaatttttaaaaaatttcagacagcattcgttgcgaaaccctattgtagaacaaattgttaccgaaactttgcgtgtagttcgagatgtttggcaatcgtatggcaatggagagaaagatttcttttcggaaattcatatagaaatggggcgtgaattaaagaaaactgccgaagaaagaaacgatgaaactaaaaaaaataacaaaaacgaggctacgaatcttcgattaaaggctttgttaatggaaatggcaaatgacccaaaagttgaaaatgtgcgtccgtattcgccatcacaattggagattttgaaaatttatgaagaaggtgttttgggattattttcagaagatgaacttaaaaaagaaggagacaagaaggacgaaatctatattatttcaaaaaaatcagaaccaaccaaatctgagctgcaacgatataaattatggttagaacaaaaatatcaatcaccttacacaggagaaataattccgctaaataaattatttacagataattatcagatagaacatatcattccacaaagtaaattttttgatgatagtttctcaaacaaagttatttgtgaatcggctgttaatggtttgaaagataatcaattaggttttgaatttattaaaaatcatcacggcgaaaagatacagataggagataaaatagtaactattttttcagaagaacaatataaagatttcgtgtcaaaaacttatgccaataacagggtaaaacgcgaaaaacttttgatggaagaaattccagaaaaaattaagggggttaaaatgaaatgtacaataacacacaaaccaaaaaagcccgaaaaagcattaaaaataagggagttacaaccaaaaaagcccgaaaatggaaacaaaaccaaatgtacaacaattactattaactactatttaattaccatttaaaaagcccgaaattaccatataatttgctgtaactactgttgtgggatgcaaagatacttaaaactaccataaccccaataaaaccgcccctttttgggtttttttatgcccaaacgccacctcttttgaacccgccaaccgaccatttgcgtgacctcacgaaaatgataaagacacaccccaaaaaagcctatttttaatgttagggggactattagggagacaattagggagacaaaaaacataatttttagggcgtatattctacctatatgtttatttgagtagcaatataataccctttttcgtgttataattggggtgtattgtatacattttgatgtcaaataattatttaagttattgattttcattggtttttataaaatctcccaatctttgtaacctttttcttttaattcttttatgcgctcagtatattccaaatatttttcaaaatcttgaaccaaaggtactcctcgatatttatcaaagtacctctgtttctgctcgtccgttaatttaaccgctttatctggatgagccttattgtagtaaagctcaataaaatagataatattttttgaaactcttttaaattctttttcccattcaggagtaatgtctattgtactcataacatattggttttaaatgtcaagacggcttctgatccgtattctttattgatacttcctattactaaaaacactcttttgatgtcttccttatagattttaaagggttcgtgaactaatgttccatcaggatatgtttcttcatttgtactatatgccattatacaaagctcatcagttggacaagattgaatacgtttggttacacgaatctcatctgtttcaataacatagttacgtccccaaacaatgttacgttggttgtagatttgcttaagagctaatatacaaccgtttgaatattccttcatactatttccatagtggcgaatggctgcagaaacttcgttcttaaaccaatcaccagcatcaatataaccagtgggttctgagacgggcgatacatcagcagagaggttggttccaccaatagtagcaacatcatcataaaatggaatcaaatttcttttccttttgataatctcaccactttccaattgctttttgagagcctcaaacttcttttgtttttcggatagttcttgattttgctcacttttaagcattgagccattacccgctggttggaaggcaaagtaaatgaaatcaaccacgagttgataaacttccaccacgagaccgccgaacgccaacggttggaatccgcccgaaattactatgtaggtaagttggtggagacggacgaatataagttaaaatttattgaaattgaaaactatgagcacaacgaatgagtatatcaggtatttggaggtattggtgctggataacttcgtacgagtgctgagtactggcgaacgaattatggtcaatcaatatcgagcgggtagaaccgaccaagttcctgaaaaagcccaacgcctacgacaatggctcgacactcactcctgggatattcctaccctgtattattccagtgaggacggcgaattgaagtatagggaaaaaggcattgaaaagcaacttaaagaaaatgaattgtataacaaaaaaatcatataaaaattaacaattatgagtaacatagatttatcgcaactatcggcacaagagttacaagccgagttgcaaaaaagacaaaacgcacaggctgagaatcgccaagcctacaaagatttggtaaacaataatttgaaaaatattattgatgttttgaaagagttttccagcgaagtgagtagaactaaattatttgtttttcagtcgctaaaaacgtttttagacattaaaaacgaagtgtacgaactaaaaggcgagcaacaaagccacaccttctccgatgatgatggcaacaccattacctacggcttccgcaccattgatggttgggacgacacggtaaatgcaggggttgagaaagtacgggatttcattagctcacttgccaaggacgacaattccgccaagctggtagatgtgattaaccgactgcttcgcaaggacgccaaaggcaacctcaaagcctcacgggtattggaactgaccaaaatagcggaagaatttaactcgccggagtttaccgatgccgtacgaattattgcccaagcctacaagccccaaaaatcggcgtttttcgtagatgcaagttacaccgatgcacagggcaagaaaataaacattccgctcaatatttcggcggtggattttccagagggaacaaacatagcagatttgttccccgttcacgagaaatatgataacctttaaaaacgatttagaaatggaaatggaaaatgaaaacaaagtaaaactgcttatcagtgccgaaggcgacttgaacaacgcaaacgatttcaaaattcatcttgtggcagaaggaggaatgtttgaactatcgtgcgtactcgctgggcttatacaaagagaagattggcttaaaaaggttgtagaacaagccttagagatggcatatgaacagtagataatacattactttccgcactggcaggcatcggggttcgagcccccgagcggtgctaattttaaaatgatttgaaaatgaaaaaatatgtattaaaagccattgcaggtattggcgaaccagaagaagaaatattagaacactggaatgaagaaacttttaaacgctaccaaaataacgagttatcacgagaagaaaacgcagaattagtaactcttgcccacgatttaacggggtttgaatgttgggtagaaaaaatagaagaataacaaacgtaggcaaaaaactaaaaaatgataacaaagcaacagatacaaatcattcaaacgctactgaataagcgttttacagaccgccaagaacggctggagtttctctccgatttctttggaatggaaattaaatctaccaaagatttgagcgaaaaacaagcctttattttgataagacatttaaaaagtccctctccttcggggagggatttagggtggggattttatgctcggtttgatagccaaaacccgcaacaccgagccttactcgcccgatgccacgagttaggttgggtgcaagaagataaccccaactttgtggatttaaatcgtcttggggcttggctgataagtaaacgttcacccgtaaaaaaggcgttaatggatatgagccacaaggaagtgagcaaaatcattttcgccattgaaaatatgataaaaggaaagtataagtagttaaaatggagatagatatatttgaagtattttgttttggggtagattatgggcaattgttgtgtgagcaagaacgagatagtgaagatttggcagatgcttttcaaggtgccgttattagtcaaaagtacgcaatgccaagccaaatagctccgcgcagacagcctcactccgaacaatggcgaaacgcaaagagagagagttattttaagtttatagagctgtggaaaaaagtccaagaaaacaaagagttcatatttgtaaaataaatattaaactatggaagaacaattaaacaatgaacccgatgaggatacaacacccgtatgcacccacgaaaatacgcacgtgctaacgcttggctggtatgccacttgcgaagttacagccgttttctgtaaagactgcggaaaacaactcggagcggaacaatgggattgttgaatttaaaactaatcgtattatgatgataatgacacgaagtgcctatgagttttggagcggaaaaaaagcccctcctgaggtacattcttttgaaaaaaataatttaggacaatggacaaccaccacgtggcaagaggtatttaaagaacgtaaagaaaagcaagataaaaatctacatttcaaacgtgatttttacgaaaaaacggtaccctgttatgtttgggtttttcataatcaaaatcaatttctttttggaggttggtacatttatattgtaactaaaaacaaggagttcgcattgaatttcaaacctcatttgaattataaggatattcttttagatattatgaagttatttccttgtggcgtacttccgatgcacgaaaatttcgagctgtggtgtggggcattttgtaggcagtttcctaaaaaatcaaagaaacgcccaaccgaaggagctaaaacttgttacgctgaattagataaatataatcgccttaaaaaagttattacaaaatgaaaatcagtttaaaaataaccaaagaagcaactggcgtattgtgttactatttttcacgagcgggcgaagcacaaccgagaaatcggaggcaacgagtgcagttgagcattatgaaagaagtagcagtgaaaatggaacgatattacgccaatctacaacctaataaaaaatggcgaaaaatcaactttaaagcctacgaggctgatatgatagagcagtatttgagtagttttgttgatgttgtagatgatgtttatagcaggataataatcaaaaaattaatagcagaaatcaaccaacaattagcgtaaatatggaaacaacgtattttatgcgagggcgtaacagccctacggaacacatatttaaatatgatttaaacggtgatttaatttcgtttgaaaatacaggcgaaccgctcaacgaagcgcaaaaacaatggttgtttgtctcgggcaactttccgtacgatgaagaaaaaatgattaatatgcagaataatattaccttgaaaaaatattttgacatagagaaaatacccgccattatcacttttgatgacttttggacagcatatggcaaaattggtacaaaatcccttgctaagaaaaagtttgagaaacttaaagatagtgaagtaatcaaggcttttttgggtataaaaaaagaacaacagaaaaagaaacttgacggcacggcaatgccctatgccgagacgtacctaaatcaaaaacgctgggaataacgaaaaaaacgcttaggaaaacctaagcgttttttttataaaatctttttaccacttccatattctcttcggaattaggcacaacaaaaaaaggcttatcttcctctaacttatagtatttaccaaaattatgggcaaaacgggggtctattttcaattttagagtcttatcctctaaatttgcacgacgtattagtgccatacacgtcctgtctccgaaaaaatttggaggaaaaataaagtctaaataagggttgtctatttcgaggactgcatcttttaacgtatgacaaagttcagtagcacatacgtctataactgtcctaaattggatgtatggaaaaatatgttttgtaaaatgatagttttgccaatctaatactgacgaaataacagaatgagctgtactaaactctaaatgaagcgtttccctgtccactttaaatgggatacttctataaaaatctaagaaataatatttttttcttatctgatttctgtacaactcatttacttgcataaacttttcaagagtatcgcaacaactgaatttaaaataaaagcaatcaagatacattttaaaatcatctacaccttttaccaatctcaaatcaggtgctttttttgaggaattattattatcggatgaaaacgtattagctaaaacccaatttatatactcgtcaataatatcgtcataaggtaatcctaattcttccctttctgcaatttttaaagctatttcgtctatccaacttttattttccataacagcaattttatttcaaagttggacaaatatataaatttttccaaataaaaaacatttattaattttgccgtaatgaatactacggcaacacataacagaaaagcgtaccgaaacgagaaattgtcggcacgcttttatttttattctaacctaattggtttgaaattttcccgttgcctgcaactcctcgaacgggagtttgacatttcggaaagtaccatttgcgacatcattgctgaaaatgaccacatcatcgctcactttgaacgcaaacagttttcagcaaatgatttaaaaaaaatatatccgcactttaactggcagtataatcttcaaacgccgttacaaactgcaaatcaactacgtttagccctctaagggttcggaactgcacacccgtacgctcgaacgggtaaaatgcttcgctttcaaaaccttgcatttttttatagatttcttcggctaaatctaagaattggagtgccgtgctttgcatctgctcgggagcgtggctgttggtttcgcccattgctgggtaaatgagggtaaggctaaaagatgcctgtacccgttggatattgtcgcccaaatccttacaattaaacgaattaagatttaccaataccgcaggatataccaacggaggcacttcctgttgtagttgtgctgtgttcaaatccgcccacttgatagtggggatttgctttaaaatttctaaaatggttgtatataaattcttcataattaacaattaacaattaaaaattacgaattacgaggaatgtaatttgaaaatcgtaattcgtcattaacattatggtttaattccgttgcccttcaaatcatttttatttgatttcaccgatgtttcaatactctttaaactttctttcatagcatcggtattgtcagccgttcggcgggtgttatgctgaatttccaactgaataccaatcattttgctggtttgtgccattgtctcggcaaagccttgcttgttgattttattggtttccaactgggcaagacgaagccctccgaattgccctgccaacaagtcggcttgttgctcagtgatgcctctgacagcaccttttagggagtttggggaggcttccgctcctttgttgtcgtataggttggtgccgaattgttgcccgagttgttctaacttagcatttgcggatttaaaggcactttcaaactgctgacttatcgcctctatcttattcttgtccagcgtgtccacgccctcgttgagcaggtcgcccatttgttcgtataagggttttaattgttcacgcaggtattgatatttaaaggcattaaagagcgatgattttattttatcgtgcgtaaaatcagcgaattgggcaacgttgccttgtgcttgggcaagggcattggcgaaattattcacgaagccgtcaaagttctccccgatcacgacttgtcgcatttcgtttttgaggtcggcaaattttttctccaattcggtaacactttcacctgactttttccattgctcatagaactcttttgcttcgcctttgagccaacctcgttggtcaagcatttttacgtagttctccatactacctgcctcgttcagcatattataagcatcttgagcttcgttgccaaatagttcggaggcttgtttcattcgcctttttgtgtcttcgaaatttgccccaatcattgccgaaaattgccgagagctggcagaacctgttttgattttgcctgtgtcaaaccaagaattgcctacattttcccataactttgccttgttatcttgctctttttgcagattatcggtgtactccttcaacatctgcaaatcgtatttaaatttgttttgaatgccatcctgcgaaatcacaccctcacggattaaacggttacgtagttccaagttatcgttgtacacggacaattcccgtacgttttctttcaaggctaaattttgtttttgaatcagtcgtaaggcttcaatgtcggcaatcatcatcttaacctgttgctcacgggctttttcccgccaacccgtaacctgcttgtaaatggagctaataccactgagtgaactggttatacctccgacaatgtcgcccgaagctatacgggcaatacccgaacccaaatcaaacacgccccctgccaaatcagcaatgtcatcaacggcttgtcctacgccatcgccaaagatggtcgaaaggctttcgccccattctttgaatgtggaaatagagcctttcacggaggtattcaatccgttgagtgccgttgaaagcccgtccaaatcgccactttttgctttttcaacgacttgggaaaagtccgcaactacttctgcaaatgggtttttgtcacgcaacacgttgttgagttcttcggctttggctttgatacgctcaaattcggcaacggtaatattacttacccgcttcacaatttcgccttgttcattgatttggtcgtactcaatacgcaccattgttttgccctccgtagtgttatacgtttgggctgattgcagggtgctaaccacatcttttgaaaagtccttcaacgttttatagcctttttttgataagtcagaaaataatttttgatagaaatccgagctttgcaaaatcgtggcttggaggttgcttaaatcctcctcatacttggctttgcgtaccttaatagcctcatctaccgcatcgttattggcttcgttgcgttgttgttctaatagagctacatcgttattatattgcgtttcaagggtaattcgtttttgattgaagcctttgtactcctctaacaaatcagcaaacttgttacggtctcgtttgttttgctcctcgttagcgagaagtaacattgcttgaagttcccgaagtcgctccgttttttgagggctatcggggtcggcattggttttggtaatcgcctcctccaacgctttacgatagctttcaacgccttttaaatcgtttttaaatcgttccttagcttctttttcgccgacttttgtcttgtaggtttcgtactcctcgaataattccttttgtttgctgagttcttttttgagattttccgtttcgtggcggtatttaagagtttgaacggctttgtcctccaatgtgttaagttggtcaattccgatttttagcttactttttttgttaaattcctccaccaatgcccgtactttggcaaatttgtctttgagggcttgtacctccatatcgtgcttgtcaaaggatttttggctgtattccttgtcaagttcggcgattttttcaaggagttttttgtactcgttttcgagttttttagcccctccatcatctttttttgtgatagaaaaccccgcctgagcctccaattctttcagttgcgtcatgaattttttggatattttttcatacgcctcctgctttttcgtggcatcctcaatcgttctttgtttcgttgcctctccacgtttgtaaagggtttccatgtcaataattccaccatttacaaatttagctttgaatgatgtaacgaggtgatcccatgtgttagcgttctcaaatgcatttttcatttgtgcatcttccttacggataagctcctccgtagccttttccaacattttgttagcggctgttttgtagagcatcatctgtacgtaacggtctttattttcgtccatccatttttccaactcgtcgtacgtttttaatttacctacggtatcgcccaaagtttggttgaactcatcaacggcttcttttttagagataactccttttttagctaagtttaccgactgctccaatgaaagaatgtttttaacagctcctttaacgggttcggattgcatggattcgctaagagctttcatagcctcggctttctcgctgatggctgttttacctttccctaatgatgcaaaaaactcgcctatttcttttccataaacagttagtaacgtaagcccaaccgatagtaacgagttccagctgaaaagagaccctaataattgtttccacacgggagttgtcttttgccccgaagctcttaatgcttcattttctgctcggagtttcgccattgcatcggtcagaataggaatgttattggcaatcgccataaatcccgtttgtgcggaatacgtaaaggcgggcaactcccgtgtgatttggtttacggaattccctaaggagttg

SEQ ID NO: 1256 - DNA, 22943 bp, synthetic construct
  source 1..22943: mol_type = other DNA
  misc_feature 1..22943: note = Synthetic
ggttataacaggcagaggaaaacctaattttggattttctggactatcttcaaatctatacaaaatggaaaaaggagaattaaagaatataaaaactgctttaaatttaaaaataatcaacattttcgaatactgctttttagtcatatattctatctctaaatttattagaagattaataatcgtaaaacttagaaaataatggacaaatattctgtttttcaaatattttacttaatcttttacaaagtcataggctggttcatctttaaaaatgcacgacttattcgttttcctttccgtgtaagaggaaagcaatatataaaaattggaaaaggttttacaactgggtttaattgtagaatagatgctctaaatataaataaccttggtaaaaaatatcttatagaaataggagaaaatgtagagataaatgatgaggttcatatcggtgcaacagaaaaaattatcatagaagataatgttctgatagcaagcaaagtatatatatctgatcataatcatggaagttataagggagatgaacaagattcccctatgtctattcctaaaggacgaaagatacattcttctcctatcagaatagaaaagaatgtatggattggagaattgtgttgtattttacaaggcgtcactataggtgaaggttctattataggagctatgagtgtagtaacaaaggatataccaccatatactattgcagtaggatctcctgccaaattaattaaaagatataattttgaaactaaaaagtgggataaactatgaaactttcagcatctatagttttatataaaacaaaggtagaaggcttaaaaaaggttatagatagctattttgcttatcaaggacaaaaacaactttttttagtagataattctccttctgatgagctcaaaaatatagtagctatgtatcctaataatgagatacattatattttcaataatgcaaatatggggtatggtaaagctcataatatagccatcagaaagagtatagagcaaggacagccctatcatatcattttaaatcctgatattattattgaaaagggagctttagaaaaacttactgactatatggaacagcatcctgaagttggcaatataatgcctaagattatctatccagatggtgaactacaatatctgtgtaaacttcttccatctcccattgatttaatatttagacgttttatacctgtaaaaaaatggaaagatgccataaataaaagatatgaattacattcttttggatatgataaaataatgaatgttccaaacctatcaggttgttttatgtttctacgtactgaagcacttaaaaaagtagggctctttgatgaaaatatttttatgtatttggaagatattgatctaaatagaagaattcatacaaagtataaaacaatctattatcctgatgctacagttattcatgaacatcagaaagaatcttataaaaataagaaacttttaaaagctcatatcaaatctgctatttattattttaataaatatggctggttttttgataaagaaagaatttctattaatagaaatgttttaaaggaactgaccaaaaactaaaataattttcgtacctttgcacaaacaaatcactaatgcctaaaaaagctctcattacaggaattacaggacaggatggtgcctatcttgcggagtatctgctcaagaaaggctatgaagtacatggtatgaagcgccgttcgtccctctttaatacagatcgtattgaccatctgtatcaggatccgcatttggaaaaccgcaatctgatcttgcactatggcgaccttaccgatagtatgaacatcacccgccttatccaagaggtacaacctgatgaaatctacaacttggcggctatgagtcacgttcatgtgagcttccaaacacctgagtatgtaggtaatgcagatggattgggtaccttgcgtatcttggaagccgtacgcttattagggctaactgagaaaacacgtatttatcaggcttctacttctgaattgtacggattggtacaagaagtacctcagaatgaaaggacacctttctatcctcgctctccctatgccgtggctaagctctatgcctactggataactgtaaactatcgtgaagcgtataagatgcacgcttccaatgggattctcttcaaccacgaatcccctatacgcggggaaactttcgtaacgcgcaaggtgactcgtgccctaagccgtgtggccttgggtatgcaagagcgtttctatatgggaaatctcagctctcagcgtgactggggacatgccaaggattatatcaaggcaatgtaccttatcctacaacaagatacaccttcggactatgtgatcgctacaggaatcactactgctatccgtgatttcattgctttggcaggaaaagaaataggccttaccatagagttcaagggagaaggtaccgaggaaaaaggatatattactgccgtagataaaactattttctctgaaaaggtaggagaaaaataccttgctaacattgagacaaagatagcaccaaatgcagaagtagtccttgtagatcctcagtatttccgccctactgaagtagatttacttataggagaccctaccaaatcacaaacagtattgggctggaaacctgaatatgatctcaaatcattggtggaagacatgatgcgttctgatatcaaactcttcaaacgagatgcttaccttaaggaaggtggttttactattatgaattatttcgaataaaaaagactctatggaactcacccaaaagctcaggcatatcttcatcagtgacttagaaaagtgctctcctcttatggaagaggatttgaaagggttacttaccaatagtaccattccctaccttgaaggcaaagatgaaacagatgtgagggctttttgctttgagtatgaccatgacgatatgtctatttctttctatgccttaggggaaaagaatgaaatcatctcagacatatgcctactccttactaaaagggaggaaaatcattttccttcggataggtatgcctcacaggaggagattttagaagatcttttatatgaaacagagcttgaggaatctgaaatagaggaccttttaagtgaatataaacaagaaaaacaatctattttcactcactggtttatagctcgttggaaaaatataacagagcagctcaatataacgattgatgcctatttctccaaaatcaacgccttctataaaacagatctgaataacttagagcctatcagtagtgaggaaatagaagaaaagtataacacataatataacaaacacaaattcatattactttttatgagaaaatttaattttatgtatgctgccgctatggggttacttgccttgggcagcaatctatccgtaaatgcacaaactaaaactaaagtgcattattctgaaaaaaggttgaagattgacacctcaaaagcggattttgatggcccttacatcttctacaatcagaacgaggcggtggtaaaacaaattgttgagaagaaccaacaagccactgcgataagtgagacatttaagaatcctattgccggaaaaaaacttaagtgttatgtagatgacaaggagcattttactttcaaagtacaagagctattacagaaccaaccttctgtgtatgcaatgcctgaaaagctcattgccatctctgatatagaaggacgctaccatgagttcaaacaattccttatcgccaataaggtaatggacaaaaactacaaatggacttttggtaaaggacatttggtaactgtaggagatttttttgatcgtggattgttagtcaatcagacactttggcttatctactctttggaagaacaagcagaaaaagcagggggaaaagtgcattttatcttaggaaatcatgatcttatgaatatgaagaacgatttccgttatgttcgtaaaaaataccttgaaaatgccaaactcatgggggtagaatactacgatttatacaaacctaatactgagttaggccgttggttagctactaaaaatatcttagaaaaaataggagattatatcttcattcatgcaggtatttcaaaagaagtaagtgatcttaacttaggagtagaaggacttaatatgttttctagagttttctattttagaaatgtagaagaaagagtaagtgttgatccgctatattctattgtccatatgcgtggaaaaagccctacctggtatcgtggttatggtaaggaaactattgacaaaaatgagtttgctgccatcgctaagaatatgggtgctaaaaaatttgtcatcggtcatactcttcatgagtcagtaacctaccttatggacaagcaagtaattgacttggatgtacttcatgcccaaggaactacccaaggactactcattgaaaacggacaagaatacatggtggatatccaaggacagaaatccgctatcaaagaacgtgctaaggaagttgatgacgattaatcattataaactaacaactatgaaaaatcaatttagaatactttcttggttattctaaattgattttttacttattacactattatgaacaaaaatgcgaaaatttatgtagctggacaccgaggcctcgtaggatctgctatttggaaaaatcttaaaaataagggatatacaaacctcatagggtgtactcatacggaattagacttgcgcaatacacaagaagtcaatgctttctttgaaaaagagaagcccgagtatgtattcttggctgccgccaaagtaggaggtatcttggccaataatacctatcgtgcggactttatttatgagaatctcatgattcaaaacaatgtaatccatgccgcttatgagaatggggtaaagaaacttcttttcttaggtagtacttgtatctaccctaaggaagctcctcagcctatgcccgaggactgtttgctaacctctcctttggaatataccaatgagccttatgccattgccaagattgcaggtatcaagatgtgtgagagctataatttgcaatatggcaccaattttatctcagtaatgcctaccaatctctatgggcctaatgacaattttgacttagagaaatctcacgtattgccagctatgattcgtaagatccatttggctaaagctctccttgagaatgattggcagacaatcaaaaaagacctcaacaagcgccctatcgagggctatatcacaggagagagcaaacaggaagatattatcctgtcacttgctaaatatggtatattcaaggacaaagtgatactttggggtactggcacccctctgagagagtttctttggagtgaggatatggccgatgcttgtgtatttatcatggaacgtatcaactttaaggacacctatactaccgataacaaggaaatacgaaatactcatatcaatataggtactggttccgatctaagtattaaagctcttgccgaactgattcgtgaagctattggttacaagggaacaatagagttcgatagctccaaacctgatgggactatgaaaaaactcaccgaccctaccaagcttcacaacttaggttggaaacatacggtttccttagaagaaggtgtgaagatgatgtacgaacattacctcaaatgaaattccaactagtatccgattttaaacctatgggcgaccagcctgcagccattgcctccttagtgaatggtattaatgaccaagaaaaataccaaacgctcttaggggttactggctctgggaagacttttaccatagccaatgtagtggagcaggtacaggtgcctactttggttttagctcataacaaaacccttgcggctcagctctataatgagttcaaggctttcttccccaataatgcagtagagtactttgtatcctattatgactactaccaaccagaggcgtatatccctgttactggggtatatatagagaaggatttgtctatcaatgaggatattgagcgaatgcgtctcagtactacctctgccctactctctggccgtcgcgatgtactcgtggtggcttctgtgtcctgcctgtatggtatcggaaaccctttagagttccagaaaaatgtaatttctatagaggaaggacaaacactcacccgtaccaagtttatgcaccaactcgtacagagcctctatgcacgcactacggccgacttcattcacggaaacttcagggtaaagggagatgttatcgatgtcttccctgggtatagcgaaacgcctatccgtgtgcatttcttcggcaatgaaatcgaactgatagaatcctttgaccgcgagacgaataagaccatagaacgcttggataagctcaatatctaccctgctaatatgtttgtcacctctcccgatgtgttgcaggccgctattcgtgatattcaagatgacttggtcaagcaaatagagttctttcaatcggtaggaaaaaccttggaagcaaagcgtttggaagagcgtactaattttgacttagagatgatacgtgagctcggttactgctctggcatagaaaactattcgcgctacttggacagacgccccgctggaagtcgccccttctgcttgatagactatttccctaaggatttccttatggttattgatgagagtcacgctactgttccccaagtacgtgctatgtatgggggcgacaggagcagaaaagaaaacttggtagagtatggtttccgccttcctgcggctatggataaccgtccgcttaaatttgaagagttcgaagcgctacaaaatcaggtgatctatgtgagtgctacccccgcagactacgaattgcagaagtgcggaggtgtatatgtggaacaggtcattcgccctactggtttgctcgaccctaagatagaggtacgccctagcaaaaaccaaatagatgacctcttggaagagatacaaaagtgcgtggaggaagaccaacgtgtactggtaaccacccttaccaagcgtatggcggaggaactgactaagtacctaaccaagatggaggtacgttgccgctatgtgcatagtgatgtggatacgttggagcgtatcgagattatgcaagaccttagaaaaggtctttttgatgtacttattggggtcaatctgcttagggaaggattggacttgccagaagtatccttggtagccatcttggacgctgataaggaaggatttttgcgttccgcacgctctatgacacaaacagtaggacgtgctgcccgtaatatagagggacgtgcgattatgtatgctgacaagattaccgatagtatgcgcgtgaccattgaggaaactgcctaccgaagggaaaaacagatgaactataacctcacccacggcatcacccctcagcctctccataaaaagattgaaaatgcgctaagcaaaagccctattacagaatttcattacgaaaatacgccgaaaaagaaagaacactcccctaccaaacctatgagcagaggagaattggaaaaagagatacaacaaactcgcaagctaatggaagccgcctccaaagaattggacttcattcaagcggcacactatcgcgacctactcaaggagcttcaggaaaagcttcaaaaaagctccttataggcattgtgtatcagcaaataatcggcaagcaccaaggcagacatcgcctctacgatgggtaccgcacgaggtactacacaggggtcgtgtctgccttttccttggaactgcaccacctcccctgccctattgatcgtctcttgctcttgcataagggttgccaccggcttaaaggctacacggaaatagatatccattccattggaaattcccccttgtatcccccctgagtagttggtacgagtcgtgccatctggtaggaatatatcattgttttggctacctctttttctagtagaggcaaatccccctccgtactcaaagccctttacggcattgatagagagcattgccttacccagctcagcgtgtaggcgatcgaaaacaggttcccccagtcccacaggaacgccttgtattacacaagaaacgatcccccctacggtatctccttccttgcgtacttgcttgatataggtttccatttgctccgctaatacagggtctggacagcgtacaggatttttttctatttgggaaaaatcaagcaattggtgatccttttcaggcaatgccaactcccctacggctgatacataggcagtaatttttatcccttttaggaactgcttggcgatagctcctgccactacgcgaacggctgtttcccgtgcagaactacgtccgcccccacgatggtcgcgcaagccatatttctgctcatacacataatccgcgtgagaggggcgatatagctccctcaagtggtcatagtcctgagaatgttgttgggtattggctatgataaatccaataggtacccctgtggtctttccctcaaagatacccgaaagaaactgcaccttatctgcttccttacgttgggttacgatagccgactgcccaggacgacgcctatcaagctctctttgtatttcctcaaagtctaatgcgattcccgcagggcaaccatcaatcacaccacctatagcctccccgtgtgattcgccaaaagtagtgagcctaaacaaatgcccaaatgtatttcctgccataattttaattttctaattttttaatagtaacttcataaagctgttcaaaaagctgttctacatagctggtttcagccttgcgcacctctacaaggagcgtgcagttcagttctagggtctgggaaacaacagtcaggttcctatccttgatgattttcatcaccttattcatatccttgtaatcaaagacaattttgtaggtaaggtcaatggtgcgttcctctatctcggcttcttgtagggtgagctgagcggttgttttgtaggcggtaataaggccgctcacacccaacttgatcccaccaaaatagcgcactacaataagcagaacattggtcagctcaaaggattgtatctgcctatagataggcaaccctgctgtgccactaggctcgccatcgtcattcgctctataggtaaattgctctttgcccaactgataggcatagcaccaatgccgcgcagaaaagtgttctttcttaaccgcctccaaatgcatttttacttcctcttcggtagtaatagggtacaaatagcctataaacttactgctcttatccttatagataatatcggtaacaggttgagtgatggttttataggtgtctgtcatgggaagtgaagaatgattagtgagaataaagtgcaaagatacaaaaaaagccccgaagatagtcgaggcgctaaatgttttcacaacggaatcatccttattgtgagttgctttcaaatatgggacaaagatacaacattttttctaaacaacaaagattaattcagaaatttttcttaaatttgtagttgattaaaaacaatataaaattataaatatatgaaacgaatattaggcttagacttaggctctaactccattggttgggggcttattgaacaagattttggacaaagagaagggaaaatcattgctgctggaagtagaattattcctatggatcaaggacttttaggagattttgaaaaaggtaacaccgtttcccaaacagcggagcgaactttttatcgtagtgctcgcaagctccgagcacgacatttgctgcgtcgtgaacggctccacagagtgctccatatcttaggtttcctgcctactcactatgataagcagattgatttttcaaagagatatggcaagtttataggtgatatagagccaaaaattgcttataatgacggaaaattcctctttatggatagtttttaggagatgttgagtgattttagatcacatcagcctgacttattctataccaaaaggaatggagaagaaagcaaaattccctatgactggacaatttattaccttaggaaaaaagccctttcacagaaaatcagcaaagaagagttggcttggattattctgaacttcaatcaaaaaagaggttattaccaattacgtggggaggaagaagtagaaaatcctaataaagaagtaacttattactccctaatggttaccgaggttaccgctgaagcacccaataaaaagggagaaatctggtattctatacaattagaaaatggttgggtataccgccgtacaagcaaaattcctttagataattggagaggtaaaagtcgtgattttattgttactacagaactcgaagaagatggaagtgtaaaacgagacaaggagggcaaggaaaaacgttcattccgagctcctgatgaaaacgactggaatctacttaagaaaaagacagaacaggatataaatacctcacaaaaaacagtaggtacttatatctatgatcatctcctgcaaaaccctaatgaaaaaatcaaaggaaaattagttcgtaccattgagcgaaaatattacaaagaagaactaaaggctattttagaaaaacaagtagccctacagcctgaactatttactgatcaattgtttgccgattgtattcgagaactctatagcaagaatgaagcacaacaacgaaaccttgctgcaagagatttcgtacatttgtttgtagaagatattattttctaccaacgccctttgcgcagccaaaaatcaactattgctaattgtagtttggagtctcgttcctacatagataaggatagccatacccgtaaagaagtctccttgaaggtatgtcccaaatctaacccttattatcaagagtttagagtactccaatggttacaaaacctcaaaatatacgaaatagagagcgatcgagaggtaacccatgaacttataaagaccttagaagacaaacagcaactctttgattttctaatggctcaaaaagagattgattgtgaggaattattgaaatatttcttgagtctaacttatccaaatgccaaggaaaaagcactaaagagtgagctaaagaaatggaaagatacttatcgctggaactatgtatatgatataggagaaaaatcgtctaagaaatatcctatgaatgagacaagatatgatcttaagcgatatttagaaagagtagccaacttgcctgatgattttctttcctcagaggtagaatacatgctatggcatctgatctattcggttaccgataaggtagcatatgagaaaggtctaaagaaatttgctcaaaaacatcacttagatgaagattcttttgtagagagtttcaagaaattcaaaccctaccccagtgaatatggtagtttttccgaaaaagctatccgaaaactacttcctctgatgcgttttggctcttattgggattttaatcatatagataagaatactcaaaaacgtatagaagaccttataacgggggtagaaaatgaggaaatacgtactatcctcagagaaaaagctgaaaagtaccaacttgaaaaggaaactgatttccaaaacttacctctttggctggctcaatatatagcctataaccgacatgctgaggcttcctctcttgagaaatggacttctgtgaatgacttggagacctacctcaatgaattcaagcaacattcgcttagaaaccctatagtagaacaagtaattaccgaaaccctacgtgtagtgagagatatttggcaacaatatggacaaggaaaagccgatttctttgatgagattcatatagaactcggtagagaacttaagaaaaccgctaaagaaagagaagaactatccaaacaaaaccaaaagaatgaggacaccaaccttcgtatcaaggcattacttgcggagttaggtgaagatagtactatagagaatgtacgtccctactcacttatgcaacaggaattactcaaactatatgaggaaggcgtatttagttcctctatggaaatcgaagatgatatagagaaaatacacaagaaagctactcccaacaaagcagaattacaacgctataagctttggttagaacaaaaatacaagtccccttatacaggacaaatcatctctctgaaaagactctttaccgaagattatgaaatagagcatattatcccacaaagccggtattatgatgatagtctttccaacaaagtaatctgtgaatcagccgtaaataagctcaaaggtaatcagttaggattggaatttatcaaaaatcactatggcgagaaagtacatgctgccggtaaggaagtaagtatatttaccgaagaacaatataaggaatttgtcaagaaccactatgctaataactcaggaaaaatgaaaaaacttctcttagagaatattcctgaaaagatggtggctcgccagatgaacgatacgcgctatatcagtaagtatatttcggaaattctctctaaaatagtacgtgcggacgagcgagatgaaggcgttaattctaagaatgttatcttatgtacaggtaagattaccactgcacttaagcaagattggggcataaatgatgtatggaatgaccttattttacctcgctttgaacgtatgaatgaccttacccagacctcactatttacctcctataatgaaaagtatcaaaaataccttcctactgtacctatggaatatagcaatggtttccaaaagaagcgtatagaccaccgtcatcacgccatggatgctatcatcatagcttgtgctacccgagagcatattaactatatcaataaccaacatgctttagaaaaaggaaaaacaaagaagaaaaacaaaagtctcgtatagacctaagaactatcctttgtgagaaaaaatacaatgataatgccgaggaaaactacaattgggtattcaaaaaaccttgggatacttttactcaagaggtacaagttgccttagaaggtattgtggtaagtttcaaacaaaacctacgtgtgattaacaaggccaccaattattatgaacattgggtagaagaaagtggtaagctcatcaagaaaatggttaaacaggaaggcactaattgggctatccgaaaacctttgcataaggaaacagtttctggaaagattaccttggaaagagaaaaagtaagtaaaggaaaaatcctcacagctactcgtaaggctatagatagtacctttacagaaaaggtaattcaaggtatcaccgatacgggtattcaaaagatattgctcaactatctcaagtttaaaaaaagccctgaaatagccttttctcctgaaggattagaagaactaaacaaaaatattaccctttataatgatggtaagccccataaacctatctataaagtacgtatttttgaacaaggtagtaaattcccattaggagaagtaggaaataaatctcaaaaatatgtagaagcagccaaaggtaccaacctatattttggcgtatatcaaggaaaagacaagcgctccttcgcaaccattccgctcaatgaagtgattgagcgacaaaaacagggactatcctctgtgcctgaatataatgaaaaaggagatcccttactctttagcctgtctcctaatgacttagtatatgtacctatagtaggagaaatcatagaagatattgattttcaaaacctttctaaagaacaaaaagaaagaatatacaaaactgtaagttttacaggatatcaatgtttctttataagagagactgtagcaatacctattgtaaataaaatagaatattctcctctaaacaaaatggaaagaagcattacaggaatcatgataaaagaagtctgtatcaaactaaaagtaaaccgtttaggaaatattagtaaagcataaaaagtttaataacaataagctatgttatatcgttctatttatataggtaaccctgcttatttgaaactgaaagacaaacaattaaaggttaccgaccctgaaaccaaagaagaaaaaggtagtattcctatagaagatataggactactgatgcttgaccattaccaaatcactctctcccaccagctgatacaggaactaatgaaaaacaatgtgatccttatcagctgtgatgagcggcacttacccttggctggaatgctcccttttagtgggaataccctcttttcggaacgtgtaaaaattcaaatggaggtaagtgaacccttaaaaaaacaattatggaagcagactatagagtgtaaaattctaaaccaactcaaggtattagaacaattaggtaagtatacttcccatatgtatgaatatctcaaacaagtaaaatctggggatactaccaatatggaggggattgccgcacaacactattggaaacacctaatagatagcgattttctaagagatcgatttggtgatggtcctaatccctttttcaactttgggtatggagtgctcctcagtatcatagctcgtgccttggtggatacaggtttgttattggtcttgggcatcttccatcgcaataagtataatccttactgcttagccagtgatattatggaaccttatcgcccgatagtagatctgcttgtaatgaagtggttacagttacatcctgaaaaacaaaacttagacaaggaaagtaaagcctttctattacagatagctactcaagatgtaactatagagaaattagtacgcccgcttatggtgggagtaaaaatgaccgcttcctcattactaaaatgttatactggtgaaaaacgacaaatttcctatcccgaattatgaaaaacgaacgctttaattcctatagaattatgtgggtattagtcctttatgatttaccaacggaaacaaaaaagatgcgtaaagatgcacaagatttccgagaagcacttgtaaaagatggctttgatttgttccaattttcaatgtacatacgtcattgtcccagtagggaaaatgccgaagtacatatcaaccgtgtcaagcaatggttacctccttatgggaaagtagccatactgactattactgacaaacaatttgaaggaatagagatcttctattgtcagacgaagaaagatccgcctaaagattgtattcagctcactcttttttaaattttagaaagcgaaaaaccttcctttttattcccttgatagaataaaagagaaggtttttctttttgaacttttgcgataaccaacagacaatcaatttcttttaaaaattgaggttgtttgaggtcacaaagttacgaatttgaaagcaactcacaacgtaagccctccacatgttcgcccgtaagggttgtttgaggtcacaaagttacgaatttgaaagcaactcacaacagacttttgtataaatgttaggaagaacgggttgtttgaggtcacaaagttacgaatttgaaagcaactcacaactcagaagaggtattgttatatttattccatcgttgtttgaggtcacaaagttacgaatttgaaagcaactcacaactatttacgggatatgtttccagagaggcagttgtttgaggtcacaaagttacgaatttgaaagcaactcacaactagcattagaaacagaattaagacaaacagttgtttgaggtcacaaagttacgaatttgaaagcaactcacaactcgggaacacctgttaaaactccatctaaagttgtttgaggtcacaaagttacgaatttgaaagcaactcacaacaatgctattgaaagcctctttaaagggcggttgtttgaggtcacaaagttacgaatttgaaagcaattcacaaccgagcctttctcggctccacgttgtgtcatgttgtttgagatcacaaaattacgaatttgaaagcaattcacaagtaggaataataactaaagtgcaaagatacaaaaaaagccccgaagatagtcagggctctaaatgttttctaaaaggatataattagcttcttaatcaaaagagtagcggaaaggactaatacctaatcactacgcttccccatgtaaagccacttccaaaggcagctaagacaagcaaatcattttccttgacacgtccttgctctaccgcttcagctaaggctattcctatagaagctgctgtcgtgttcccatacttttgaatattgttgaatacctgagcatcggaaagtttgaatttctgttggataaactgggatatacgcaagttggcttggtgggggatgaatagatctatatctccttcggtaaggttgttagccttaagcccctccataatcacttctgagaaacgtactacagcattcttgaagacaaactgtccattcatataagggtaataggaggtatcttctgggtcattttccttgataagatcggtaacccacttcttccctaccccgggggtaacgatggccaattcctctgcatgcgcaccctcactgtgtaggtgtgaggagagaatacctttaccttcttgggtagtgcgagagagtaccacagctcccgccccatctccgaaaagtacagccatattgcgcccacgcgtagtgaggtctaaggcgggagactgcatctctgaagcgattaccaagatattcttatacatccctgttttgataaactgatctgctacagatagggcatatacaaagcctgaacattggttgcgtatatccaaagctcctatggtaccaagccctaactctttctgagctaaaaccccgcaaccagggaaataataatcgggactaagggtcgcaaagataagaaaatcgatatcttccttatttattttcgctttttctatagctctctcggcggcacgtacccccatggaggtagttgtatctttccctcgggtagcaaatcgtcgttgttctatccctgtacgctctctaatccactcatcggaagtatccatcagcttagagagatcatcattggttacaatattttctggcacataataacctgtgcctatgataattgaattatacataagttatttaacattaaaaagaaagccttaataacaaggctttctattacaatatgatacttggttactttagtacttcttttactttgtcagctgcttcttggaactgaatagctgaatgcacagccaatcctgatttgtcaataatctctttagcaatctcagcattagttccctgtaggcgaacgataataggcactttaatatcagttcccatattcttataagcatctacaataccttgtgctacacggtcacaacgtacgatacctccaaagatattcaccaatattgcctttacatttggatcttttaggataatacggaaagctgtttctacacgagcagcatcggcagtacctcctacatccaagaagttagcaggttctcctcctgcttgcttgataaggtccatggtagccatcgcaagaccagcaccatttaccatacatcccacattaccatccaagtctacatagttaagacccgcggctttggcttctacctcaataggtcgctcctcacgagtatcacgcaattcggcatagtccttatgacggaaaagagcgttatcatctatggtaactttggcatctaccgcaagtattttattatcagaggttttgagtactgggttgatttcgaacaaatttgcatcagaagtgatataagctttgtatagagaagtcacgaacttgaccatttccttgaaagcctctccttccagtcctaaattaaaagctacatttcttgcttgaaaagggagcaatcccaattctgggtctatctcttcagtaaagataagatgaggagttttttcagccacggcttctatatccatacctccttcagtagaatacataatcatattctttcctttagcacgattcagtaggatcgacatgtagtattccttaggctcgctttctcctgggtagaatacatcctcagcgataagtacttggtgtactttttttccttccttaggggtttgtggagttaccaaatgcatccctatgatttgggaagaaatttctttaacctgctccaagttcttagcaagcttcacgcctcctccttttcctcgtcctcctgcatggatttgagcttttactacataccattgtgttcctgtttgttctgtaagcttttctgctgctttgacagcttcatcggctgtagtggctacaataccacgctgtacacgtacaccgaagcttgagagaatttcctttccttgatattcatgtaaattcataatataactttaatttgtagtggcaaatgtacaaaaaaaatatgacatttccatgctttttttatatttttttctcaatcctttttttccttagaaatcagtcttgtgtagagagttcttttaacaattctcctaccaaggcatagatctctctgtaggaaagttcttccttgctcatatagagcaacgccaaggagtaggtacgccctgtagagagcagcaccttctgatggcgatagctctcccttatcagtcgcttcattctattcctatccactgcttttttcataagccttttaggaacactgatgagcagttgggtaggttgtgtagagccttctataggggtatataggagcttcaatggatattttttcaatacctttgcctctcggaagagcttgtttaccctatggtaattacacaatctttctgccttgggaaaggtatttcttttttcttttagagaaatcatcttatttagataaagtcgcataagcgagtatatgagtaaaaaccagccagtattcacagctgtatatacaataacaggtaacaaacaaaaacactttgcctattacctgttattttatctttttatgctatattaggcgttttcttcttcctcttctttccctgtaagaagtcggaaaccttcgccatggatatttacaatttctacattctcgtctttcttgagatatttacggagttttgctatatacacgtccatactacgagaagtgaagtagttgtcatctttccatattttgttcaatgccaactcacgaggcatcaaatcattttcatgaagggctaataggcgcaatagctcattttctttaggagaaagttttaggggttcttcatctctgtagcggaggaaacgaagcttagagtttaggaaaaagtctcctatttggaattcgaattttttgctatctattactgtatcaattgactttctttggagcattgcacgaatcttcatgagcaatacttctgaatcaaaaggtttattcaagtaatcatcagctcctgatttgtatcctttgatcacatcctctcgcatagttcttgctgtaaggaaaatgataggcactttctcattcttttcacgaatttccttagcgagagtaaaaccatctttgtaaggcatcataacatcaagaatacacatatcataagggtccttgcggaacttatcaaaaccttccatcccgttcttggccaaagtaacatcgaagccactcatggataggtaatctttcaatacggtcccaaagtttgggtcatcttctacaagaagaatttttttattaactgcttccataatttcaacatttaaaaataatatatttttttacgtttatacaaaatttcatttattagatgataaggggcaccttgatcacaaacgtacttccttttcctttttcactctcggcatatacttccccatcgtgatattttacaatacgctttacataagcaagccccagtccatgaccttttacattgtgcaaatcgcctgtatgttccctgtaaaatttgtcaaagattttcttcagtacagccttgctcattccttgtcctttgtcctgtatacggatcaccaatttgttatgagcaatttctgtaaagacatctatatctggcgcctgtggtgagtacttaatagcattctctaatatattgacaatcacattggtaaagtgcatttcattggctaatatatctgagttttctgcatgtaagtgcttcttgatctttcctcctctatcatcgatcagtagctgtacatgagcgatggcattgtctatcagctcatgagcatccagtggctctttttctatttctacttggttcttgtcaagcttcgagatctgcaacacattttccacatgggcatgcatacgcttattctcatctcggagcattttcagatagaaagacattttttcagtatccttcatcaccacagggtttttcatcgcatccaaagccaaattgattgtggctataggggttttgaactcgtgggtcatattattaataaaatcggttttgatttcattaatctgtttctgagtacgcatctggataaaggtcttggcaaatgcccagatgataattgctgtaaaaatacatacccaaatagccattacgataactgaggatagcagatagcgctgcttatcagggaaatgcacctttagctcataatgagattctccttcttggtttctgaacaagggtatggtgtacatattccttgctgaagggttgaaccttgaactagcaacagaggttttttccttatctacagaaagagacttatcatatacggcaaattcaaaatctaagttcagccctctgtttctaagctctctctctatgagtatctccagctgtgaagctgttatcctattctctatagagagcttcactgaaacttcccgaaagagttcctcgaacatggctttgtcaaaggaggttatgcgacctgttttttccttaatagtggtactgctgaatcgctgtccgtctaaccctttactagggccaaaagtacgagaggtctgtcggcttacataattgcgtatctgagtagtatctcctttaggcaaattgaaaagctccgaaggtacggtatacccttcctccaatacttgatgcttgtaagtgaatgtctcctttgtattcttattctcttgaacaaaaaccaaatcacgaatctgtgaggatttcaaagaacctaagctatctttccctttcaattctatgaatcgggtgatatacttatttatttccttcagttctaccgattctgaaactgaattcaaagcctgtttcaccgaatgggtaaaagcttcttctttattatctatagaacccttaacccaataaaactgaatagaaataagacctataagagctataggcattaatattaaagtaacaatataactcctcttattcatcaggcaaaattataattattttttttatataattcatttttaacaacgtttaactttttggttaatttcttaaattttcagttgtcattttcactattttagaatgaattatttcgattttatccaaatttttatcgatttctctattttcaataacaaatgttgataattctatttttttttcatcattccattgattttttattctcttttctaccgtttctctatcaatcttatcacgaagcataactctttctattcgttcttctaatggagcggttaccataataataaaatcacaatctcggtaggagccactctcaaagaggatagctgcttctttgatcacatagggcgcctgctgggattgcttccattgaaggaagtcctgctgcacataaggatgtattatagcattgagtttgtccaatttttctttattagaaaaaacctcttgagctacaaaggaggtattgtaccttccctctacaaaggcttcttctcctaagagggtaactatttcctgctgtagttgcttgttattcgccacaagttcctttgccttggtatcagctatatatataggtatagaaaagtgtaaggcaaacagattggctatggttgtcttgccactacctatccctccggtaagtcctacagttgctatcattcgtgtattataaggtattctacttctttttgttcggtaaaattcacgttcaaggatgtgggtttcttccttacctccaatggtatatatctatctttacgctgattataatctgctactatagtaatgtccgttggcttgagattgcgtatggtctccacatctcctgtaagtaataggggtacttcttctggaaatagcttcacttctactgagaaaggctggtgtatgagttgcaccttggccttaatttcttgctcagttacatgtaccatttgcagagagaaggttactttatctgtatcataatgcagcttaggggtatcagtaatgcgtacttctcctgaataagaggtggttacattcctcttgtatttcttctgcaaatagactcctgtgatggtatccaaatccgcagccaaaccactcactacaaccgagtcaggaaatactttataagaatctacttgataatcctcttgtaaagttcctgaaaactgtaatcttacaggcaccttcttctgttttatctttttcaaatatatttttatagtatctggctgtatttcttctattctcacatctggaaaatactgcctattaagctgctgttttagattttctgtaaaaacatacttatcttttcctacttttttcaacttgtgtactgagagggaaaccactgggggcgagaaggtatatttgaacaaagaaaaacctactcctctgagttttacttttattgtaggagatgcctccatctctacaaatctctcagtaggcacttccatatagcgtaacttaatagtatattgctgggtcgcttccttggataactttcctaccaaccaagtaagtgctgccaagagaatacagaaaagtacccctatagttcgttttgaaaaaaaatatctattgagt

SEQ ID NO: 1257 - DNA, 22925 bp, synthetic construct
  misc_feature 1..22925: note = Synthetic
  source 1..22925: mol_type = other DNA
ctttgcggaaagtaccagattgtcgaggtgctggggcatcgtgacacatcgcctgacctggacggtgatggtatcgtggaacctgaagagtggacgaagatgtgtccttgcttcgatgtacggagcgaatatccttttgtccctgaaatcgttgtgaagccatgaagttatacgaatacataatggataaggtgagctggtgtattacgctggctccatttatgtgcctcgttctcatttattcctgccagacagtgaagtatgttccggttgaaaccaaagctgatagcgtggtaatagagaaattggttgaagtacagatccctcctgacagtgccaccatccgggcgttgttagagtgcgacgagaacgggaaggtcgtactgaaatggttggacatcgcaaacagtaagaacgctcaggcgcagcttaccattgatagcctaggtaatctactggcgaagatgaaaactcagccggatacggtttaccttccagcgaaggaagtggttgtttccaaaaaggaaaaagttccttacccagtagaaaaggaacttactttatatcaaaagataaaaattagacttggtgaactctcatttattgtaattatagtgataataggattattggtgcttaaaatattcaagaagtagtatatttgtagttaatgcggaaaatacattaaactacaaattatgagaagattgaagaagtatataaaaaatgaaagatcatggataattaccatatcaacaatagcattctctattttatgctgtttttttatttcagaaaggagtaaatttcattggggtgattttggaagtatccttggagctattacagggttaatagcatttatcggagtattatacacatcaaaacaaaataaacagcagtttttgaatagtgaggaaagatctacattctttgaaatgcttaaaatattcatttcttatcgtgattcattacgtgtaaaaaaaatagattggaaatatgataaaacacttcatgattggaacattattcaatatgaggaattttgtactactgaaaagacttatcaacaaataacttttgaattatgttgtatattttacgtagaaataagaaataatataccaaactatttatccaaagaggaattcgcaaaagaaatcattccatcaaatagatctacaatacaatggtattcttcatacaattatttagcaattgctataaataatatttataacggatataattggagtaaatctggaggcgttgttaatcaaatacctattaatttaaatacatacgattatatttgcttaatagctataagaacttatcttaaacagaataactttaaaccaataatagaagctatatcgaaaactgctgacttttgtttttctaaatatataaatcaacttggtacatattttagaaacgcttattatattctggaaatggtctcaggattcaactatcctaaaaagtattcagatatattccgtgctcaattatcaaaagatgaactcgtacttttattctttaactcttttagttctttgtcaaacaacaaaacccgacaattatatttagatgcagatttattcaataaccttgaactaaaagatataagattgaaagaaaatataaataatataccacgtatgggatacataagcttcccttcgattttacaaccaaaggctgttaggaatgaatatatatcttatgaatttctaagcaaattatataaatccatagatactaaaaatgattagtgcttacatataaatacttacattgtaattactatgttttaaatttaagattgtagccattctgatatacaatattttccaataattatatacaacttttctgggaaattatatacatctttgcagtgtagaagtttgcttttattgcaaacgaaagccccaaccagattaatatccggaaggggcttttattgacttatactttaggctattttacattaaaagatacaagcacttcacgcggtttacccttgtaaaattgatatacatagcactccaccatttcgcctttgtacttttggagtctcttgtataaatactccttcacttcaaccttacgagagaagtaaagattctgttcgctaaagacaggttcatctgccccaacccaagcttctaacgagcatgggcatttgttgataattcttttcatattacaataaatattatgtagtggctccattgcctcatacataacataacagataaagtgtcagacaaattaccctctcatcatcataatatcagacctcagttcgatatattctttgtacttttccgggttgttcacgtaatcaatcacacgagatatggccatatcagcctgtttctgccggactttggtgtagtatcgtataactccttttgatttgtctgagtggcctaagcagtagtctattatcccgtcaggaatacctatttcagaggcgtactgagcgaaagacttgcgggccgaataaaatgtaacacgttcatcaatatttaactcttcagccaaatctccaagagaatacgtaacatactgagaaaagttgtgatatgtgaatttatacccaaaatcaagtttccccgtccttttatccatccacctgcatattatctctcttgcttgagacggtattgtaaatgtgattacactatccgactgcattcgccctttagtctttgagcgtgaatattccaatacatcttttctaaagtctgtttgcataatgtctataagattcatccctcccaagtaaaaggaaaggcaaaaaaggtcacgtgccataatcagctttctcttttctggtgaagattcacgaatcttgttaaaattctgtactgtcagatcaagcttcctgataggggctgcagatattctagtcgttacaaaaggatgtatatcgtaagatatattccactctcttatcgctctattgacgacagatttcatttgggcaagcattgtgtttactgtagtttcagtcactttccgcttccgtatgaatgcggcaaaattctggactagtgacggggttaaatcagagagaagcatgtcacctcttgcaaagtcacgaaaatacctccccaccctttcaatagataatgcgtatgaatctcttccctcagacttgagatagtctacaaaattgctacatgctgatgaaaaggtttgctcatcggaaagattgtccgtagaaatgatttctttaatttgccggcaggaataaagttcaagatgttttattgagtccagtttctcttgaaggtcatcaaggatgttcctaagtttccggtttatcgcagatgcctctggatgcttcacgacctgaccgttcttaaactggttctctgaaataatgaatcgtgtgacgatatatgttgtttcatgcttgtgacggagtgcaattcttatcttatgtcttccgtcttttaatgcttttgccttgaaaatggtaagtgatagagttgccataatgattaaaaaatttaaggatactccagggatactcacagaattgtaaatttacaattcaaatccttttttttaatcatcgtaataagctgtagaaaatagaaaaaccgcctaattcacaatgtaataagcggttttaagtcggagccgaaagcgggactcgaacccgcgacttactcattacgaatgagttactctaccaactgagttatttcggcaacgtgtttcgttgaaaacggttgcaaaattactcttttcttgaaacctgccaaataaaaaagagatttttttccgaaaaactacatttttccggcccgtacaacccgtttccgttacatcacaagagcatttgacacattattacgtgtaatttgtacaatagtcccttgtctgccttctgccgattttctacttttacccgcaaaatgaaacattacactaccatgaaaaagaaactgataatttcactgctggcactggcttcgctgggagccggagcacaaaacttgcaaaagggagactacggatacttgtactgccacatgagcggacgaggagaatggacggcctacgccctgagccgtgacggcgtacactttcacgacctgattgatggcgaccccgtatacaatgtagaagaaatgtcaaaaatagagggaggagcacgcgatgcctttatctgccgtacgtccgacggaaagggctacctgatggtgactaccgacatgagcaacgccaagagccgctcgtggttcaactacggcatcaacctgctgaaaagtgacgacctgattcactggacttctaccaccttcgacttccgccagggcccggacattttctgtgaccctcagtcgcccgacgtctataaggactacagcaccatcaaacgcgtatgggcaccgcaaattttctgggacccttcgtacgtatgggccgatggcacgaagggcggatacatgatatactattcactgcttaatccggcagaagaccagtacgaccgcgtgttctattcctatgccgacgccacctttacacgtctcactaaaccccgcctgctggtggactggggatatgctaccatcgatgccgacattaactatgtgccggccgacggactctatcacatgctcatcaagaaagaaggaggtacacccggcatctttgccgctacagctacaaaactgaccggtccttataaaataaaagatgaaaacgactatgtgaagtttgaaggcaacaaaaagtgtgagggctgctctgccttccagttggtgggcgactctacctggcgcgtggcctacatcgaatactcctccaagcccaaaagatatcgcatctgccaggccgacgagaaactctccaacttccactcccccgtcaccatggagggcgtgaaacatccgcagcacggctcgttcatgcggctcaccgaagaagaatacaagcgcctgcaggaatggtcggacagcatcatgcgcaaaagagccgcccgccacagcggagaaaagaagtaaaaagaggaaaatgaaatatttttgtaaaaacttttggcaaacatcctttcatttgagcagaaaacattatctttgcacaccgaattatgacgtgacaaaagagtttgatgtattactgttcaacacatagtaaaaagaataagcgcacattcggagttccggcgaaatggacaaatgccggaagctatttcttttttcttttatgtcacttatttcctgaatatttaagatttcctattttttcaaacacccggaactgcttttcggcaagtccgggcgttttttcgtatatacgagagtagaatagaaaaaatacaagatataaagattattagtaacaaggtaatgagaaatgtaacattgatcctcgacgacgggagccgctttcatggcaagtcgttcggctatgagaaaccggtagccggtgaagtagttttcaatacggcaatgaccggataccccgaaagcttgaccgacccttcgtatgccggtcagttgatgacactgacttacccgctggtaggtaactatggtgtgcctcccttcacattcgaagcaaacggactgcccactttcatggaaagcgagaaaatccatgccgaagcgattatcgtaagcgattacagtgaaaaatactctcactggaatgcagtggaaagtctgggcgactggttgaaacgcgaacagattccgggcatcacgggcatcgacacacgcgaactgacaaaggtattgcgcgaacatggagtgatgatgggaaaaatcgtgttcgacgatgaaccaaataacattcccgaagctacctatgcaggtgtgaactacgtagacaaggtttcttgcaaggaagtgattcgctacaacgaaggcgaaggcaagaaaaaagttgtgctggtagactgtggcgtgaaatcaaacattatccgttgcctgctcaagcgcgacgtggaaatcatccgcgtgccctggaactacgacttcaactctctgcagttcgacggtctgttcatctccaacggtccgggcgaccccgacacttgtgatgcagccgtacagaacatccgcaaggccatgcagaacgaaaaacttcctatcttcggtatctgtatgggtaaccagctgctttcaaaggcaggaggtgccaaaatctacaaactgaaatacggtcaccgcagccataaccagccggtacgcatggtaggcacggaaaagtgttttatcacctcacagaaccacggttatgccgtagacaacaatacactgggagccgactgggaaccgctcttcatcaacatgaacgacggttcgaacgaaggtatccgtcacaaaaagaacccctggttctcggctcagttccatccggaagctgccagcggccctaccgacacggaattcctgttcgatgagtttgtaaagttgctgtaatccactaaaaaacaaagaagacaatgaaagaaaacataaagaaagaaaacataaagaaagtattgctgttaggttcaggagccctgaaaatcggtgaagctggtgaattcgactactctggttcgcaggctctgaaagcgctgaaggaagaaggtatcgaaaccatcctgattaacccgaacatcgccaccgtgcagacttcggaaggtgtggcagacaaaatctacttcttgcccgttactccgtatttcgtagaaaaggtcatcgacaaggaacgtcccgacggcgtgctgctgtcattcggtggacagactgccttgaactgcggtgtggctctctacaaagccggtgtgttcgagaaatacaacacccgcgtactgggtactccggtacaggccatcatggatacggaagaccgtgagctcttcgtacagaaactggacgaaatcaacgtgaagaccatcaagagtgaggcggtagaaaacatcgaagatgcccgccgtgcagcgaaggaactgggttatccggtcatcatccgtgcagcttacgcactgggaggtctgggttcaggtttctgcgacaacgaagaagaactgaacgtgctggccgaaaaagcgttctctttctctccgcaggtgctggtagaaaagagtctgaaaggctggaaggaagtggaatacgaagtagtgcgcgaccgtttcgacaactgtatcacggtctgcaacatggaaaacttcgacccgctgggtatccacaccggtgagtctatcgttatcgctccgtcacagacgctgaccaacagcgaataccacaaactgcgcgaactggccatccgtatcatccgtcacatcggtatcgtgggtgaatgtaacgtacagtacgcgttcgaccctgaatcagaagactaccgcgtaatcgaggtaaatgcccgtctgagccgttcttctgcactggcatctaaggctacaggttatcctctggctttcgttgcagctaagttgggattgggttacggactgttcgacctgaagaactcggtaacaaaaacaacttctgccttcttcgagccggcactggactactgcgtatgtaaaattcctcgctgggacttgggtaagttccacggcgtagaccgcgaactgggctccagcatgaagtcggtaggtgaagtcatggccatcggacgtaccttcgaagaagccatccagaaaggtcttcgtatgattggtcagggcatgcacggtttcgtggaaaacaaggagctggttatcgaagacatcgacaaagcactgcgcgaaccgaccgacaagcgtatcttcgtcatctcaaaggctatgcgtgcaggctacacagtagaccaaattcacgacctcaccaagattgacaagtggttcctcgacaagctgatgaacatcatgcagacttctaaggaactccacgagtggggcaacaaccatacacagctttcacagcttccgaacgagctgctctacaaggcaaaacgtcagggattctccgacttccaggtggcacgtgccatcggctacgaaggcgatatggaagacggtatcctggaaatccgtaaccaccgtaagagtgtaggcatcgtgccggtagtaaaacagattgacacgctggcagccgaatatccggcacagaccaactacctatacctgacttacagcggcgtggccaacgatgtacactacctgggcgaccacaagagtatcgttgtactgggttcaggtgcttaccgtatcggttcatccgtagagttcgactggtgcggcgtacaggcactgaacaccatccgtaaggaaggctaccgctcagtaatgatcaactacaaccctgaaaccgtatcgaccgactacgatatgtgcgaccgtctgtacttcgacgaactgactttcgaacgtgtgatggatatcctcgacctggaaaacccgcacggagtcatcgtatctactggcggacagattccgaacaacctggcattgcgcctggacgcacagaaggtaaacatcctgggaacttctgccaagagcatcgacaacgctgaagaccgcgacaagttctcggctatgctcgaccgtatcggcgtagaccagcctgaatggagcgcactgacttctatggaagatatcaacgcatttatcgaaaaagtaggctttcctgtattggttcgcccgtcatacgtgctttctggtgcagccatgaacgtatgttctaatcaggaagagctggaacgcttcctgcagctggccgctaacgtgtcgaagaagcatccggtagtagtaagccagttcatcgaacacgctaaggaagtagaaatggatgccgtggcacagaacggtgaaatcgtagcttacgccatctctgagcacatcgagtttgccggtgtacactcaggcgacgctaccatccagttcccgccgcagaaactgtacgtagaaaccgtacgccgcatcaagcgtatctctcgtcagattgcgaaagagttgaacatctctggtccgttcaacatccagttcctggctcgtgaaaacgacatcaaggtaattgaatgtaacctgcgtgccagccgttcattcccgttcgtcagcaaggtgctgaagattaacttcatcgagctggcaaccaaagtcatgttaggcttgccggtagaaaagcctgaaaagaacctcttcgacctcgactacgtaggtatcaaggccagccagttctcgttcaaccgtttgcagaaggccgaccctgtactgggtgtagacatggcttctacaggtgaagttggctgtatcggcgacgacacttcatgtgccgtactgaaagccatgctgtctgtaggctaccgcattccggaaaagaacgtcctgatgtctaccggtacactgaaacagaaagtagatttgcttcaggcagcgcgcgccctcaaggccaaaggttacaacatcttcgctaccggcggttcttctaagttcctagcagaaaacggagtggaaaacacccgcgtatactggccaagcgaagaaggtcagcctcaggcactggaaatgctgcacaagaaagaaatcgacatggtggtaaacattccgcgtgacctcactcctaccgagttggaaaacggatacaagattcgccgtgccgcagtcgacctgaacattcctctggtaaccaatgcccgtctggcaagcgcattcatcaatgccttctgctctatgagcattgacgacatcgctatcaagagctgggacgaatacaaataatccgtaccacttaaagatatagataaaattaatcccctccggaactatttgtaatgaatgagttctggaggggatcttttatttatagaaaacataaaacaataaaaaagcccaccgataaaggacgatgggcaagcgcctaaatgttttcacaacggaataatccttattgtgatttgcttcattttagttttacaaaaataaaaagaaacaacacaaaagacaagtttttttcataaaaaattagtagttttgagaaaattgaaaaatacaactatgaaacatattttaggtttagacttaggtaccaatagtataggatgggcagttatcaatgccataaaagaagaaaacactcaaaaagaacaactcataggaatcaatactgcaggaagtagaataattccaatggatgccgcccaattaggagatttcaataaaggaaacactgtttcacaaaccgccaaccgtacacaatttcgtggggtacgccgattatatgagcgcaagaagctcagaagagaaagattgcatcgcatcctacaattattaggatttcttccaaagcattatgccagccaattagacaggtatggaaagtttatagccaattccgagcccaagctcgcttggacaacaaatacgcatgaaccttcttactttatctttcaaagctcgttccaagagatgctcaatgactttttacaaaacaacaaccaagtaaaaaaggttccatacgactggactttgttttatttgcgcaaaaaagctttgacacaaaaaattgaaaaagaagaattagcctggattttattaaatttcaaccagaaaagaggatactaccagctacgcgaagaggaaacagaaaaagcgtcttctaaaacacggcaatattttgacagccagattgtaacagatattactgacactgggcaaatttataaaggattaaaaatattcacaataacacttgaaaacggagagaaaggaaaatttttcagtaaaaacatgcctgactggaaaggtcagaaaaaagatattattgcaatcatagaccttgataaaaacgggaatgacaaatatgatgaaaatggagagttaagccgtcgtttcaaaattcctaccgaacaagaatgggaagaacagtgggagcttattaaaacaaaaactcaaaaagatcttgacacatctcataaaacagtaggcgcatacatctatgatacactattacaaactcctagccaaaagattcggggaaaattgattcgcaccattgaacgcaagtattataaagacgaattaaatcagatattaaagaaacaagaagaatttcacccagaattgcgagactccaatttattagaagcctgcatcgaagaactgtatcctaataacgaagcccatcgtaatgctattgcaaaatatagcatttcccaattgcttattgaagatattttgttctatcaacgtccatttaaaagcaaaaaatcgctcattagtaattgcccttacgaagaatacacatacaccaataaagaaacaggagaaatatgcacttcttcattaaagtgcatagctaaatcacatcctctttttcaagagttccgtctatggcaatttatatcaaacctgcgaatttatcaaaaggaaggaaccataaacgggaaatttactactgatatagatgtaacaaatcaatttctgaaaaccgaagatgactacgccaatttgttcgactggcttaatcagaaaaaagaaatcagacaagacacatttcttaaaaaaccagcatttggattaaaaaagaatatagcaaattatcgctggaattatgtagaggacaagacatatccttgtaatgagactcactacaagatactgtcatattgggaaaaagcaggaatagagcaatcagccttaacatcagaaatagaagagaaactatggcatattctatactctatttctgacaagaatgaactcagaaaagctttacagcatttcgctgataaaaactatttaagcgataaatttgcagatacttttcagcaaattcctcctttcgagaaagattacggttcctattctgccaaagctatcaaaaaactattgccacttatgcgtataggaagatattggaaagcagaaaatttcgacagtacaactcttgaccgtatagaaaaaatattaactggagagtttgaagaaaacataaagaaccgaaccagagaaaaaacaatccatttggacaatttatactcatttcagggacttccaacctggctggcatgctatatcgtatataaccgccattcagagataaaggacgttactaaatggcaacaaccttcagacattgatgcttttctaaacgcattcaagcaacattctttacacaatcctattgtggaacaaatcatcatggaaaccttacgcactgtacgagatatttggaaacagacagggcatattgatgaaattcatgtcgaattaggacgtgaaatgaagaatcctgccgagaaacgcagaaaactcacccaacaaatacaagaaaacgaaaacaccaatctgcgtatcaaggcacttcttactgaatttgccaatccagaatttggaattgagaacgtacgcccgcactctccaagtcagcaagatttattgcgtatatatgaagaagaagttctaaacgaaactaaagatataccagaagatattgctgttattttaaagaaattcaatgaaattgataccaaaaaacgcccgtctacatccgatgtcttacgttataaatgctggctggaacaaaaatatcgttctccttatactggagctatgattcctttgggaaaacttttcacccctgcatacgaaattgaacatgtaattcctcaatctcgttattttgatgattcattcacaaataaagttatttgtgaagcagaagttaataaactaaaaggcaatatgttaggctatgaattcatcaaaaacaatcaagaaagaatagtagaactaggattcggacaaaacgttaaaatacaaacggttgaagcttatgagctatttgtgaaagaacattattcttacaaccgcactaaaatgcaaaagttgttgatggaggacattccaaaccagtttattgaacgtcaattaaacgacagccgttacattagcaatgtttataaaatcattattatctaatatagtacgtgaagaaggagaagaagaagctacgtccaaaaatgttattgtttgcactggaagtattacataccggctaaaaaaagactggggactcaacgatgtatggaataaaatcattttacctcgtttcatgcgcttgaacgaaattacggaaagcaatcgctttacgacaaccaatgcctgcaataaaacaattcctgctatgccgttagatttacaaaagggattcaacaaaaagcgtattgaccaccgccatcatgccatggacgctattgtcatagcctgtgccaaccggaatatagtcaattatttaaataatgaatcggccagcaagaatgcaaagatttcacgtcaggacctgcgacaaatattatgcaagaaaacaaaaaccgacaatttgggaaactatcaatggctcattgacaaaccttgggatacatttacccaagatgtgtattccattttaggcaacatcattgtaagcttcaaacaaaatctgcgtattatcaataaaacaactaaccattatatccactatgaaaacggaaagaaagtaagttgctcacaaaaacaaggtgatagctgggctatccgtaagcccatgcataaagaaaccgtatatggagaaatcaacctgcgcagaacaaccactgctacattgaaagccgttcttgagaatccccaaagaattattgaaaaagacttaaagaaaaaaataaaagagcttttaacgcagggactcaatgaaaaacaaatcaaaaaatactttgaagacaataaagatatttggcaagaaataaatctaaagaagataccagtatactatttcaccaaagaaactgccaacagattctttgcttgccgtgaatcaataaatacaactttcaataaaaagaagatagaagaaaaagttgcagatacaggaatccaacaaattttactgcgccatttggagcagaatggcaataatccggaacaagccttctcacctgaaggtattgaacaaatgaataaaaatattacatccctaaataatggaaaatttcatcagccaatttataaagtcagaacatacgaacaagccgataaattcgctgttggacaaacaggaaataaatccactaagtttgtagaggcagcaaaaggtactaacttgttctttgcaatatatgaaactgctcataaacgcaactttgcgtctattccattaaatgtagttattgaaagattgaagaaaggattaccccctgcacccgaaaacgaaaaaggaaatctgcctaaatttatattatcacccaatgatttagtatatgtaccaataaaagaagaaatagaaaatggacatattaatcaaccaatacaaaaagatagaatttataaaatggtaagttgtacaggaaatcaatgtttctttatcaaatccaatgtagccaatacaattattgataaatatgaattttctccactgaataaaatggaaagagctatcacaggagaaatgataaaagaaacatgcatccctatcaaaacagatagattaggaaacattataacgtcaatcagcctatgataaagaaaacattatattttggtaacccagcatacctatcattacgtaatgcccaacttgtcataaaacttccggaagtagagaaatgttcttcacttccggaagcgatgaaacgtcaatctgaaataaccaaacctattgaagatataggtgttgttattttggataataaacaaatcaccattacgtccggagctattgaagcattgcttgaaaataattgtgcacttattacttgtgacagtaaaagtatgcctgtaggattaatgctccctctctatggaaacactacccaaaatgagcgttttcggaaacaactggatgcttctttgcctttaaagaaacaactatggcaacaaaccattcaagcaaaaatcaacaatcaagcatcttccttatccatatgtataaacgaagatataaaatgcatgcgtatatgggctaacgatgtacgaagtggagaccccgacaatctggaagcacgtgctgcagctttctactggaaaacactttttcatgacattgaaaattttacaagagaccgagatggcataccccctaataatcttttaaattatggttatgccattctccgtgcagttatcgcacgttctcttgtaacaagcggattattacccacattaggcattcaccatcataaccgatacaatgcctattgcttagcagacgatattatggaaccatatcgccccttcatagaccagctagtctatcaactatactctgaaaacaaaatggaacttacaaaagaagtaaaagccagtttattatccatccccacaatagatgtcagaatcagtgggaaaagaagtcctcttatgatagcagcaagccaaacaacggcatcactatataaatgcttttctggagaatcacgaaaaatcatttatcctgaattttaatggaacgtttcagcgaatatagagttatgtggattttagttctttttgacttaccaacagaaacaaagaaagacaaaaaagcttatactgactttcgcaaaaatctacaaaaagatggattcacaatgtttcaattctccatctatgtacgccattgtgcaagcagtgaaaatgcagctgtgcatataaaaagagtaaaatcctttctacctgaatatggtcaagttggaattatatgtatcacagacaaacagtttggagaaattgagctattttatggcaagaaagcaagtggggtaaaaacaccaggacaacaattagaactcttttaaaataataaatcccatggttaatatgggatttattatttcaagaaacaactttttctttttctaaattttcttataacctactgataaacaatataaaacaatcaacgagttgtttccagtggttcaaagatactaaaatgaaagcaaatcacaacaaagctggcagtctcagaccgttctgtacagttgtttccagtggttcaaagatactaaaatgaaagcaaatcacaacagaaaagttatgacgaacagaaaaaagaagttgtttccagtggttcaaagatactaaaatgaaagcaaatcacaacatatgtcagctaagttaccaatcccgcgtagttgtttccagtggttcaaagatactaaaatgaaagcaaatcacaaccatcaccagcagctacagtaccagataaaagttgtttccagtggttcaaagatactaaaatgaaagcaaatcacaacatatgtcagctaaactgcctattcctcgtagttgtttccagtggttcaaagatactaaaatgaaagcaaatcacaacacaagaagacgggagctcttggagtgatagttgtttcccgttgtttaaagatactaaaagtttttctatatttaaatatcatttgtccctataataacacataaaaagctgcctccacaccagagtgtttgagacagcctttcttcattaataaaacctataattaatcaaccaaagggaacataaagccttttccgtcattatcagcaaacttagcccctgaaggaagaggcagatgtttggcattgttactgaaatcccaaagcatggtttcatcctcggtgatttctcccgtgtcaaggttgcgcttctttccgtttagtggataatacagcaccagattctcatcacttccgtctacagttttccacatgaactgcttcaactgctgaggtgtgcgggccgtcttccagaaacggatttcacgaaccagctcgttcgcaccgccaatccaaaaacctaccagaccgtaaggccctgtacggatttcacggtcggccaccaattccccattcacatatacatagtttttcttaccgtcgtacacgaaagctagcatgtaccaggtgtcggcctgtgccgcaaagacatccgccggtacgtcaatctgagaacctccagtcttaaactgaagctggtcgggacggatggtcacgtcgccgaagcgaggatagatttcatcgagtgcaccggctccagatacgagtttggtaccacagatcgagcggttgttgctctggtatgcactacggttcaccataacctccatcgtccactggtccaccttgaaatcgtccgggaacatcttggcatcttcactgccgtatccgtcaatgcgaagacacttcgtattgatgcgctgctccagtacaatcagtgattcagattcactgtcaatcacgggtaccgtaccgcccctcagttttaccggcaaggcgtagcttccctgcaaggagaatttcacatccttaaactttaccggcaaatattgcaatgtctgcttggagttgaacaccacttccttgcccacctcatacatttcgggcggaagcatcagataatccgttccatgcttcttgttatatgcttccagctgctccttgttgccggcctctaccgtcaccgtcttagtatcattttcctgctgtaccagtgatacggtgatagacttcacgtcgacttcctttccttcttccacgaatacctgcgaagattcgccagtcttgatgtaagccccctgtgccgaccggtattcactggttgcatccttgtataattcattctggcaggaacaaatcagcaaggctcctgcgaatatgctgaaatataaattctttttcataattcaaattttaatctaacttacccggataaaccacatttcccaagcgcaaggcttctctgagccatttgtaaggaggtgtatttccatagtcgtattccatgtgatacgtaccgatgccaccgatgcgtctgccgtcgggaaggtccagcgtggcataatcaaaaatctgacgtccttccggataagcattgatttccggacgtacgctggtgtactcatctactccacctgtctgccagccttgctcaaactctacggtgataatggtcttccgctcccagttttcaaggtgaggctgattgattttcctaaggacctgtgcggtggaacgttcccagtatgcctgataaatatagtggtcgatgtacttggaagcctcggtagaaagtttctcaggctgaccgtccattaccagcattctgccggccggacgcaaacggtctgaaagggttttgataaatacgaacatgtccgtattgcccgaattttcgctgatcatctcaccgttagccatcgaacctgaatgaccatagccgggctcatagtcaatgtcgaaaccgtccaggttgtacttctcaatggtatcgcagatggcatttgcataggccttcacgccttccacaaagttaccccctcctttttcttcaatccagtatttcttcggttcctgtcccggaggagtcatctggtcgcccaggtcctgtacaatccagcacaacagcgcttttccgcccttgatttcctgaaagaacttcaagtcttttttctgttcttccgaaaggtttccacgcgtaccccacaaggatacgaagtccacgctatcgggcagcatcttcaggtagttctgcgcattgctgcctcgtccggtccagttgccgaaccagccgaatcccttcacatgaggcgtctgacggtattctctcagtttggcaaaatagtcacgcatggagggagtcaggtcggcttcactttccgcctccagcaagggaatgtatttttccaggttctcctggttttcgaacgtttctctttcaggcacggtccattcggaacaggccacgaagcctgccgccagcagcagggctcctgcatatcttatgatttttttcatcgcttcatttgttacacttttccgtaaaactcatttctcatttcggctgtttgggacggttgttgcgcacccaccacagcttggttgctccctggtcttccccacccagcagcgccggcacttccgacatgttggggtttgtaccatattctgccggagcaaagcggaatctttcgggcgtaatggcatcttcttcacctcctatgctcacgtaagctttgtcataagccggtttgagcagataaggatagcctgttcggcgatattcggtccaggcttccacggcattgggatagagtgccaggtatttctgggtaatgattttctgcaacttcacttcatccgaatcggcatcgttccacttgggagccacatttccgggagaaagcttgcaggaatattcacggttataaggcaacacagaacggttgatgtcataaggaagatcgtcagtctgcagataagctgcaactccatttgcgccgctttcctcgaacgacttggtaacaccttcttcatacaaatctttcggattgcctcctgtcagtttgtaaagagcagcctctgctttcaggaaagacacctccgaggcacgcatccagaacaaaggagaagcggcatcgaccttcggtttggaagccccattcttggcctccgtactaaggggattgtagtttgtaggaggaataggtacgaaatagccattcgaagtagccgtaaaataagcaagcaagcgaggatctttatatccctgcatgtaagcccagatggtagctcccagacggcattctccgtagtcctccaccgttggcagcatggagttcatcagcggcaacttatccgtgctccgtatcttggcctcctgtgccacggtttctataacacccccgtgagaagggtcaagggcaaacgtgatgtattcctttgccagcgcctcatccttgaaatgcacgcggacagccatgcgcagcatcagagagttggccagacgaacccagctggaagcatttccgtcataaatcaaatcgtacgacggaagtactttcgaagcggtatttaccagcagttccgaagcgtccttcaggtcggccagcatcgctttgtacacggcctcctgcgaatccagtttcggtgcaatatctccgttgccggcgttggtatatacaatcggaccaaacacatccgtcgcgcggagccaggcaacagccttgacaatattggccacagcccgcacttccttatcggcagggtcttcagaatccttcgtatgcttgtagatgtcattccatgcacggaacaatttcgaatagaaattctggtaggcatagctcatacgggcatccgtaaagttccacgtggcctccgtgttgaaattccagttgttgttcatgccccagtagccgatgtagttgccggccgacatgatgtctgtattggctaggtcattgcccggtcctgtcgattctgtgggcgaaccgatgggaataaccagcttctgcatgtccatgaaaggagccccatacagcagtccgcccgtcttcattccttcttccgtcacaccatagatatttgtattgatctgctcatagttgcaagatgcaagtgccaatacggaaaatacaggtatcaaatagtttcttatcttcatattatacgttgtttttcatgatttgttagaatccaaatttaaggctcactccatacgtgcgctggctgggcaacataaagtaatcgtatccttgtccgaaggtgccggtagaagccgtcagttccggatcgaaaggagctttgttgtaaatcatccaaaggttggtaccatacacggacaggttcacgctatggaacggagtacccttgaaccaggaattggggaaggtgtatcccagactggcttcctgcaggcggacgttggtagcagagtacacattatacgcatccaggttcaccaccgattcataatagtcttttggctgaactgccacattgcccaccatgacttttccggcatcacgggcatcggccgaggcctgcgacacaccgaactggtcgagcacagcctgtgttttggataccacgatacctcccaaacgggcagtcacaaggaagttcaggttaaagcctttgtaggtaaagccgtttctccagcccaggttccacttggcattgacactacccagcttgtagggttccgtagattccgtggttatggtctggccttcattgtacacgatgtagccgtcctgatcacgtttcaggcgttcttccgcatatatcgtacccacttcttctccttcgcgcaggcggaaacgtcccaccttgatgtcgctcaggtcgagtgcctctccggtcacggggttcttcacgttcgaagccagttcgatgattttattgcggttggcagtagctgtcagcgaggtactatatgagaaattgccaaaggtctggtcgtatcccagcgtcagttcgataccccggttttccacgttaccggcctgcacgaacatatagtcataacccgacgtttccgacagcttggcttcgagcaactggtcgtaggtattcgatttatacaacgtcacacccagcgacacggtattgttcagccacttggagtcgatacctacttcataagaacgggttctttccggcttcagctccggcagcggataatacttgaaaggtttgattacaccaccttcaatggtgtgcgttatggttccgggagtcagtccggtgtaaggaataggcgaacccacctccgtatatgaagcacgcactttcaggaagcccagcaccggtgaaatggactggcgcatggtttcgggcaacaagtccgtcacaatagccgaaagtccgacagaaggatagaatatccagggcgacttgctgttgaccagctgagaaggcttgtcggcacgaccggtcagtgtgagatacacggccgacttccatgagatttccgcagagccgaacacaccgagattcatcttacggttgtcacctcccgtctgtgaaggtacaccggtagaagggtctatgttatcataagcaaacagattcggcaccttaagcagctgtccgccatatcctcttccttttgtatcgtattcctcgaaagaagcacccacgttgacattggcataaaaatctccggcaaaaggcttcgaaaggttggccataatgtctgcatatttctggcggaaagtctcattcgaataagcataacgtcccagcggcttggcaaacgtaccgtgcgtagaggcataacgcttgtcttccttctccgtgtaggtattatccagacggcctcgtgcactcacgttcaggtaatcggtaatttcatatttcaacgatgcatacagcatgtagcggtctttcacctcaggacgcaaattgcggtaagccacccagtaagggttctgcacagccataccgaagtcgcccggtgtccacgactgcacattgtagcccagctcggcatcatagcgttcgaaatacttttccttctcaaaattctctccgcgcggatacagataagctcccagaagagggttgaaatacgtaccgtaggacagcatgttgttgtaatactcacgcacgtagctggcagacaagtccatggtcagcttatcgttgaagaacttggtggtatttcgcaccatggcattgtagcggtggtatttgttgttgggcacgatacccttggcattgaccgccgaaccggacacatacgtctggttcttgtcatttcccacagacagattaaaagagttggtaaaagtggttccggtattgaagaagtcggccggattatatgaagaaggtaccggcagtttttctccccacgaggcagcctccccactcacgtttccgtaggtgttctggaagcgcggcagcacgaaaggattcgagaattcagccgatgacgacacgttgacactcacttttccggcagcacctttcttcgtggtaatcaggatgacaccgttggccgcattggctccgtagagtgcagcagccgagggacctgtcagcaccgacagactttcaatatcttcagggttgaagctggcaataccttcactcgacgtgcgtcctgcaccgaagcccgtaccgtcgcctgtgcggtcggcctgattgcccatgggcacaccgtcaatcacatacagcacgttgt

SEQ ID NO: 1258 - DNA, 22895 bp, synthetic construct
  misc_feature 1..22895: note = Synthetic
  source 1..22895: mol_type = other DNA
aggccaacctggaggcgtacagcaagatttcggcctacgactggtacaagccgcatcaggatattttcaatcccgagaaccccgtcacgctggaaatccacacgccgcgcacctgtctggaactgattgacgaactgggccgcacggacagccagtacatgacgctgcaaaaccgtctgcgcaaggaggtgaatctctttaccggccacttcgacgaggagaataccttcaagttcaagaccaagtttaccgaggactgggagtatatccgctttgccgaggaactgcacgacttcgtggaagagaacaaaatcagcgaattcgtccgccgcatcaacaacgagcactccgacatcttcaagcgcatcagcatggatacctcaatgctcacggcttcggaagacgatattcaggacctcatcggtcaggtgaacaagggattccagacgtgcaacttcgtgggcgttatccagtgcatcgaaatgaaggtggaagaaagcagcaaccgtgtggtaaactgtctgcgtgccatccagaagtactataacgagcatgcctatgacctcacgccgggcaccaacctcttctcgtcggaaaacgagcagctggtgaagcaggaggccatcgccctgctccgcgacttcatcaaggagattcacgcctaccgctacgacagcatccgcctgtacgactcgttcgagctgcgtttccgcatcatcgagaacaacaacgacacgggcttcgtggagaaactgtcgaacgtgggttcggaaggtaccgacattctggtgaaggccatgatcaacatcatgttgctgaacgtgttcaaggaaggggcttcgcgcaagttcaaggacttcaaactgcactgtatgatggacgaaatcggtaagctccatccgaacaacgtgaacggtatcctgaagtttgccaacgaccggaacatcatcctcatcaacggatcgcctaccgaactgaaccgcgatgcctacaagcatgtgtacctgcttaccaaaggagcgcagagcaagacacgcatcgcccgacttatttcggaccagaaattataggcttttcaacctttaaaacagggttgaaaaaacgcctttgtgttttaacttaaacgcctttacgttttaggtaaaacgcaagggcgttttactttaaatgcacttgcgtttgaaagcaaacgcttaggcgttttagaagtgcttaccatgattccaaataatagaattttattttacaaatcagaattttattcttatctttgccacatgacaatcgagtgaatctaatgagaatatttacagaacaagctataaaagaatatgcagaagcgcatcctgatgcaaaagtagctttgcaagaatggactaccatagttaaaagaagcgaatggacttgctttgcagacgtaaaaaagacctttaatagcgtagataatgtgggtaaccaacattatgtattcaatatcaaaggcaatagctacagactgattgtagtgataaaattcactataaagttcgtttatattcgttttataggcactcatgccgagtatgataagatagctgattgttcagttttataattaaacagaatcggcaattaccgatcaaccaagagccatgacaaagatagaaacaaaagctcaatacgattgggcagtaaaaagagttgaggaattacttccactggttacagatgaaacccctctggataatcctcacagtatagagttggaattactttctaatctcgttgcagattattctgaagaacatttcgcactgggagaaccaacgctggttgatgtcctcaaacttcgtatgtatgagatgggacttaatcagaaatctttagcaaaattaatcggagtcagtccttcacgcttgagtgattatatttccggtaaatgtgaaccgaccttgaaagtagcccgcgaaatcagccagaaattgaatattgacgccaatatagtactgggtgtttaatatgagtatagaaaacagaaaaaccgcctaattcacaatgtaataagcggttttaagtcggagccgaaagcgggactcgaacccgcgacttactcattacgaatgagttactctaccaactgagttatttcggcaacgtgtttcgttgaaaacggttgcaaaattactgttttcttgaaaacagccaaataaaaaagagatttttttccgagaaactacatttttccagcccgtacaacccgtttccgttacatcgcaggagcatttgacacattattacgtgtaatttgtacaatagtcccttgtctgccttctgccgattttctacttttacccgcaaaatgaaacattacactaccatgaaaaagaaactgataatttcactgctggcactggcttcgctgggagccggagcacaaaacttgcaaaagggagactacggatacttgtactgccacatgagcggacgaggagaatggacggcctacgccctgagccgtgatggcgtacactttcacgacctgattgatggcgaccccgtatacaatgtagaagaaatgtcaaaaatagagggaggagcacgcgatgcctttatctgccgcacgtccgacggaaaaggctatctgatggtgactaccgacatgagcaacgccaagagccgctcgtggttcaactacggcatcaacctgctgaaaagtgacgacctgattcactggacttctaccaccttcgacttccgccggggaccggacattttctgtgaccctcagtcgcccgacgtctataaggactacagcaccatcaaacgcgtatgggcaccgcaaattttctgggacccttcgtacgtatggactgatggcacgaagggcggatacatgatatactattcactgcttaatccggcagaagaccagtacgaccgcgtgttctattcctatgccgacgccacctttacacgtctcactaaaccccgcctgctggtggactggggatatgctaccatcgatgccgacattaactatgtgccggccgacggactctatcacatgctcatcaagaaagaaggaggtacacccggcatctttgccgctacagctacaaaactgaccggtctttataaaataaaagatgaaaacgattatgtgaagtttgaaggcaacaaaaagtgtgagggctgctctgccttccagttgatgggcgactctacctggcgcgtggcctacatcgaatactcctccaaacccaaaagataccgcatctgtcaggccgacgagaaactctccaacttccactcccccgtcaccatggagggcgtgaaacatccgcagcacggctcgttcatgcggctcaccgaagaagaatacaagcgcctgcaggagtggtcggacagcatcatgcgcgaaagagccgcccgccacagcggagaaaagaagtaaaaagaggaaaatgaaatatttttgtaaaaacttttggcaaacatcctttcatttgagcagaaaacattatctttgcactccgaattatgacgtgacaaaagagtttgatgtattactgttcaacacatagtaaaaagaataagcgcacattcggagttccggcgaaatggacaaatgccggaagctatttcttttttcttttatgtcacttatttcctgaatatttaagatttcctattttttcaaacacccggaactgcttttcggcaagtccgggcgttttttcgtatatacgagagtagaatagaaaaaaaatacaagatataaagattattagtaacaaggtaatgagaaatgtaacattgatcctcgacgacgggagccgctttcatggcaagtcgttcggctatgagaaaccggtagccggtgaagtagttttcaatacggcaatgaccggataccccgaaagcttgaccgacccttcgtatgccggtcagttgatgacactgacttacccgctggtaggtaactatggtgtgcctcccttcacattcgaagcaaacggactgcccactttcatggaaagcgagaaaatccatgccgaagcgattatcgtaagcgattacagtgaaaaatactctcactggaatgcagtggaaagtctgggcgactggttgaaacgcgaacagattccgggcatcacgggcatcgacacacgcgaactgacaaaggtattgcgcgaacatggagtgatgatgggaaaaatcgtgttcgacgatgaaccaaataacattcccgaagctacctatgcaggtgtgaactacgtagacaaggtttcttgcaaggaagtgattcgctacaacgaaggcgaaggcaagaaaaaagttgtgctggtagactgtggcgtgaaatcaaacattatccgttgcctgctcaagcgcgacgtggaaatcatccgcgtgccctggaactacgacttcaactctctgcagttcgacggtctgttcatctccaacggtccgggcgaccccgacacttgtgatgcagccgtacagaacatccgcaaggccatgcagaacgaaaaacttcctatcttcggtatctgtatgggtaaccagctgctttcaaaggcaggaggtgccaaaatctacaaactgaaatacggtcaccgcagccataaccagccggtacgcatggtaggcacggaaaagtgttttatcacctcacagaaccacggttatgccgtagacaacaatacactgggagccgactgggaaccgctcttcatcaacatgaacgacggttcgaacgaaggtatccgtcacaaaaagaacccctggttctcggctcagttccatccggaagctgccagcggccctaccgacacggaattcctgttcgatgagtttgtaaagttgctgtaatccactaaaaaacaaagaagacaatgaaagaaaacataaagaaagaaaacataaagaaagtattgctgttaggttcaggagccctgaaaatcggtgaagctggtgaattcgactactctggttcgcaggctctgaaagcgctgaaggaagaaggtatcgaaaccatcctgattaacccgaacatcgccaccgtgcagacttcggaaggtgtggcagacaaaatctacttcttgcccgttactccgtatttcgtagaaaaggtcatcgacaaggaacgtcccgacggcgtgctgctgtcattcggtggacagactgccttgaactgcggtgtggctctctacaaagccggtgtgttcgagaaatacaacacccgcgtactgggtactccggtacaggccatcatggatacggaagaccgtgagctcttcgtacagaaactggacgaaatcaacgtgaagaccatcaagagtgaggcggtagaaaacatcgaagatgcccgccgtgcagcgaaggaactgggttatccggtcatcatccgtgcagcttacgcactgggaggtctgggttcaggtttctgcgacaacgaagaagaactgaacgtgctggccgaaaaagcgttctctttctctccgcaggtgctggtagaaaagagtctgaaaggctggaaggaagtggaatacgaagtagtgcgcgaccgtttcgacaactgtatcacggtctgcaacatggaaaacttcgacccgctgggtatccacaccggtgagtctatcgttatcgctccgtcacagacgctgaccaacagcgaataccacaaactgcgcgaactggccatccgtatcatccgtcacatcggtatcgtgggtgaatgtaacgtacagtacgcgttcgaccctgaatcagaagactaccgcgtaatcgaggtaaatgcccgtctgagccgttcttctgcactggcatctaaggctacaggttatcctctggctttcgttgcagctaagttgggattgggttacggactgttcgacctgaagaactcggtaacaaaaacaacttctgccttcttcgagccggcactggactactgcgtatgtaaaattcctcgctgggacttgggtaagttccacggcgtagaccgcgaactgggctccagcatgaagtcggtaggtgaagtcatggccatcggacgtaccttcgaagaagccatccagaaaggtcttcgtatgattggtcagggcatgcacggtttcgtggaaaacaaggagctggttatcgaagacatcgacaaagcactgcgcgaaccgaccgacaagcgtatcttcgtcatctcaaaggctatgcgtgcaggctacacagtagaccaaattcacgacctcaccaagattgacaagtggttcctcgacaagctgatgaacatcatgcagacttctaaggaactccacgagtggggcaacaaccatacacagctttcacagcttccgaacgagctgctctacaaggcaaaacgtcagggattctccgacttccaggtggcacgtgccatcggctacgaaggcgatatggaagacggtatcctggaaatccgtaaccaccgtaagagtgtaggcatcgtgccggtagtaaaacagattgacacgctggcagccgaatatccggcacagaccaactacctatacctgacttacagcggcgtggccaacgatgtacactacctgggcgaccacaagagtatcgttgtactgggttcaggtgcttaccgtatcggttcatccgtagagttcgactggtgcggcgtacaggcactgaacaccatccgtaaggaaggctaccgctcagtaatgatcaactacaaccctgaaaccgtatcgaccgactacgatatgtgcgaccgtctgtacttcgacgaactgactttcgaacgtgtgatggatatcctcgacctggaaaacccgcacggagtcatcgtatctactggcggacagattccgaacaacctggcattgcgcctggacgcacagaaggtaaacatcctgggaacttctgccaagagcatcgacaacgctgaagaccgcgacaagttctcggctatgctcgaccgtatcggcgtagaccagcctgaatggagcgcactgacttctatggaagatatcaacgcatttatcgaaaaagtaggctttcctgtattggttcgcccgtcatacgtgctttctggtgcagccatgaacgtatgttctaatcaggaagagctggaacgcttcctgcagctggccgctaacgtgtcgaagaagcatccggtagtagtaagccagttcatcgaacacgctaaggaagtagaaatggatgccgtggcacagaacggtgaaatcgtagcttacgccatctctgagcacatcgagtttgccggtgtacactcaggcgacgctaccatccagttcccgccgcagaaactgtacgtagaaaccgtacgccgcatcaagcgtatctctcgtcagattgcgaaagagttgaacatctctggtccgttcaacatccagttcctggctcgtgaaaacgacatcaaggtaattgaatgtaacctgcgtgccagccgttcattcccgttcgtcagcaaggtgctgaagattaacttcatcgagctggcaaccaaagtcatgttaggcttgccggtagaaaagcctgaaaagaacctcttcgacctcgactacgtaggtatcaaggccagccagttctcgttcaaccgtttgcagaaggccgaccctgtactgggtgtagacatggcttctacaggtgaagttggctgtatcggcgacgacacttcatgtgccgtactgaaagccatgctgtctgtaggctaccgcattccggaaaagaacgtcctgatgtctaccggtacactgaaacagaaagtagatttgcttcaggcagcgcgcgccctcaaggccaaaggttacaacatcttcgctaccggcggttcttctaagttcctagcagaaaacggagtggaaaacacccgcgtatactggccaagcgaagaaggtcagcctcaggcactggaaatgctgcacaagaaagaaatcgacatggtggtaaacattccgcgtgacctcactcctaccgagttggaaaacggatacaagattcgccgtgccgcagtcgacctgaacattcctctggtaaccaatgcccgtctggcaagcgcattcatcaatgccttctgctctatgagcattgacgacatcgctatcaagagctgggacgaatacaaataatccgtaccacttaaagatatagataaaattaatcccctccggaactatttgtaatgaatgagttctggaggggatcttttatttatagaaaacataaaacaataaaaaagcccaccgataaaggacgatgggcaagcgcctaaatgttttcacaacggaataatccttattgtgatttgcttcattttagttttacaaaaataaaaagaaacaacacaaaagacaagtttttttcataaaaaattagtagttttgagaaaattgaaaaatacaactatgaaacatattttaggtttagacttaggtaccaatagtataggatgggcagttatcaatgccataaaagaagaaaacactcaaaaagaacaactcataggaatcaatactgcaggaagtagaataattccaatggatgccgcccaattaggagatttcaataaaggaaacactgtttcacaaaccgccaaccgtacacaatttcgtggggtacgccgattatatgagcgcaagaagctcagaagagaaagattgcatcgcatcctacaattattaggatttcttccaaagcattatgccagccaattagacaggtatggaaagtttatagccaattccgagcccaagctcgcttggacaacaaatacgcatgaaccttcttactttatctttcaaagctcgttccaagagatgctcaatgactttttacaaaacaacaaccaagtaaaaaaggttccatacgactggactttgttttatttgcgcaaaaaagctttgacacaaaaaattgaaaaagaagaattagcctggattttattaaatttcaaccagaaaagaggatactaccagctacgcgaagaggaaacagaaaaagcgtcttctaaaacacggcaatattttgacagccagattgtaacagatattactgacactgggcaaatttataaaggattaaaaatattcacaataacacttgaaaacggagagaaaggaaaatttttcagtaaaaacatgcctgactggaaaggtcagaaaaaagatattattgcaatcatagaccttgataaaaacgggaatgacaaatatgatgaaaatggagagttaagccgtcgtttcaaaattcctaccgaacaagaatgggaagaacagtgggagcttattaaaacaaaaactcaaaaagatcttgacacatctcataaaacagtaggcgcatacatctatgatacactattacaaactcctagccaaaagattcggggaaaattgattcgcaccattgaacgcaagtattataaagacgaattaaatcagatattaaagaaacaagaagaatttcacccagaattgcgagactccaatttattagaagcctgcatcgaagaactgtatcctaataacgaagcccatcgtaatgctattgcaaaatatagcatttcccaattgcttattgaagatattttgttctatcaacgtccacttaaaagcaaaaaatcgctcattagtaattgcccttacgaagaatacacatacaccaataaagaaacaggagaaatatgcacttcttcattaaagtgcatagctaaatcacatcctctttttcaagagttccgtctatggcaatttatatcaaacctgcgaatttatcaaaaggaaggaaccataaacgggaaatttactactgatatagatgtaacaaatcaatttctgaaaaccgaagatgactacgccaatttgttcgactggcttaatcagaaaaaagaaatcagacaagacacatttcttaaaaaccagcatttggattaaaaaagaatatagcaaattatcgctggaattatgtagaggacaagacatatccttgtaatgagactcactacaagatactgtcatattgggaaaaagcaggaatagagcaatcagccttaacatcagaaatagaagagaaactatggcatattctatactctatttctgacaagaatgaactcagaaaagctttacagcatttcgctgataaaaactatttaagcgataaatttgcagatacttttcagcaaattcctcctttcgagaaagattacggttcctattctgccaaagctatcaaaaaactattgccacttatgcgtataggaagatattggaaagcagaaaatttcgacagtacaactcttgaccgtatagaaaaaatattaactggagagtttgaagaaaacataaagaaccgaaccagagaaaaaacaatccatttggacaatttatactcatttcagggacttccaacctggctggcatgctatatcgtatataaccgccattcagagataaaggacgttactaaatggcaacaaccttcagacattgatgcttttctaaacgcattcaagcaacattctttacacaatcctattgtggaacaaatcatcatggaaaccttacgcactgtacgagatatttggaaacagacagggcatattgatgaaattcatgtcgaattaggacgtgaaatgaagaatcctgccgagaaacgcagaaaactcacccaacaaatacaagaaaacgaaaacaccaatctgcgtatcaaggcacttcttactgaatttgccaatccagaatttggaattgagaacgtacgcccgcactctccaagtcagcaagatttattgcgtatatatgaagaagaagttctaaacgaaactaaagatataccagaagatattgctgttattttaaagaaattcaatgaaattgataccaaaaaacgcccgtctacatccgatgtcttacgttataaatgctggctggaacaaaaatatcgttctccttatactggagctatgattcctttgggaaaacttttcacccctgcatacgaaattgaacatgtaattcctcaatctcgttattttgatgattcattcacaaataaagttatttgtgaagcagaagttaataaactaaaaggcaatatgttaggctatgaattcatcaaaaacaatcaagaaagaatagtagaactaggattcggacaaaacgttaaaatacaaacggttgaagcttatgagctatttgtgaaagaacattattcttacaaccgcactaaaatgcaaaagttgttgatggaggacattccaaaccagtttattgaacgtcaattaaacgacagccgttacattagcaagtttataaaatcattattatctaatatagtacgtgaagaaggagaagaagaagctacgtccaaaaatgttattgtttgcactggaagtattacataccggctaaaaaaagactggggactcaacgatgtatggaataaaatcattttacctcgtttcatgcgcttgaacgaaattacggaaagcaatcgctttacgacaaccaatgcctgcaataaaacaattcctgctatgccgttagatttacaaaagggattcaacaaaaagcgtattgaccaccgccatcatgccatggacgctattgtcatagcctgtgccaaccggaatatagtcaattatttaaataatgaatcggccagcaagaatgcaaagatttcacgtcaggacctgcgacaaatattatgcaagaaaacaaaaaccgacaatttgggaaactatcaatggctcattgacaaaccttgggatacatttacccaagatgtgtattccattttaggcaacatcattgtaagcttcaaacaaaatctgcgtattatcaataaaacaactaaccattatatccactatgaaaacggaaagaaagtaagttgctcacaaaaacaaggtgatagctgggctatccgtaagcccatgcataaagaaaccgtatatggagaaatcaacctgcgcagaacaaccactgctacattgaaagccgttcttgagaatccccaaagaattattgaaaaagacttaaagaaaaaaataaaagagcttttaacgcagggactcaatgaaaaacaaatcaaaaaatactttgaagacaataaagatatttggcaagaaataaatctaaagaagataccagtatactatttcaccaaagaaactgccaacagattctttgcttgccgtgaatcaataaatacaactttcaataaaaagaagatagaagaaaaagttgcagatacaggaatccaacaaattttactgcgccatttggagcagaatggcaataatccggaacaagccttctcacctgaaggtattgaacaaatgaataaaaatattacatccctaaataatggaaaatttcatcagccaatttataaagtcagaacatacgaacaagccgataaattcgctgttggacaaacaggaaataaatccactaagtttgtagaggcagcaaaaggtactaacttgttctttgcaatatatgaaactgctcataaacgcaactttgcgtctattccattaaatgtagttattgaaagattgaagaaaggattaccccctgcacccgaaaacgaaaaaggaaatctgcctaaatttatattatcacccaatgatttagtatatgtaccaataaaagaagaaatagaaaatggacatattaatcaaccaatacaaaaagatagaatttataaaatggtaagttgtacaggaaatcaatgtttctttatcaaatccaatgtagccaatacaattattgataaatatgaattttctccactgaataaaatggaaagagctatcacaggagaaatgataaaagaaacatgcatccctatcaaaacagatagattaggaaacattataacgtcaatcagcctatgataaagaaaacattatattttagtaacccagcatacctatcattacgtaatgcccaacttgtcataaaacttccggaagtagagaaatgttcttcacttccggaagcgatgaaacgtcaatctgaaataaccaaacctattgaagatataggtgttgttattttggataataaacaaatcaccattacgtccggagctattgaagcattgcttgaaaataattgtgcacttattacttgtgacagtaaaagtatgcctgtaggattaatgctccctctctatggaaacactacccaaaatgagcgttttcggaaacaactggatgcttctttgcctttaaagaaacaactatggcaacaaaccattcaagcaaaaatcaacaatcaagcatcttccttatccatatgtataaacgaagatataaaatgcatgcgtatatgggctaacgatgtacgaagtggagaccccgacaatctggaagcacgtgctgcagctttctactggaaaacactttttcatgacattgaaaattttacaagggaccgagatggcataccccctaataatcttttaaattatggttatgccattctccgtgcagttatcgcacgttctcttgtaacaagcggattattacccacattaggcattcaccatcataaccgatacaatgcctattgcttagcagacgatattatggaaccatatcgccccttcatagaccagctagtctatcaactatactctgaaaacaaaatggaacttacaaaagaagtaaaagccagtttattatccatccccacaatagatgtcagaatcagtgggaaaagaagtcctcttatgatagcagcaagccaaacaacggcatcactatataaatgcttttctggagaatcacgaaaaatcatttatcctgaattttaatggaacgtttcagcgaatatagagttatgtggattttagttctttttgacttaccaacagaaacaaagaaagacaaaaaagcttatactgactttcgcaaaaatctacaaaaagatggattcacaatgtttcaattctccatctatgtacgccattgtgcaagcagtgaaaatgcagctgtgcatataaaaagagtaaaatcctttctacctgaatatggtcaagttggaattatatgtatcacagacaaacagtttggagaaattgagctattttatggcaagaaagcaagtggggtaaaaacaccaggacaacaattagaactcttttaaaataataaatcccatggttaatatgggatttattatttcaagaaacaactttttctttttctaaattttcttataacctactgataaacaatataaaacaatcaacgagttgtttccagtggttcaaagatactaaaatgaaagcaaatcacaactactcttacttatgataatgaacataaaccgttgtttccagtggttcaaagatactaaaatgaaagcaaatcacaacaatcatatcaatgctacgatacggccaaatgttgtttccagtggttcaaagatactaaaatgaaagcaaatcacaactgctgcttatcgttatgcatctcgtatgggtttttccagtggttcaaagatactaaaatgaaagcaaatcacaacgatgtagttcggattgttgcggatgcaattgttgtttccagtggttcaaagatactaaaatgaaagcaaatcacaacttggtgcgttatcttatccgcgttatgaagttgtttccagtggttcaaagatactaaaatgaaagcaaatcacaacaaaagaacggttattctcctttccaaagggttgtttccagtggttcaaagatactaaaatgaaagcaaatcacaacacaagaagacgggagctcttggagtgatagttgtttcccgttgtttaaagatactaaaagtttttctatatttaaatatcatttgtccctataataacacataaaaagctgcctccacaccagagtgtttgagacagcctttcttcattaataaaacctataattaatcaaccaaagggaacataaagccttttccgtcattatcagcaaacttagcccctgaaggaagaggcagatgtttggcattgttactgaaatcccaaagcatggtttcatcctcggtgatttctcccgtgtcaaggttgcgcttctttccgtttagtggataatacagcaccagattctcatcacttccgtctacagttttccacatgaactgcttcaactgctgaggtgtgcgggccgtcttccagaaacggatttcacgaaccagctcgttcgcaccgccaatccaaaaacctaccagaccgtaaggccctgtacggatttcacggtcggccaccaattccccattcacatatacatagtttttcttaccgtcgtacacgaaagctagcatgtaccaggtgtcggcctgtgccgcaaagacatccgccggtacgtcaatctgagaacctccagtcttaaactgaagctggtcgggacgaatagtcacgtcaccgaagcgaggatagatttcatcgagtgcaccggacccagacacgagtttggtaccacagatggaacggttgttgctctggtatgcactacggttcaccataacctccatcgtccactggtccaccttgaaatcgtccgggaacatcttggcatcttcactgccgtatccgtcaatgcgaagacacttcgtattgatgcgctgctccagtacaatcagtgattcagattcactgtcaatcacgggtaccgtaccgcccctcagttttaccggcaaggcgtagcttccctgcaaggagaatttcacatccttaaactttaccggcaaatattgcaatgtctgcttggagttgaacaccacttccttgcccacctcatacatttcgggcggaagcatcaggtaatccgttccatgcttcttgttgtatgcttccagctgctccttgttgccggcctctaccgtcaccgtcttagtatcattttcctgccgtaccagtgatacggtaatagactttacgtcgacttcctttccttcttccacgaatacctgagaagattcgccagtcttgatgtaagccccctgtgccgaccggtattcactggttgcatccttgtataattcattctggcaggaacaaatcagcaaggctcctgcgaatatgctgaaatataaattctttttcataattcaaattttaatctaacttacccggataaactacatttcccaagcgcaaggcttctctgagccatttgtaaggaggtgtatttccatagtcgtattccatgtgatacgtaccgatgccaccgatgcgtctgccgtcgggaaggtccagcgtggcataatcaaaaatctgacgcccttccggataagcattgatttccggacgcacgctggtgtaattatctactccacctgtctgccagccttgctcaaactctacggtgataatggtcttccgctcccagttttcaaggtgaggctgattgattttcctaaggacctgctcggtggaacgttcccaatacgcctgataaatatagtggtcgatgtacttggaagcctcggtagaaagtttctcaggctgaccgtccattaccagcattctgccggccggacgcaaacggtctgaaagggttttgataaatacgaacatgttcgtattgcccgaattttcgctgataatctccccgttagccatcgaacctgaatgaccatagccgggttcgtagtctatgtcgaaaccatccaaattatacttttcaatcgtatcacagatggcatttgcataagccttcacaccttccacaaaattaccacctcccttttccacaatccagtaattcttcgggtcttgtccaggaggagtcatctggtcgcccaagtcttgtacaatccaacacagcagcgcttttcctcccttgatttcctggaaaaacttcaagtcttttttctgctcttccgaaaggtttcctcgcgtaccccacaaggatacgaaatctacgctgtcgggcagcatcttcaggtagttctgtgcattgctgcctcgtccggtccagttgccgaaccagccgaaccccttcacatgaggtgtctgacggtattctctcagtttggcaaaataatcgcgcatggagggagtcaggtcggcttcactttccgcctccagcaagggaatgtatttctccaggttctcctggttttcgaacgtttctctttcaggcacgttccattcggaacaggccacgaagcctgccgccagcagcagggctcctgcatatcttatgattcttttcatcacttcatttgtttgacatttccgtaaaactcatttctcatttcggctgtttcggacggttattgcgcacccaccacagcttggttgctccctggtcttcaccacccagcagcgccggcacttccgacatgttggggtttgtaccatattcggccggagcaaagcggaatctttcgggcgtgatggcatcttcttcacctcctatgctcacgtaagctttgtcataagctggtttgagcaggtaaggatagcccgtccggcgatattcggtccaggcttccacggcattgggatagagtgccaggtatttctgggtaatgattttctgcaacttcacttcgtccgaatccgcatcgttccacttgggagacacatttccggtagaaagcttgcaggaatactgacggttgtaaggcaacatagaccggctgatgtcataaggaaaatctgtaacctccagataggcagccactccgtttactccgttttcttcgaacgacttggtaacaccttcttcatacaatgctttcggattacctcctgccagtttgtaaagtgcggcttccgctttcaggaaagacacttccgaagcacgcagccagaacaaaggagaagccgcatcgaccttgggcttggaggctcccgtcttggcagcggagctaagggcattgttgttcgtaggaggaagaggcatgaaatagccgtaagaatcggacgtgaacaaggcacccagacgcggatcgtcatacccctgcatgtaggcccagatggtagctcccaggcgacattctccgtagtcctctacagtcggcagcatggagttcatcagcggcaacttgtccgtactccgtattttggcctcctgtgccacggtttcaatgacacctccgtgagaaggatcaagggcaaacgtgatgtattcctttgccagcgcttcatccttgaaatgcacgcggacggctatgcgcaacatgagcgagttagccagtcgtacccagttggaagcgtttccgttataaatcacatcgtacgacggaagcacttttgatgcggtattgaccagcagctgcgaagcatccttcaaatcggccagcatcgccttgtacacggtctcctgagaatccagtttcggagcaatgtctccgttgccggcattggtatatacaatcggaccgaacacatccgtcgcacggagccaggcagtcaccttgacaatattggctacagcctgcacttccttgtcggcagggtcttccaaattcttcgtatgcttgtagatatcattccatgcacggaacagtttcgaatagaaattctggtaggcatagctcatacgggcatccgtaaaattccacgtggcctccgtgttgaaattccagttgttgttcatgccccagtagccgatgtagttgccggccgacatgatgtctgtattggccaggtcattacccggtcctgtcgattctgtgggcgaaccgatgggaataaccagcttctgcatgtccataaaaggagccccatacagcagtccgcccgtcttcattccttcttccgtcacaccatagatatttgtattgatctgctcatagttgcaagatgcaagtaccaatacggaaaatacaggtatcaaatagtttcttatcttcatattatacgttgtttttcatgatttgttagaatccaaatttaaggctcactccatacgtgcgctggctgggcaacataaagtaatcgtatccttgtccgaaggtgccggtagaagccgtcagttccggatcaaaaggagctttgttgtaaatcatccagaggttggtgccatacacggacaggttcacactatggaacggagtacccttgaaccaggaattggggaaggtgtatcccagactggcttcctgcaggcggacgttggtagcagagtacacattatacgcatccaggttcaccaccgattcataatagtcttttggctgaactgccacattgcccaccatgacttttccggcatcgcgtgcatcggccgaggcctgcgacacaccgaactggtcgagcacggcctgtgtcttggatatcacgatacctcccagacgggcagtcacaaggaagttcaggttaaagcctttgtaggtaaagccgtttttccagcccaggttccacttggcattgacactacccagcttgtagggttccgtagattccgtggttatggtctggccttcattgtacacgatgtagccatcctgatcacgtttcaggcgttcttccgcatatatcgtacccacttcttctccttcgcgcaggcggaaacgtcccaccttgatgtcgctcaggtcgagtgcctctccggtcacggggttcttcacgttcgaagccagttcgatgattttattgcggttggcagtagctgtcagcgaggtactgtatgagaaattgccaaaggtctggtcgtatcccagcgtcagttcgataccccggttttccacgttaccagcctgcacgaacatatagtcataacccgacgtttccgacagcttggcttcgagcaactggtcgtaggtattcgatttatacagcgtcacacccaacgacacggtattgttcagccacttggagtcgatacctacttcataagagcgggttctttccggcttcagttccggaagcggataatacttgaaaggtttgattacacctccttcaatggagtgcgtaatggtgccgggagtcagtccggtgtaaggaataggcgaacccacctccgtataggaagcacgtactttcaggaagcccagcaccggtgaaatggactggcgcatggtttcgggcaacaggtcggttacgatggccgaaagtccgacagaaggatagaatatccagggcgacttgctgttgaccagctgagaaggcttgtcggcacgaccggtcagtgtgagatacacggccgatttccacgagatttccgcagaaccgaacacaccgaggttcatcttacggttgtcaccacccgtctgtgaaggcacaccggtagaagggtctatgttgtcataggcaaacagattcggcaccagaagcaactgtccaccgtatcctcttcccttcgtatcgtattcttcaaaagaagcacccacgttgacattggcataaaagtctccggcaaaaggcttcgaaaggttggccatgatgtctgcatatttctggcggaaagtctcattcgaataagcataacgtcccagcggcttggcaaacgtaccgtgtgtagaggcataacgcttgtcttccttctccgtgtaggtattatccagacggcctcgtgcactcacgttcaggtaatcggtaatttcatatttcaacgatgcatacagcatgtagcggtctttcacctcaggacgcaaattgcggtaagccacccagtaagggttctgcacagccataccgaagtcgcccggtgtccacgactgtacattgtagcccagctcggcatcatagcgttcgaaatacttttccttctcaaaattctctccgcgcggatacagataagctcccagaagagggttgaaatacgtaccgtaggacagcatgttgttgtaatactcacgcacgtagctggcagacaagtccatggtcaacttatcgttgaagaacttggtagtatttcgcaccatggcattgtagcggtggtatttgttgttgggcacgatacccttggcattgaccgccgaaccggacacatacgtctggttcttgtcatttcccacagacagattaaaagaattggtgaaagtggttccggtattgaagaagtcggccggattatacgaagaaggtaccggcagtttttctccccatgaggcagcctccccactcacgtttccgtaggtgttctggaagcgcggcagcacgaaaggattcgagaattcagccgatgacgacacgttgacattcacctttccggcagcacctttcttcgtggtaatcaggatgacaccgttggccgcattggctccgtagagtgcagcagccgagggacctgtcagcaccgacagactttcaatatcttcagggttgaagctggcaataccttcactcgacgtgcgtcctgcgccgaagcccgtaccgtcgcctgtgcgatcggcctgattgcccatgggcacaccatcaattacatacagcacgttgttgtctcccttgatagacttgtttccacgcatcacgacgcgggtacctccacccacacccgaagcactgcgctgaatgctcacaccggctacttttccgttcaggctgttcacgaagttggcatcctttacctttgtcagcacatcattcttcacctcctgcacattgtagctcaaagccttctgtgagcgcttgatacccaatgccgttaccaccacttcatccagttgttcggtatcttccttcatgaccagaacacccagtgtttccttggcggaaaccgtcaggttctgatatcccacgtaagaaatttcaagcgtggccccttcgcctgctgacatggtgaagtttccgtctatgtcggtaatcgtaccgtttccggtacccttttccagcacgcttacccctaccagaggttctccgttgacgtcaacgactgttccactcactgtgattttgtttgcttgcgccgacacctgtacgggagacgcactggctcctcgcggaaggttggcataggccgcatttcctccctgacttatcagcaaaaggaatagcagctgagtagctctttctattttcatagatgatttaagattttgttggacaattaagtttagttatcgcggtttagtggtatcctgaggaagggaattcccctcctcaggtaccggttaaaaaaagtctagtttggtttttgttaaaaaatgggtgtaacattcctgcacaggtacttccctgaactgtaaaaacagtctgcgggccgcatccggccttcttgtcagttttattcttcgattttagaagaacgctttctctatcctttcaaatgatataatacaggctcgtttgtaatcggccttacgaagtgatttttttctgtagtttagcttaagctcgttcagtttgtgtccgtaaaaacaaggtcggtagttttatcggggtgcaaatatatgcaattttaataaacttacaaacatttataaaagaaaaagagaaaaccaacgatattttcaccgcttgattttctcttattttccgtgattccgctgcgattcgaacgcaggacccacgccttagaagggcgttgctctatccagctgagctacggaaccatccttaattgcggtgcaaaagtatgcttttattttgaattacacaaatttttccagggttttatacgattatcaggtacatttattcaactccggctactcgcccgaccctaccagtttccgcctaaattctaatatccagtattttgcgaaattccaccggcaattacatctctttgcggaataggaagcaacaacctatagtcttctactccgtacacctctttcgcgaatcctgtccttttcaaaaaggcaaagttcacgtcacaataaagcgacagttgcaaccgggcgttcttaattttatccaaaaccgtagttcctgacaatgggattccctttgctgcgacaatcttgttcaactggctttctgcatccgacgtgc

SEQ ID NO: 1259 - DNA, 22688 bp, synthetic construct
  source 1..22688: mol_type = other DNA
  misc_feature 1..22688: note = Synthetic
agtactgttgaagaaaaccaattgatttttcagtaactctatatatttcccacgaccccggctggagcaatcgagcccgggttcgttttttttcgccctgccgttaaactttcagagggctgtacagtcagagtagctgtgaattttccactccaatatccatttaattgattaaaagtatgaaacgtaatttttttgtaatgatggtggccctggtagccttttcgctcaaccttacggcacagcaaactcagcaagggcaacgcggccaacgtacccaatggaatcccgaacaacgcgccgaacaggttgctaaagatcttgaattgaatgccgatcagcagaaacagctgaaagagatgttcgttaaacaacaggaagaaatgacaaaaatccgcgaacaggcgcagggcgatcaggccaatcgccgcgaacagtttgtggaacttcgcaaaaaatgggatgccgacatggaaaaaattgtgggtcccgaaaaaatggctaaatggaaagcgcttcaggaagaacgggcccgtaaccgccgcaacggtcaggggaatcagaactaaccgccgactccgttatataccgtaaagagattgcctgttgatatcggcaatctctttttttgtgccatactttttcagcacgatctgcgttattctgtaaaacaaccggaccaatatataagcctatgttcataattgacaaatttcaacaatttttttaaacaaaagaattgaacatttacagtttaactcatgttacaaacaaatactgacattttatcttttttagcccaaaaaaggatccagtcattccaacaactttcattaatcaaattgtttcgttcgtatgaaaaaattaactctcatttttgctacacttagtttggtagtgctcaccagccgatgtacatttgctgatgacattgataaactgaccgaactggcgaccgactcgctcagtcttgtgcttggaacaccggttttcgacactggttttcagctggaagtgaagaatgcgaaatcgaaagactacatcgaagatgctgaagtttcggtatcgattaccggtaagaatgccggattagtctacaacaacctgggaataaaatcgagcgtttacaaatcgaagctcggcatgcttaattttattctggatcctacaaaaatcgacactacggccatgaagtcgactcctctggagttcgatctgcagatttcggctccgggttatttaccggttacgcaacgggtgcagttccagcgaaaagagttgcgtattatttcggtcaacctggttaagctcaacgatgccccggccggtattgccgtatcgagcgctgctgcattcgccagctccaatgcttcgggtgctactacctccaccgcttcggtatcgatgaacggcggcgggcaggtgctgacaatcgaaccgggcgtggtaatgcgcgatgccgcaggagctgcggtttcgggcacggtagctgctaccattgtttactacgaccctgcttcggccgatgcgcagcaggctttccccggcggatacactgcagctgcaaaagtggaaggaaatgcggccgaacagtatcagtttacccctgcgggactgttcaatatcaaactttcggccgggggaaaaacggtaaaaaccttttctaacggagggatgagcatcaaaaccgaacttcccgaaggttttattaatcccgaaaccaatcaaccggtaaaggaaaacgaccagatcgatatgtggagccgcgacgaaggtacaggcgaatggactttcgagaaaaaagccacggtgaaaaaggtgaatggcaagttgattgtcgaggaacaggtcacccatctttccgaacatatgtattcgtttgctaccaaactttgctccgcccaatcggctatccatttcacaggcagcaatctgactccgtccgctacatacctggttacagtcaccctggttcatcccttgtatacgaaaagcgatattatcaaactctcggcggactccgaaggaaaactgagtttccggcatccggttgtgcagctacccggttattcgtacaacctggttttatcggcagccaacgaatcggcaacgggcaatttcacattaagccagacctcgctcacggtagcagccggctgttcgactacttcctacaatgtgacactcaccgaaaacacgactcctcagcccagcaagattaatatcaacctctacctttcaatctcgtcgggacctctcgtggtgaaacccaacctcagcatcctttaccgggtgaacggatcgggaagcggttacgaatcggccctcttgcggaatggaacaggaaaaatgggggtattgctgaacaccaactacgacctgctggtttcgctgggaggcaaccagggtaagggcaacatgaaaattgagagcatcagtacaacccggtaccgtatcactttctcgggcatttcgctgggcaacggctcaaccaacgagccggtcgtgctggaaacagagaaagcgctcgacggcagcatcaatgtgacctataaaattgaagtcgattcggatgtgctgaaccagcttctttaatttcaaatttcagcgtcaacttactacaaaaccaatttatatgtataaacttattatagtaccggtacttgcattattgatgagcacaaccggagtactcgcgcaggatttatcgtcgaaaaaattcggattagcaatcggtgggagcgcttccaccaacggcgtcggagttaatgtaattgcagctcttcaccgctctgtggcgctacgggtaggctacgaatcgctttcgaaaagcttcaacgaaccttttatctacaccatcgaagatgtggattttgccatcacgcccaatgtgaaactgggaggcatcagcgccaatgtcgacttctatttgctgaaacggctctacattaccggcggtatcgtgcaaaccaatctcgacctggggatcaacctcacccctaacgaatcgatgaaaattggcgaaattgaataccaacccgaagatataggcgaactcaacgtaacgatcttacccgagcgccggctggctccttacctgggaatagggtttggaagaaccatcgcgagagacagccgggtggctttcaatatggagctgggcgccttccacatgggttcgtatgtggtcgacatgaccggcaccaaactgctcgaaggtaattccgacaatccgtcggttgaacgcatcaataccgttctgaagggttttagctggagtggtatctatccggtggttaagctgggtttatcggtccggattttataaaaagtacgccctggatcgagacataagcggcccctcaccagataacttcctgtgagaggccgttttatcttcaggtttacttttcggatgcccgccggctgatcagccggcgggtttattagtgcttaaaacaaagtcatttgtccggtaatttcgtcgatcagacgttgctgatcgatttcttcttcatccggcccggcctgcggcgatggagatccgccaccggcagggctatcgtcacgcggctcctcaccggcgccttcctcaccttcttcatcgtcgtcggaagcatcgggcgccggggtattaaaacgcaaaggctccagctccacaatcgttgcaacatcgaaggtactcaggcgcttgcccttggccttgaaactcttcacccctataaactcctcggcatctacttccaatggctcgcggtacgaatcgcttcctccgaaacgaatttcaaaccgcggataatccttatccgaaatggcaatcaacttcgagtcggcattctcacccaaaatattctgcaatttctgcgaaacctccaactggaaccgtttcagataataaaactgctgatcggcatcgaacagcgctaccgtccataccttattcgaatcgaactgctcgaataccacgatgtctttttcgtaatgattggtcagttcgaaattggtcgtgcagtaatcgccattgccgtacacgaccagaatctgatcgtcgctctggaactcgcccaggtaagtgccgcggccatcgtaattgagccgcaacacatcgcggtcgaaccacacctggcgcccaccgagcgtcgatcctcctttttgcttcagagcgatcttgtgaatatcgtttttggtgaggatattccccatcgactggcgtcccttgatggcaatatcgctgaagtccttttcgaacaccagcttggtgatgcggggtttgggcttcagggtaacacgaatcacctcggcctcggcattcggattcgacgtaaaataaacgattttcgatccggccgttccctgcgtcacatcgtattccttatcgcgggtgatgccgttcaccgcgaaccgcttgatgtaataagctcccagcttgccgtcgcggtacaccacattgtaaatggtgcgcttgtcgtttttgcggaacacatccaggtgaagaatattctttccaacaaacagtttgtcggttaccttcaccaccttgtatttcccatcgcggaaaaacacgataatatcgtcgatgtcggaacaattgcacacgaactcgtcttttctcagtccggtgccgataaatccttcttcccggttcacgtatagcttttcgttggcctccaccaccttggtggccacaatggtttcgaagttacggatttcggtgcggcgcggatagctcttgccgtaccggtccttcagcccctggtaccagttgatggtgaaatcgaccagatgagccaggttgaaatcaatttcctcgatgcgtttctgcagtgaaatgagggtatcgttggctttgtcggagtcgaacctggtaatacgcatcatctttatttcgagcagcttcagaatatcctcgcgcacaacttcgcggataaaatcctttttaaacggttccaaccagctgtcgacaaaggctaccacctcatcctgcgacgtactatcctcgaattttttatctttataaatccggttctcgatgaatattttctccagcgacacgtagaaatactgctccctcaattcggcccgctgtatctgcaattcgagctcgagcaggtccttggtatgttcgcagctgatacggagcatgtcgctcacccgcataaaccggggcttcttgttgtgaatcacgcaacagttgggcgaaatgctcagctcacaatcggtaaaggcatacaacgcatcgatggttttatccgacgacacccctgcctgcaggtgcaccagaatctcgacattggccgaggtattatcgtccactttccggattttgatcttccctttttcggccgccttcagaatcgaatcgataagcttggaagtattggaactatacggaatttcggtaatcgccagggttttgttgtctaccttgcttattttagcccggatctttaccgcccctccccgttcgccgtcgttataccggcttacatcgatcgagccgccggtctggaagtcgggatacaatacgaaatcctctccccgcaggtgagcgatacaggcatcgattaattcattaaaattatggggaaggatttttgaattcaatcctactgcaatcccctccaccccctgcgccagcaacaaaggaaactttaccggcagcgcgataggctccttgttcctaccgtcgtacgaaagcttccactcggtagtcttgggattaaacaccgtttccaatgcaaatttcgacagccgggcctcgatgtaacggggagccgccgcaccatcgcccgtaagtatattcccccagtttccctgacaatcgataagcatgtctttttgccccagctgtaccagcgcatcgccgatggaggcatcgccgtgggggtgaaactgcatggtgtgccccacgatattcgccaccttgttgtaacgcccgtcgtcgagccgcttcatcgaatggaggatccgacgctgcaccggcttcaatccatcgtaaatttcgggcacggcacgctccagaatcacgtacgaagcatagtccagaaaccagttctggtacatccccgtgaggtgatacttggtttgctcatcggctatcttcggaactttgtaattggaatgcccggcaatctccttctcttcttcctccgggatattcacttcatcctcaataatttcatcggtactcatgctattaccctcaattttggtttttcaacctgcaaaagtaacaaaaaaacaaaaaaaaaccgtacttttgcagctttaatttttgaacagtttagtatggcttcacaggaagatgtttttaagaaattgattgcgcattgtaaggaatacggcttcgtatttccttcgagtgaaatttacgatggccttggcgctgtgtacgactacggacagaacggagttgagttgaaaaacaatatcaaaaagtactggtgggacagtatggtattgctgaacgataatgtagtcgggatcgacgccgctatctttatgcaccctaccacctggaaagcctcgggccatgtggatgcgttcaacgacccgctcatcgacaacaaggacagcaaaaagcgctaccgtgccgatgtgctcattgaagagctgctggccaagtacgacgagaaaatccagaaagaagtggataaggctgccaaacgcttcggcgaaagcttcgacgaggctgttttccgcagcaccaacgaacgggtgctcgaaaatcaggcaaaacgcgacgagattcacggccgtttcgtgaaggcgctcaacgactccgacctggccgagctcaaagccattattgaggattacgaagtggtgtgccccatcagcggcacccgtaactggaccgacgtgcgccagttcaacctcatgttctccaccgaaatgggctctacggccgatggtgcgatgaagatttacctccgccccgaaacggctcagggtattttcgtgaattacctgaacgtacagaaaaccggccgcatgaagattccgttcgggattgctcagattggtaaggctttccgtaacgaaatcgtggcccgtcagttcattttccgcatgcgtgagttcgaacagatggagatgcagttcttcgtgcgccccggcgacgagatgaaatggttcgaatactggaaagcatggcgcctgcgctggcacaaggcgctgggactgggcgatcacaaataccgtttccacgaccacgacaagctggcccactatgccaatgccgccaccgatatcgagttcgagatgccttttggtttcaaggaagtagaaggaatacattcgcgcaccgatttcgacctcggcagtcacgagaaattctcgggcaaaaacattaagtacttcgatcccgagttgaatcaatcctacactccgtatgtggttgaaacctccatcggtctcgaccgtaccttcctttccatcatggccgcttcgtacgaagaagagcaactggaaggaggcgacaaccgcgtggtactgaaattgccacccgtgctggctccggtaaaagctgccatcctgcccctggtaaaaaaggacggcttagccgaaaaagcccgcgaaataatgaacgatctgaagttcgacttcaagtgcgtgtacgacgaaaaagactccatcggcaagcgttaccgccgccaggatgccgtagggacccccttctgcatcacggtagaccaccagaccctggaggacaatacagttaccgttcggcaccgggatacaatggtgcaggaacgcgtggcagcttcagccctgagcggaattatcggcgaacaggtgaatatgaaaaacttgtttaaaaagatagtggagtaacaacaatactgctgatattgaaaaaggctgttccgggaaaggggcagccttttttgctgcgttcacagaatacatctgtcgttattattttacacacaaaacaccttacagtcaattttaatataaaaaatgcctcccactatatggcggagaggcttaccagatgttttcacaacggaataatccttattgtgatttgctttcaaaattgtttgccaaaaataatctattttagattatcctccaaatttttgtgaatttattttattttttatatttttaaagcctgaaacattgacatttgcaaagtatgaaaaaaattttaggtttagacttaggcaccaatagtattgggtgggcgttggtggatgcagaaaataacaaaattgaaggtctcggaagtagaataataccttcagacgctgaaatattgagtaggtttaattccggtttacccttgtctaaagcaaatgcgggacaggcttttactccaacaggaaaaagaactgattatcggggcatacgccggattcgtgaacgtcatctactacgccgtgaaagactacacaggatattaaacattttaggattcctacctgaacattatgcaaaagaaattgatttcgcaaagcattatggtcagtttgttgatgaatctgaaccaaaactaacctataacaacagaaattttatctttacaaagtcatttgaagaaatgttgattgattttaagcaatcgcagcctcacttgttttataaacgatccaacggaaaagaaacaaaaattccgtatgactggactatttattatttgcgaaaaaaagcattgaaccaaaagattgctaaagaagaattggcttggataatactcaacttcaatcaaaaacgtggatattatcaattacgtggagaagaggaagaagaaaatccaaacaaactgatagaatttcactctctcaaaattattgatgtcgttagtgacgaaaaaccaaataataaaggtgaggtttggtattcgcttcatttagaaaatggttggatatatcgccattcgagcaaaacacctttatttgattggaaagataaagttcgcgactttattgtaactactgatttaaacgatgatggctcgataaaaacagataaagatggaaatgaaaagcgaagttttcgcgctccaagcgaagacgattggactttgctaaaaaagaagaccgaacaggaaattaacaagtccgataaaaccgtcggtgcctacatttacgaaaacttattacaaaatccttctcaaaagattcgaggtaaattggttcgcaccatcgaacgtaagttttataaagacgaactaaaagccattcttaaaaaacaaattgaattacagcccgagttatttacagatgaattgtataacgattgcatacgcgagctttatcgaaacaatatagcccagcaacttatcttaagtaagcgtgatttcattcatctatttgtagaagacataatattctatcaacgtccgctccgtagtcaaaagtctactattggaaattgctctttagagtttcatgagtataaaattcacaaattagatgaaattgggaataaactcaaagatgaaaacggaaaatatgtatttgaaaaagatacaaatggcaatgatataaaaaagaaaaagtatttaaaagtttcacctaaatcacaccccctatatcaagaattccgtgtgtggcaatggttgtcgaccctcaaaatatatcgaaaagatgatgatacagatgttacgaccgaatttctaaaaaacaccgatgatgtaataaatctttttgaatttttaatgacacaaaaagaggttggacataaggatattcttaaatatatgcttgtaccaatattaaaagaaaaatatccgggtgcaaaagcagctgctttcaacaaagaagttgagaaagaaattgcaaaataccgatggaattacgttttcgatgatttaaaagaaaaggaagaagataaatcgaaaaaatacccttgtaacaccaccggttatgaaatccgtaaaagattagaaaaagtagagaatgttccgaatgacttccttactactgaggtagaacaacatttgtggcacattatctattcggttaccgacaagaaagaatatgaaacagcattaagatcattcgctaacaaatataagctggacgaaaattcttttgtcgaagaattcaggaagtttccgcctttcccaagtgaatacggagcctattccatcaaagcaattaacaggttattacccttaatgcgtagggggaaatattggaactgggatgctattgataacaaaacacaagacagaattggaaaaatcatttcagcggaatacgatgaaaatattaaatctcgtgtacgggagaaagctataagtctaacaaataacgacaattttcaaggcttacctatgtggttggctagttatattgtttatgaccggcattcggaagctgagatagcaggaaaatggactacagttagtgagttggaacaatatcttgaagatttcaaacaacattctttgcgcaatccaattgtagaacaggttattgccgaaacattgcgagtggttcgggacatttggaaacagtacggacaaggattaaaagacttttttagtgaaatacatattgaactcggacgtgaaatgaaaaacactgccgaagatcgcaaaaagcttacagaccatattacaagcaacgaagctactaacctgcggataaaagccttactggcagaattaaaagaaaattcggacggaacattacctgttgagaatgttcgtccttactcccctattcaacaagatgcattgagaatatatgaggatggggtattaagttcaaatatcgatttacccgaagatatcgtcaaaatcagcaaaacgtctcaacctaccaaagcggaattacaacgttataaattatggctcgaacaaaaatatcgttcgccatatacagggcaaatgataccactcggccgtttattcactgaggattaccagattgaacacattattcctaaagcgcgctactttgacgatagctttaacaacaaagtgatttgtgagtctgctgtaaatcaactgaaaaataaacaacttggttgggaatttataaaaaatcatcacggcgaaaaagtggtatgcggaaaaggtaaagtagttgagattttaagtgaggatgcctatcaaactttcgtacaagaacactattccaaaaacaaaaccaaacgtcagaaccttttattggaagatataccggacaagatgattgcccggcaaatgaacgacacccgctatatcagcaagtttatttcatccttgctttctaatatcgttcgtactgataaagaagatgacgggatcaattcaaaaaatcttattccgggaaatgggaaaattacatcagtgctgaaaaaagactggggcatggatgctgtttggaatgatttaattttgcctcgtttcgagcgaatgaatcagctgaccaatacgaatgcttttacctattggaacgagcagcatcagaaatttttgccagttgactattcgccggttgattcgaaaaagattgaaaagaaaaggattgatcaccgccatcacgccatggatgcattggtaattgcctgcatgacaagagatcacgtcaatttactcaacaatcaatcagctaaatcggaaatcacacgatatgatttacaaaacaagttacgcaacaaaagcaaagagagctggattgatcaaaaaacagggaagcaaatagaaagagatgtttttaaagaattcaaaaagccttgggataatttcactgttgatgcgaaaaatgctttggaaactgttgtggtcagtttcaagcaaaatcttcgtgtaatcaacaaagcaactaacaattatcaaaaatggactgaaaagaacggggtaatggtaaaagaaaccgtaaaacaagaaggaacaaattgggcgataagaaagcccatgcataaagaaaccgtttcaggaaaagtcatattaaatcacattaaagtacctaaaggaaaaatacttactgctactcgcaaaagtttggatacttcttttgatataaaaactatagaatcaataactgacacaggaattcaaaagattttaaaaacatatttagaacagaaagacaacaaccctaatctggctttttcagctgaagggatagaagacatgaataaaaatataaaacaatataacgacggaaaatttcatcaacccatcagaaaagttagaatctttgaacctggaagcaaattttcactcggagaaaatggaaataaaaaagataaatatgttgaagccgcaaaaggcacaaatctgtactttgcaatctatgaaaaagaagatggtaaaagaacttttgaaactattcctttgaatattgtaatagaaaggcttaagcaagacatgaaagaagttcctgaattaaatgagaagggagagaaacttttatactatttatcaccaaatgatttggtatacgttccaacagaagatgagatgttgaatttgcaatctttaactatcactcaacaaaactctgagcaaataaggagaatatacaaaatggtgagtagcacaggaaacgaatgtcattttgtcaatcatcatattgcatcattaattaaaccttatgatgcaaaatccaaaacaggagaacttgggagtttaaataagttagaaacaagttttgaaggcttaagaattaaagaagtttgcatcaaactcaaaatcgaccgtcttggtaatattttgatttcaaacaaggtatatcaatagctaatacaaaatacaattttacaacaaaacaaatatcaagctaatatactgtaaaacaacacgattaacgattaatccttccaaattaatcagcagttttctaaaaagcacagtgccatgatcaaaaaaacactctactttgaaaacccggcttatctgagcatgaaaaacagccagttggtcatcaaacttccggaagtcgtgcagagtgaaactttaccagagtcattcaagcaggaagctatcaaaacgatacccattgaagacatcggcatcgttatacttgacaacaaacaaatcacccttacgcacgggttgcttgaggctttgctaaacaacaatgctgctgtaatcacttgtggcagtaatcgcatgcccatcgggttacatctgccattagaaggtaacacgacccaaagtgaacgcacacaagcgcaaatagaggcatcgttgccgttaaagaaacaactttggcaacaaaccattcaggcaaaaatcacgaatcaggcttatgtattgaaaaactgtcgcaacgaagtagtaaaaaatatgctcgcgtgggtaaaagatgtgaaaagtggcgattcagacaacttagaagctcgtgcagccgcttactactgggcaaatatgtttcgcgacattgaaggttttcgccgtggccgcgaaggcattcctccaaacaatttgctgaattacggttatgccatactcagggctgtaattgcccgttcacttgtttcaagcggcttatttccggctttgggcattcaccatcacaaccgctacaatgcttattgtttagccgatgatattatggagccttatcgtccctttgtcgataaactggtgacagaaatcgtcgatagtggagaagattatcaggaattaagcaaaaatatcaagatgaagttattaggcattccggtgatggacgtacttatcaacggacaacgcagtccgctcatgatagcaagcacccaaactaccgcttcattggctcggtgttatctgggagaaatcagaaagattgcctatccggcatttgaataaaatggaacgactcagcgaatatcgaattatgtgggtactggtattcttcgatctacctacggaaaccaagaaagaacggaaagtatattccgatttccgtaaaagattattggatgatggatttaccatgtttcagttttcgatttatttgcgccactgtcccagtcaggaaaatgccgatgttcatattcgtcgcgtaaaaaatttattaccggcaaaaggacaagtaggaattttatctattaccgacaaacaatttggcaaaatggagctctttcacggtaaaaaagaagagccgatcgctacaccctatcaacaattagaacttttttagcataaagaatcccgccattcaagcgggattctttattgattcacaagccattttttaatcctaaatgcgccattaaactattgattttttgaactttacagtgatcgtgctgtatgaatcaagtcaaagatacaattttgaaagcaaatcacaactgaataccacgccatccgaaatgtgttgcagctgtatgaatcaagtcaaagatacaattttgaaagcaaatcacaacggatgataacacaaacggtaaagaagaagtgctgtatgaatcaagtcaaagatacaattttgaaagcaaatcacaacccggctgacatagcggtatttttaccgtttgctgtatgaatcaagtcaaagatacaattttgaaagcaaatcacaacaaaatgatggtggttatcaaaaccgatctgctgtatgaatcaagtcaaagatacaattttgaaagcaaatcacaacccctcgtatccctcgtatatgtcaatcgaggctgtatgaatcaagtcaaagatacaattttgaaagcaaatcacaacgtatgaaattacatatgtatagtagctcccgctgtatgaatcaagtcaaagatacaattttgaaagcaaatcacaacagtaccgatgctttcattttgaagatatttgctgtatgaatcaagtcaaagatacaattttgaaagcaaatcacaacagatttgaaaacgtggtacaatgatgatcagctgtatgaatcaagtcaaagatacaattttgaaagcaaatcacaacgtaggatttaacgctacgttgtatgttaaagctgtatgaatcaagtcaaagatacaattttgaaagcaaatcacaacgaaatgagagaagaaggcctagctttacaagctgtatgaatcaagtcaaagatacaattttgaaagcaaatcacaacatgaagggttaagccacattgcgaagtcggctgtatgaatcaagtcaaagatacaattttgaaagcaaatcacaaccgtcccatacacgccatgtacctctgaatcgctgtatgaatcaagtcaaagatacaattttgaaagcaaatcacaacattgaacattaggacgtagagtcatgtgttgctgtatgaatcaagtcaaagatacaattttgaaagcaaatcacaactaaaaagcggttccccgcctacttgatagtgctgtatgaatcaagtcaaagatacaattttgaaagcaaatcacaactcagagaacgaagccctcgtcatcgaggcggctgtatgaatcaagtcaaagatacaattttgaaagcaaatcacaacaaacctgcgggcagcgtctgctaacgtaaagctgtatgaatcaagtcaaagatacaattttgaaagcaaatcacaactacttcacgatgaatcgataaacagtaatggctgtatgaatcaagtcaaagatacaattttgaaagcaaatcacaacaggaacctccttacagcgattgtcgctattgctgtatgaatcaagtcaaagatacaattttgaaagcaaatcacaaccttctattgctttagagtccgcgttttgttgctgtatgaatcaagtcaaagatacaattttgaaagcaaatcacaacacccagtgcgataacgtacatgttttgagcgctgtatgaatcaagtcaaagatacaattttgaaagcaaatcacaacagataatgataaattatgacacatgccggtgctgtatgaatcaagtcaaagatacaattttgaaagcaaatcacaaccgtgtctttctttgttttttatgtcgtatcgctgtatgaatcaagtcaaagatacaattttgaaagcaaatcacaacagtatttttgttatttctttgtcaacaggggctgtatgaatcaagtcaaagatacaattttgaaagcaaatcacaactagtcttggccttggagcttgtacgcttcgctgtatgaatcaagtcaaagatacaattttgaaagcaaatcacaaccgtgtctttctttgttttttatgtcgtatcgctgtatgaatcaagtcaaagatacaattttgaaagcaaatcacaacgatttcgagtcagtactttgttgagtacttgctgtatgaatcaagtcaaagatacaattttgaaagcaaatcacaacgcttctgaatttcgagttttaaagcgttgtgctgtatgaatcaagtcaaagatacaattttgaaagcaaatcacaactgaataatagtaggaataacgcgaattactgctgtatgaatcaagtcaaagatacaattttgaaagcaaatcacaacatagtaacaagttcagaaaggaattgaaatcggttaactatgtcgacctgaagcttctttcgtatcttttaattgaaccagaaggaattgaaataaggtttcgtttacaagcctaagaacgttctgttcttttaattgaaccagaaggaattgaaattcaacaatcgccatgtcgaataagaatatcagaagtacttttaattgaaccagaaggaattgaaatatggctattgtcctattacttgctgcaccagcggaacttttaattgaaccagaaggaattgaaatatggctgggatgttgaattcgaaatcccattcgtcttttaattgaaccagaaggaattgaaatcccggaggagctggctgctatggtgtcggcctgttcttttaattgaaccagaaggaattgaaacatcaaccattttacttttttcctgtcgcacccattaagggttttcaacgtggttagggaaataagcctctgaaaaataattgtatttatccgttatattcaacttgattggaagtcacaaccgaatctttttctccattcctcttatagcctccagattttctccgatttcagattctacctttgtgctacaccatcggagaaacctgaaaatccggaagagagtagggagaaaataaaaacatgaaatgatatgagaaaatatttttttacggctttactgtccttgtttctgatgagttgcgaagctgaagtcattgtgcccgaacagaaagttccggccgaaattgccggctacctgaacgatcattttccggccaatccggtgttacaagtggttaaaggggtggatggactgaaactgatctacgacatcacattaaaagacgggatcgttgtcgaattcaacaaaaacaaaaaggtgatcagtattgaaagtaccggccaattgcccggcagtgtgctgccttctgaaatagcagaatttgttgcggccaattatcccgctaattacatcattgcctgggaaaaggatagccggaatcagcaactcaaactggataacggactggaactggaattcaatcgaaaaggagaattgttacgcatcgacagctaggataccgatcttattcaaacccactacggcactcttttacaattcaatatcagggcgaccctggaagtcataaaagagtgccgtaggagtggcaatggtttatttcttcagaaatccctgtgcttcgggcattactttctggatattcgcgatccgtttctggtcggacgggtgggtgctcataaactcggctaccgaaccactgccgttggcggtcatgcgctcccagaacgacaaggcttcggcaggatcgtaacctgccatagccatcagaatcatccccaggcggtcggcttcgtattcctgcttgcgcgagtaaggcaacaatactcctacctgtgctccgatgccatacagggtattgattcccatgcgggtgacttccgacttgttcgataccagtacatcggtaatcgcggcaccgtattgcaccagcatttgctggctcaggcgctcgttgctgtgcttcgccaccgcatgggcaatttcatgccccatgaccacggcaatgcctgcttcggttttggttaccggcaaaatgccgtcgaaaaaaaccaccttgccacccggcatgcaaaaagcgtttaccgtagtatctttcactaaactgaactcccactgaaaattggccagttcggcttccagcccgttggctttcatgtactcttcaacggcagtagcaatcttcacacctaccgattttaccaaggctttacttttcaggtcctttgaggggggaaccgaatcgataaattgctggtaactctgtaaactcatggtaagtaattcggcgtcggaaaccaacagcagttgcttccggccggtaatcatcacactcgaacatgccgtaagaaaaatggctgcgagtaaaaagaatagcgttcttttcatattgttctgtatttgaagttattaattgtcgtacggtggtatcgaaggtgtaaaattaagcttttttacgaagataataacttttttgccagattttcggcccaaaagtcttctgaattcaaactttcgaccatcaccagctcttctcctccttcttttttgaataaatcgcggtaatcgaggcctatttctacgatggtctccaggcaatcggcaacaaacgacggcgccacgaccaatacgcgccgcacacccgaacgggccaggtcccttatcctatcctcggtaaacgggcctacccatttttttgcaaagcgcgattgaaaagccacgctgtaaccggcaggcggcaggcccaggcggacagccagcacccgggcggtttcgtaagctgttgctttgtaacactcgctgccgaagtcgggcatcgcatgttcgcacgggcagctcttacacgaagtgcccgggtggatgcgatcgagatgcctttcgggcaggctgtgataggtgaaaatcacatgatcgaaagccgaaggatcatacgcggcgatacgctgctcgaaggagtcgagaaaggccggatggttgtagaactgccttataaaccttacttcctgaagccctgtgagatcttgccggctccggcgtaccacctcgaaaatggtttcggtggtcgattcggcaaattgcggatacaacgggagtaccgtgagatgggttaccccatcgtcgtggagttgccggagcacagtgtggagcgacggattgcaataccgcatggccgcgtacacccgttggtacggtaaatgctgttcgagcttcccgcgcaatcggtataaatgctgcaaaatgggcgatccgccggtagtccacaagcgccggtataaacgggtcgatttttttagcctgaaaggtataatgatgcaattcaccaacaggaatcgccagggttgaggaatatcgatcacgtaaggatcgttgagaaactgcgtcagataacgccgcacagcacccggacggggtgcgtcgggcgtacctaaattcacgattacaacagccttggtcatgcgttcaataatggttgattacatccgttttatcgggaggggagagacggaacggccgctcaaacggttacctccaggtattcgccgatctgccgtgccacggctgcaccctgtttcacccggtcggacataccgatgccatcgcgtatatttcccgccagcagcagccccggataccggaactgaagatcggtaatggtcttcaaccgccggctgctcgttgcatcgtactgcggtatggcctgaggataacggtataccctgagcaaatcaggatcgcgcctggcctgcatcatctcccggatatgttgaacagctacagccttcagttgttcatcgctgagctcaaaaatatcgggccgcttaattccgcccatgaacaccgacatcaaagcaccatcgccgggcgcccggtgggcaaacagggccgaaggaaacaaaattcccagaatatcttttcgttcgcaggtgggcaccagtccgccgaatgcccgtacaggcactccgttccacttactgtagcctgcagccacctgcaccacttttgcatagcgcaacgcacctaaattttctttttcaacctcctttataaaaggcaaggtatcgagcagtgaagggcctccaaaggttgtgacaagggtgcgggtcagcaatgcgtaaccggcagtacctgccgaatcgtcgggccgggctgtttgccgggaatctgattcagaaagatgaatgcggtatcgtcccgtttccacttcttccacctgcaccttaccgcaattgcaacgtatattctccgctcccaccgaagctaccagggcgccggtgagtcgcgacagtcccccttcgaccgaaaaaacctgccgggttacccttttttcttcggccggcttgggccgacgggctttggcgatggaacctttgataaaactaccgtaattctgctccagggcgtataatttcggcatggcataacgggtaaccaattgtgccggatcgccggcgtaaatgcccgaaataaacggatcgacagcataattaagaaaactgcgtcccatacggcgaaccaccagctgggccagggtttcgtcggggttggtacctttcgctctgaaaggctccagcagaatcctgaatttatccgtcaacgtgaataaaggagtccggatggccgacaacagtcccgaaggaagcggttcccagcggcgttttttccagatccagcgggcattggcaaattggtgcggcacttcgaactgcaagcccaattcgtccatcaaccgtaccagttcaaccgacgaaatgactcccgtattgggtccggcttcgaaaacaaatccattttcggaacaggtctgaatgactccgcccggccgctcgcctttttcgagcaccagcacccggcgacccgacttgcgcaggtaatgggcaatggtgaggccggtaagccctgcaccaagaatgatggtatcgtacgtttcgttgttcataaaaaacaggtattaaaccgactgcgaatacttcctcgtctttgccagataagccggatcgaaaacgcaggcaatattacgaataaaaaacgaaccggagccggtaatttctaatattccaccccggaaatgaatcagtccgtcggcaatcatttcgtcgagacgggactcctcgaagccggtaatgctcacaaacgcttcgttatccatcccataacattcgcaaaatgatggaatatcgagttttttattacacatcagctgttcgatcaccgcccggataatcaattgatcggcggtaagagccaatcctttctccaccggaagctgtccgttggccaccgattgcatgtacaccgaaatatcttttacattctgaagatagcctcgttcgagttgcgagatcgacgatacgccaaaggcatatacctggccggtggtccggcgggtacaatagccctgaaagttacggtgaagctggtggttttgcagggccacattcaattcgtcgcccggcaacacgtaatggtcgagcccgatgggttcgtatccggcctccacaagcaatcggcgcgaagccataaacagatccattttttcttcggacccaggtaatccgcgcttttcaagcacctgctggtgctttttcagccagggaacgtgggcatacgaaaaagtaaccaaccggtcgggacgaatagcaatggctttggtcattgtttcggtaaaaccggctacattctgacccggcagaccataaataaagtcgaggttgaccgaaatcgacgggttggcttccttcagaaaccggacgatatcggcaaccggcatggccgcctgcgcccggttgacggtatcgagcacttcggtattgaaatcctgaactcctatgctgaagcggttgaaacgcgcattcagcaggcgttgcaggtaaagttcgctgaggtgggccggatgacattcgatggcgatctcgggctggggaataaactcgaacaggtcgaaaatgagttgattgagctcttcgaggtatcgcacatcgatgctgttgggcgtaccgcccccgtaatgaatctgcgacaccctgcgcttgcggtcgaggcgtgcggccaccatccttatttcctgtttcaccgattcaatataggctgccaccgttgcttcctgtttcatgagggtggtattgcatccgcagtaaaaacaaattttcgtacaaaacggaatgtggatatagacagcgatgttggagggcgaaccctggttcgattccccaataagccttactgcttcagcgacttcaaaattgtcctgaaaatgattggcaggcggataactggtgtaacggggaaccgcgatattgtatttatgaattaattcctgggagatttccatgtgttgaaacgaatggggtaagcaaaaaataaaatcaagatcgaaagtgccgacatcagtgcctccactccgaacaactggtgatatccgatgagatcgcccagtttaccgctgaaaacggcaataagcatcgaactcaggtgtgtaatcacaatctgtacggtaaagtcggtgcctgccgagtgctcgcgcacggcatccatggaggtggtgtaaataattaccgacgacaggccataagaagcccataaaaggataattccaatataaagtgcggtaaccgagggtaccgacatcgtcatcacgtaaaaatagagccccgtgagcacattgataagggcgaaggaatacagcgctatggtacgtcctattttccggata

SEQ ID NO: 1260 - DNA, 22635 bp, synthetic construct
  variation 14004..16369: note = n is a, c, g, or t
  source 1..22635: mol_type = other DNA
  misc_feature 1..22635: note = Synthetic
ccaatgatctcttcccggttataggccttatcttctttacccaaatcatccagatacaattttccgtggtaatagtttcccagtttaaaattgctggttttatccctctgtgattcataatacctagtaagcaaatgaaccgttgaaatgcgtgggaaccaaagctgggtgcttcgggtatgctccaggattattcttccaatcttatggatagcatcaaaaagtgtcgttttccccacgccataatctccataaatcaacaggcctttttcaagtgtcgctttatttttaataatcccaaattcattaaaatcgggctgcagtaaaaaatagcggaaaatgctaaagataatttgatggttttcatccgttattagaaattcaggataatgcttacgaaataacttccagaaaacttgtttgttgatctgaggctggttttgtttgcattcccggttttttgtaacaagctttgacgaaatgcttggaaactgtgaactagtcataattttgaactttatgctgaacctggaggtccatcgtttttattttcaccggctttttcccctgggcgatcagtgatccgattttttcccggagtttatgagtgcttagtataattcctttccagaattcgtcggaaccattcaacagctcataggccagtagtagttgttcttgtgaaaccccatctttctccatcatcagccgaatcggctcgaaacactccttaaaactcgccttttctgttttttttgttggcgcacctttattttttaagttttctaaaaaaagtttttgaaatttaagagcccaatcaaaatagcccaagtagttttctggaatttcagatctattcacttttaaaaattcctttttaaagaaagttttaaggtttaataggtttatttgtttatggtttaattgtttatctatactagcaatgcttcggacttgctttatacactgcccagacaaggctttgtccaatgctttgggtggtgctttggtattttttactaaagcaatgacattggcagtgtactggttcttgcttttctgaatccattttataaatttccatgctacaagatcctcaagggcccggatataagttttatagttccggatgcccagggcttccatagccagatcggttggaaatccaaatgtttccttccatcccagtctattgcagcgttcaatggcaaaaaagtaaatagcggtatggatcggtttaactttgttagaatggttaaaactaaaatcgaaccatgcccttgaaaattcataaccattcatagcttaagctttttgatttccgagtagccatgcattgagtttactcctctcaaaatagataaacttccctctgggtttagaatggggaattagttccttagaggtgagcttgtacatatagcttctggaaatcccagaatacaggcaggcttcatcaaatgttagtacttccttggttgcgccgagcatttgttcaatgcgcagcaatcgatcttctaattctaaattactcataggttctatgatttacaaaaacaacactgcagttgtcttctggttatagaaacaaatgactaattaaaatccttgtaaatcaatatggtaacaggtaatcaagtggtaattacctattaaggtctgaaaaatatcgaaattcacttcttagtaaattttatagtaatgaggtaaaaaacactatatttatcgaaaatttactaaagttgagtatagctgattttataaaagagcgactatccttcgaggaatatgcttttagttgggatgaattggtcaaggcaatgccctctaaatcggaagcttctatccggagcgatctgtactatgctattggcaatggagacgttatttcattacgtcataaattttatttaatcattcctccaagatactcccgtactggtaaattaccaatagagctttacatcgataagcttttcacctttttaggtagaaattattacctcgggttatattctgctgccaaacattatggggcgagccatcaacaaatacagaaagagtatgtattacatgataaatcttcattgctttctatttcaaaaggaccagttaaacttgatttctttacagtttctaattggccagaaagaaatattttgtcacgaaaaggagatgcaggaatgtataaaatatcgagcccgagtttaacggcagtagatttattgtaccatcaaactaaaataggaggtctaaacagaacattatcaattttagaagagttggctgaagaaatagaactttcagatattaaagatttattgacctggtatccacacaaaagtgttctacagcgatttggttttttattaaatgagtttgatcatacgttagaatcgattgagttgatatatgaccatttgagccttcaaaaattccatccggttttattaagtccaaaatcaaaacagaaagcaggggcggtaaccaaccgctggaaagtagatgtaaatattaagatggaaagcgatttatgataccaagaccggacatagctaaatggcaggtaaatgcgccgtggaaagaatttatgcaggtagagcaagatttagtaataagtagaactttgattgagctattttccgatgattttttgagggagaatttagcctttcgtggcggaaccgccctgcataaactatacttaaaccctgctccacggtattcagaagatattgacctggtacagataaaaccgggtcctatcaaacccataatgaaacgcataggggaagttgttactttctttgaggaaaatcggagtaccaaaattggaggtcacggtgcaaaagccctctatcgcttcaattcagaatatgaggatatcagactaagattaaagctggaaataaactgcaaggaacattttaatgtattaccctgggttgaatttccttttgaagtagacagtaattggtttgaaggaaaagctaaaatacgcacttatagcattaatgaattattaggtacaaaactaagagcattatatcagcgaagtaaaggcagggatctttttgacttagactattccaggctaaatatggaactagacaatgaccttattttaaagtgctttaaagaatatatgaatttctctgttggtagatcaccaagtgctaaagagtttttattaaatatagaagagaaagaaaaggatccggactttacaggtgatatggaggccttgttaagatcagaaattgaatatgaccagcaaaaagcatttgaatggttaaagaaagaattaattgaaaaaatttaaagcttagaaacaagataaaattatagccaattcaacaataattgaaaaatattttcatcttcatattttttgatcagctaattttgcttctctaataaattacttttaaaaatactggagatttcctttaggtaagtggctttgttatttcgccagtcggaaatatttttagaagataaatgctgttcgatacccgtgggatttttaagggtaaaataatgttcaacaaaaaggatcatttgatggttatccaggttttcaaaaccgatcagcaaatggcttaaaaattctagcagcgtttgtcggtttacctgtttctgtcttttaggagaaagatctatccatttcaaacgattctcgtatgaaactggtttcaatagaatcagtgactgaaaactttgatagtttccttgtagatatttccctgagaatgctttaaaaacggcatttgcctgagtttctgttaacggaatagacttaaggtttaactgctgaattttttccagtccagggtcattcaaagtataaacctccaatgtatttgatctgattctttttcttttaataataaaataaatggctgaaacacataataaagatgaaaccaggtatataaaagtataagttattttaacccacaagccggatggagtaatccaggcataaaatagaagagcggtcaaaaagaaaagacagcaaataaaaaagatttgaccaagttgcgaatctgtttcccgaagcagatagttataaagctccaggagctttgccctcaaccgaagagttaaaaccgcgaaacgttccaaaaacatattatccaacttgcttttatctacataaagataactaaaagaaagtataggcttgttttaatgaagttactgattttccaggtttaagaatttcaaacaaaacatgaaaatttggactaatcactttctattgaaaagattttatctaaaaaagaggagtgaataaatttccagagttattaataaggtgattgttcatagtcaatttttgcacaagttgaatatatgatacaggaaacctgaaaaaaccttttctataatcagaagatctttgattcatcaaggaaggtgtgagctgattacttccttttactctgggaatttgttttttcgcgtcttaaaaagggatggctgtgaggatgaagtttacacaaggattaggaaatcctactattttcttcagaagaaaagctacgatttgaaatttaacctggcggacttcatcgtaaaatttcgagctggagtgaagcgttccaatttttcatcgggttagcgtaacggaagtctaaatttcttcgatggtgtccaagacctttatagagaagcgcttttcccgaaatgaagcttttgcgaaatgtagtgggaatgggctgaacgggtattacaattaactgctctttacattttcttcaatttaatttactcatcagtaatagttatttgtcacaaatttttaaaatatttgtgacagaattttacataaaaaatgcctgaatccattgaaaatagagtaaaaaataagattagtaattgtaagagaggaattttttttccccgtctgactggaagtaagctcaccaaaatttcttgggtagattattccaaacataattatgatactttaaaattcacgccaccagaaagtattatggaagaatacaaaagggattatgctgcaatggaggaaagtatgttctatggtaaaactgaaccattcgaggatttaattgataagctaaatcaattaaatacacgtataaataaaattggctaaaaaatcaccgattgaatttcagcaatcgttctttgaattatatttatccattttaaaaagagatgctcacgccgttgtatatgcttagtgcattcagtgagaataattaaaatctcaccttacgggtgtacaagcaccctcgtaatttataataacctgttgtttagcattaacttttttggttccaatgtacttcgttttgctttgatgatttaattaagtgatgcccacgcgttgtatatgctaagcgcatttagtgagtgtaatgttcacctcaccttgcgggtgtacaagcaccctcataatttatcgttcaatctgttattagttcaataccggttttttcggccttgtatttaattttggtcatcaagtcataataactccagttcctcagtacaaaggcttcctcttttgctatttctattttcttctcctggtccactaaaaccagcgttcccgcctggtgttttacgcagaaatcgataagttccctgctatatacgtgcaatcgctggtttacataattatgctccttatcccgaaacctggccacggcctttgttttccgtttatgtccatttcccgacctggcatattttaccccatcccgggtccttctacaggcagcctgtatggccaacctccgatatagaaattcttccctgctgccgatgctaagcctggctttaccgatcttcaccataatgggatattccagtgacaagctagcttccgcgaccacttccggccgtaacttgtgcttttctttttcaatttcaaaggtggccaacataaagatcttgccatcttttaactttagatgagaagtacgcatttggatctctccctttgtcagctggtgcatcaatttccacttgtcgtcaaatgccctgcctaaataggtttttacgggaatggaaaagaaccgaaaacaaaatgcacttttttcagggttaaattccaggccacaaaccccctccatgctaaagggaaaagccatttcctttttgaaattatgtaaggaacgctcgcctttccagtattcctccctgtttttcctgaacgtactttgaatgctgctattgaggtgggataaaatattagtgggcatttcacctttaaagcgatcagataccatccggtaggtcgtgttcatccgggaacggttgaagatgccaagttcatcttttttttcatccaccagtttatatttgaccccttctgataaatagaagaactcctggatcatttcctgaacatacaggtgggtaacaattaggttcgcagccttgtggcagcggtaccgccattggtacagcttacttttcgcttcccggcgttcctccttggtaggcagatcgatcaataactggatccttcgagtgagttttatagtatcctttcccatgactaagccgattgttgttgttcgtgtttgagctgcattagcttataggcggccataaattcctggtggacttccttttgggaaaggttcagttccttagctatggtagcaaaggaatactgcttttccgtgcgcagttgtaagaccttttcctgccccttggtcattttggcctgtatcttaactgccaccaccggctttggttttgtttccaaagtgctaccctggtggatgatatttttaatatcctcaatcgctctttttacctcgttgctggtatgggtgatactgctgcccattacctggccaacaattttataacgaaaatcatactttaaacagagttcaataagatgccttctttcagcgctaagtaatgggaatactttttttatccggtcaatggctatttgctgcgcctcgtggtctttgtggttttgaagatcgtctttgggatcatagcccgctaaataatcctgatagttctcataactttctaaggaatttacttttctgaaaaacttatttttagggcgagtgaagtaggtgtagcattcccttttcatcaccattctaaggaaatagtaaatatgttccggccgctctatccggtctcttttctcccataatatgagaaagctatcctgtaccagggtttccacggcaaaatcatcatccaatatctgcctgcccacccagaagatattacggtggtacttcttatagataaactccaaagcatcgggatgtccttgttgtaatagttcaaaaatacgctgtaacataatatgctgtataattacaattagtaattatttatttactaaaagtaaataaatatatttaaaaaacaaattataatttattataagtatattaatcaataccataaatgaattagttgtcattttagggtcaataaatacccccatggcaaaagacgaccaacataaggacccaacattactttccataggatcgatgtttgaaacaggcagaattaagaagatgtatacgctttcggaattatatccaaccaaaatagcgaaatcacttggtataaattatggtagatatatggttaaactcagtcatccagatagattcactcttggtgagatagtaaggcttgccaatttgttaaatatagaacctgagatgattaccaaagttatttattcagaaatggattaacaattgccttaattagaaaagtgaattattaaagaggactgtaaccttatcctttaaatgttggtttaatttatagaagccagtcctgtaccttcattaaattttaaacgtaatgaattacaattacagggatttatttaagttaaattttcggtaaagaaactaagtagaataatctagaaaatacaggaacgattactaattgatcggtaataccaaaaggaacttaatatccccgaatacttagtagaaaaatatctccaagggcctcaattttttatttttctacgggttttcccttattttttataggaaaacataattatttttagtaattatgttaatcttatttggcttaccctgctattccaaaaagtgaaagcgacctgtaaaggccgctttaaatgttttcacaacggaataatccttattgtgaattgcttcaaaattgtataacaagtataaaacaattatttggattgtacaatttgcttttccgtaaagtgaaaatccggcattgattaacctaccataaatcataattatatgaaaaaaattttaggacttgatttgggaacaaactcgatcgggtggtcgcttatagaacaggattttgatgaaaaagaagggggaattttaggaatgggatctcgaattattcctatggaccaaggtgttttagggaaatttgatagcggtaattctatttcccaaactgcagaaagaaccgattataggggaatgcgaagattaaatgaacggtaccttttacgccgtcagcggctacatcgagtattgaatatacttggttttctccccacccattatgcggaagctatcgattttcataataagttaggtcagtttttaccgggaaaagaagtgaaatttaattatcaactaaatggaggtcccaaacatcaatttatttttcagaagtcatttgaagaaatggcagaagaatttaaggctaaacatcctgacctaaaaattccatacgattggactttatactatttaaggaagaaagcgctttcagaaaaaatatctaaagaagaactggcgtgggtaattttaaattttaaccaaaagagagggtactatcaattacgtggagaagatgaagaaaccgataaaaaccaggaatatgtttctttacaggtaaaggaattaattgacacaggggaagccgtgaaaggcaaaccgctttataaagtgatctttgtaaatggatgggaatatgacagggatattaccaaaaccgaagattgggaaaatcaggaaagagaatttattgttactactaaaaccaacaaagatggcagtaccaaaagaacctttaaaaaagtagattctgaactggattggattgctatcaagcaaaaaacccaacagaacatagatgaatctaaaaaaacggtaggacaatacatttacggaagcctcttggaaaagcccaatcaaaaaatacgaggtaatctggtaaaaaccatagaccggaaatattataaaaaggaactttccaaaattttagaaatacaaaagaagtttcatccagaattacaaaataatgacctgtatcaaaaatgtttaaatgaattatacccgcgcaatgaagcgcatcaggcaaatattaagagcaacgattttacctatttgttcatagaagatattattttctaccaacgtccattgaaaaccaagaaatctactatttccaattgtgcttacgaaaaaaggtatttcaaaaaagatgatgaactggtggaaaaaccattaaaaagtattccaaaatccaatccgctctaccaggaattccgtctttggcagtttattcaaaatctcagaatttataaaaagatcactgatggagaagggaagacaaagatcgatgaagacattaccaaggcactattgccggatacttcttcaatcgttgatctatttgattttttgaatgaccgtaaggaaattgaccaaaatcaattaatcaagtatttttcagatttaaaactaattcctaaacagaaaaaggattcttccttatttcgttggaactatgtagaagataaaaaatatccctgtaacaccactcgtgctgaatttttatccaggattaaaaagattaaagaggtttcaaaagattttttcgaccagaaaaatgaaaaagaattatggcacattgtctattctgtaaaggataaaaaggattttgaaaaggctctagaaactttcgccgaaaaaaagcaaattccgcaagaggaatttatagaaaactttaaaaaaattcctccgtacccaaatgattatggtgcttattcagaaaaatcgataaaaaaacttttgccattaatgcgaatgggcaaatactggaccgatgattcgatcaacactgaaattaaaaaccgaataaatgatattcttgaacgcttagaagccataaattttgataaagaaaaaattgaaacggttgccgatgacgcctacaaaaaacaagttttaaaaagctttttaaagtttaaagacaaggaaaacccgttagaaggattaaatacgtatcaggcttgttatgcggtttatgaaagacattcagaaatttcagaaattataaactggaaaactccagcagatattgattcctatttaaatgaaatattcaaacaacatcaacttagaaatccaatagtagaacaagtagtcaccgaaactttaagagttgtaagggatatctggaaacactatggaaatagtgaaaaggattttttctcggaaatccatttggaattaggaagggaaatgaaaaattctgctgaaaaaaggcaacgcttaagcagacaaaatactgatcgggaaaacaccaaccaacgaataaaagcgatattagaagaattgcaaaatgaaggcattgaagccattaaaccctattcacccaaccaacaagaaattttaaaattatacgaggaaggtgtttattgcaacgcaaaatacgatcaggttagtgaagatgaaattgaagctatcagaaaaaagaatgcaccaaccaaaaaagatattttacgttataaactctggctggaacaaggctatcgttctccttatacgggaaatataattccaatgagtaaactatttactacagattaccaaattgaacatatcattccgcaatcccgcttttttgatgattcttttaataataaagtgatttgcgaaagcgctattaacccttacccttataaagacaatcaattggcctacgaatttataaataatagtcgaggttgtgtggttccggaattggcaaataatggtaaggaatgtacaattttcaccttggaagaatatgaagatcattgtaaaagctattttagaaagaatcgcacaaaactgaaatatttattgagtgaagatattcctgaaggatttgtaaaccgccaattaaatgacagccgatatattagtaaattcattaaagggttgttgagcaatatcttacgagaacctaacgaaagagaagctacggtaaaaaaccttatacctgtcaacggtgcgataactagtcaattgaaacaagattgggggttaaacgataaatggaatgaaattatcgcacctcgttttaaacgaatgaacgaggtcacgcaatccgatgattatggatattgggataaaaaaatcaatgcgtttagaacacaagtccccaaagaaattgaacccggatttagcaaaaaacgaatcgatcatcgccaccatgctttagacgctttagtgattgcctgtacaacaaaagaccatattaattatattacctcaattaatactgaacgtaaaaatcacagtttagttaaaaaattacgacagacaaaagaaatagaattagggggtaaaaaaagaaccgttgcaaaatcatataaaaaaccctggaaaggattcactatagatgctaaaaatgccttggaagaaattgtaattagtttcaaaaaaaatattcgggtaatcaacagatccaacaataaaacctggtattgggaaaagaaaaacggtcagtggaaaaaatctttacaacttcaaaaaggaaagaatttcgctattagaaaaccattacataaagagacggtttcgggtttaatcgacatacctacccctaaaggaaaagtagcaactgctacccgaatcaatatttctgatattaaaaatcataaacacattgataaaataaccgacaacagtattcagaaaattttaaggaatcacgtcaaaaactatcttgatgaaaaagggaaggaagatttcgaagaggcattcagcccaaagggaatagccgaattaaataaaaatatcaaaaccttaaataatggtaaagatcatcaacctatttataaagtaaggcaatatgaagtgggtagtaaatttagtgtaggggaaagtggaaacaaaacagataagtacgttgaagccgccaaaggaactaatttatattttgcggtgtactgggatgagaaaaagcaaaagcgaaactttgaaactattccattaaatgaagttgtagagcatcaaaagcagatggctcatataccaatgaaagataaagagccaattccgatagaccacaccaaaggaaatttgttattttatttatcaccaaacgatttggtttatgtcccaatcggtaaagatttagaatcagacattggtcctgaaaaattggtaaaagaaaatatttttaagatagtaagctttacaaataccagattatacgcactaccgaacacagttgctatttctatcaaaaataaaatagaatttaatcaacttaataaaatagaattcacttcggaaaagttaagttgctggaaacttgatgttgatcgtttagggaatatgaaaaaacttattaaatgatcaaacgcaccctctttttcggtaatccagcttatctcagcaccaaaaacgaacagttagtggtttctttccctgaagaaggaaaagaagataaaacagttcctattgaagatatcggggtgcttgttttggaaaatcctcagatcactttgaccaacggactcatcactaaactcattcagaataaagcggccgttgtaaattgcgataaacagcaccttccttgctctattttacaaccactggtgggccataccgaacaaaccgaacgcttttcggcccaactcagcgcaagtctgcctttaaagaaaaatttatggcagcaaaccattagtgcaaaaatcagcaaccaggcacagcacctatttcgtagaaataaaaatcataaaaaactggcacgttgggcgggagaagtaaaaagcggtgataccgaaaaccacgaagcagtagccgcagcccattattggcaaaacctttttgatattgatggattcactagatttaggcacggagcccccccaaacaatttactaaactacggatatgcgattctacgggcagtaaccgctagagcacttataagttccgggttattgcctggagtgggaatatttcatcataataaatataatgcctttgcccttgccgatgatattatggaaccctaccggatttttgttgacgacttagtttatgaaatattggtttccgaagaaaatattgatgaattgacttcagacttgaagtcacaacttctgagaattccggccttagatgtttttattgatggaaaatggagcccgctaatggtagccttgagcagaaccactaattctctatacgaatgttttgccaacctaagtcgtaagattctttatcccctgtatcaatagaaccggtctaatccagtttgccttaaatcagcacaacatggaagaaaaattttcacgtttaaatcaataccgcagtatgtgggtactagtattcttcgatctaccaaccgaaaccagggccgagcgaaaagctgcaacaaggtttagaaaagatttgctggatgatggttttggaatgtttcaattttcaatctataccaggttttgcgcaagtcgcgaaaatgcagatgtacacaccaggcgtaccaaaagaaaccttccaaaaaaaggaaaagtatgtattatgcaaataaccgataagcagtttggaatgattgaactttttcacggtagaaaagagaccgccccggaaccccccactcaacaacttgaacttttttaggattttaaatgtcggaccgatcacagtcgggaccttttaaaaatccattgatttttaatcctaagcatacttataagaaacaggataccagtcnnnnnnnnnnnnnnnnnnnnnnnnnnnnnnnnnnnnnnnnnnnnnnnnnnnnnnnnnnnnnnnnnnnnnnnnnnnnnnnnnnnnnnnnnnnnnnnnnnnnnnnnnnnnnnnnnnnnnnnnnnnnnnnnnnnnnnnnnnnnnnnnnnnnnnnnnnnnnnnnnnnnnnnnnnnnnnnnnnnnnnnnnnnnnnnnnnnnnnnnnnnnnnnnnnnnnnnnnnnnnnnnnnnnnnnnnnnnnnnnnnnnnnnnnnnnnnnnnnnnnnnnnnnnnnnnnnnnnnnnnnnnnnnnnnnnnnnnnnnnnnnnnnnnnnnnnnnnnnnnnnnnnnnnnnnnnnnnnnnnnnnnnnnnnnnnnnnnnnnnnnnnnnnnnnnnnnnnnnnnnnnnnnnnnnnnnnnnnnnnnnnnnnnnnnnnnnnnnnnnnnnnnnnnnnnnnnnnnnnnnnnnnnnnnnnnnnnnnnnnnnnnnnnnnnnnnnnnnnnnnnnnnnnnnnnnnnnnnnnnnnnnnnnnnnnnnnnnnnnnnnnnnnnnnnnnnnnnnnnnnnnnnnnnnnnnnnnnnnnnnnnnnnnnnnnnnnnnnnnnnnnnnnnnnnnnnnnnnnnnnnnnnnnnnnnnnnnnnnnnnnnnnnnnnnnnnnnnnnnnnnnnnnnnnnnnnnnnnnnnnnnnnnnnnnnnnnnnnnnnnnnnnnnnnnnnnnnnnnnnnnnnnnnnnnnnnnnnnnnnnnnnnnnnnnnnnnnnnnnnnnnnnnnnnnnnnnnnnnnnnnnnnnnnnnnnnnnnnnnnnnnnnnnnnnnnnnnnnnnnnnnnnnnnnnnnnnnnnnnnnnnnnnnnnnnnnnnnnnnnnnnnnnnnnnnnnnnnnnnnnnnnnnnnnnnnnnnnnnnnnnnnnnnnnnnnnnnnnnnnnnnnnnnnnnnnnnnnnnnnnnnnnnnnnnnnnnnnnnnnnnnnnnnnnnnnnnnnnnnnnnnnnnnnnnnnnnnnnnnnnnnnnnnnnnnnnnnnnnnnnnnnnnnnnnnnnnnnnnnnnnnnnnnnnnnnnnnnnnnnnnnnnnnnnnnnnnnnnnnnnnnnnnnnnnnnnnnnnnnnnnnnnnnnnnnnnnnnnnnnnnnnnnnnnnnnnnnnnnnnnnnnnnnnnnnnnnnnnnnnnnnnnnnnnnnnnnnnnnnnnnnnnnnnnnnnnnnnnnnnnnnnnnnnnnnnnnnnnnnnnnnnnnnnnnnnnnnnnnnnnnnnnnnnnnnnnnnnnnnnnnnnnnnnnnnnnnnnnnnnnnnnnnnnnnnnnnnnnnnnnnnnnnnnnnnnnnnnnnnnnnnnnnnnnnnnnnnnnnnnnnnnnnnnnnnnnnnnnnnnnnnnnnnnnnnnnnnnnnnnnnnnnnnnnnnnnnnnnnnnnnnnnnnnnnnnnnnnnnnnnnnnnnnnnnnnnnnnnnnnnnnnnnnnnnnnnnnnnnnnnnnnnnnnnnnnnnnnnnnnnnnnnnnnnnnnnnnnnnnnnnnnnnnnnnnnnnnnnnnnnnnnnnnnnnnnnnnnnnnnnnnnnnnnnnnnnnnnnnnnnnnnnnnnnnnnnnnnnnnnnnnnnnnnnnnnnnnnnnnnnnnnnnnnnnnnnnnnnnnnnnnnnnnnnnnnnnnnnnnnnnnnnnnnnnnnnnnnnnnnnnnnnnnnnnnnnnnnnnnnnnnnnnnnnnnnnnnnnnnnnnnnnnnnnnnnnnnnnnnnnnnnnnnnnnnnnnnnnnnnnnnnnnnnnnnnnnnnnnnnnnnnnnnnnnnnnnnnnnnnnnnnnnnnnnnnnnnnnnnnnnnnnnnnnnnnnnnnnnnnnnnnnnnnnnnnnnnnnnnnnnnnnnnnnnnnnnnnnnnnnnnnnnnnnnnnnnnnnnnnnnnnnnnnnnnnnnnnnnnnnnnnnnnnnnnnnnnnnnnnnnnnnnnnnnnnnnnnnnnnnnnnnnnnnnnnnnnnnnnnnnnnnnnnnnnnnnnnnnnnnnnnnnnnnnnnnnnnnnnnnnnnnnnnnnnnnnnnnnnnnnnnnnnnnnnnnnnnnnnnnnnnnnnnnnnnnnnnnnnnnnnnnnnnnnnnnnnnnnnnnnnnnnnnnnnnnnnnnnnnnnnnnnnnnnnnnnnnnnnnnnnnnnnnnnnnnnnnnnnnnnnnnnnnnnnnnnnnnnnnnnnnnnnnnnnnnnnnnnnnnnnnnnnnnnnnnnnnnnnnnnnnnnnnnnnnnnnnnnnnnnnnnnnnnnnnnnnnnnnnnnnnnnnnnnnnnnnnnnnnnnnnnnnnnnnnnnnnnnnnnnnnnnnnnnnnnnnnnnnnnnnnnnnnnnnnnnnnnnnnnnnnnnnnnnnnnnnnnnnnnnnnnnnnnnnnnnnnnnnnnnnnnnnnnnnnnnnnnnnnnnnnnntatttctgccgcatacctgtgaatcctaaacaaaaatacaattctgaaagcaattcacaacccgttccttccagcttagctgtacggcccacctgtgaatcctaagtaaaaatacaattctgaaaacttttatcataatttggatacataattttcttcataggacaaacctgattttgctactgcaaaaccctgtttaggaagcttattgcaaacgtcgataattgcgagtttcttacttttaccttttgcttttattctttcatagatatctctacaagccttattattttacaagctgtaaagctgcacataaatagcaagtctctaaggtttggatttcccgttttactaatcctgctttctactcttacactggatccagattcgcgaataataagagtaatttcaggatagcaaaataactgacgtgcattctcaaatttgataaaaatcattggttatcagcttttcttaatctctcttttcctttttatcacctgtaggttttttcgcttgtttttctgccagtttactttttaaagcattcatatcatcactaatttttcggtctacaattttagcgtaatgctgagtagtcctcaaatcttgatgacctagcattttacttacagattctataggaaccccattggtaagtgtaatagtggttgcaaaagtatggcgggccaggtgagtggtaaggggtttggtaattccacatagtgcagcgatctcctttaaaaatgcatttgatttctgattgcttagtaccggtaaaacatatttaccatccttcacctcggggtggtcttgatagcgatctaaaatttcttcagcaacaggtaacaatggaatactactaagggattttgttttggttctttttatacgaatccatttcccgccgtctataccttttgttatatctgcaccgcttaattttttaacatcagaataggccaggccggtataacagctaaaaacaaacatgtccctcaccagtttcagacgatccaagtgaaggtctttatcgatcagttgttgaacttcctcctcatttaagaattcacgttccaccgtttcaaactgcaccttgtaattatagaaaggatcctgatccatccactggttagccagagcaatgcgaatgatctttttaaaattgttgacatactttagggcagagttatggttacactcccgcttagttttgaggaaatattcgagtttggaaatgaaatgatgattaatttcgttcattggataatcatctgtcttaaattcttcattcaggaattgctcaatatgattataacaggtccagtaacgttttgcggtgctcttggagatacttttacctgaaaggcgattcatttgttcattatgctctttaaaaacctctagggtcattttcggcttctttctgttaacccctttaaattcatcaagaatacttttggaagaaataattttatttttttcaatcaggtcctggtgtatattcttaatcttattcctaagaacattgatataattattcagttctgtcgcttcgggacttttgcccaacattttttcagatttaggatgccatttcctaggatcgactttgcgatttatgcttatggcagatcgcttattatttacagatattcttaaataaatatcgctttcagcagatttgttacttctgctttttctaaggtaaaaactaagttggtaagaagtgctcatatttttggtcataaaattggcacttaaattagcaaaaaatgatatacgaaatgaaactttaatattttataaagaattgatattaagggtttttgggtggttctggttaccaattttctgcgaaaagattggtagccagattggtaaccaaaaatgtgctattatttgatattaaacgatatcattaaaaacaaaaaaccccgtaaatcttaggatttacgggtttttgatcgagtttggtactcaaaaagtggagtcggaggggttcgaaccctcgtccaaacaagcaattcagcagctttctacacgtttagtcttcgcttggttgtcgatgcaagaccggccgaaaaccaccaatcttacacgtatcctcatttagatttcggaagaacatcaaggccctgtgcttcctatatttactttttcggtgcctcaaatgcggacgccgtaaatcaaggcttccgcgaggcatctcggctccctaccttgtagggactaagcaaatcctactgtgattcggattatgcagccaaggcgtagttattctcgccgtttaaaaaagtgtgaaatatgagatttacgagctatatcccagcgctcgacgtgcttacaactcaattagactcgctgtcaaaaccaagtcgaccccattatttaaagaacatcatttcagttattcttaactgatctgagtctgcaaagatactaataaaattatatctttggaactcacttatcactacgcaaaatacataccagaaatgataaaattcgcccttataaaagaacgcaagactccgcccgatcgcagagtggttttttctcccgaaaaacttcaggaaatacgccaaaagttccctgaggccgactttaaggtagagagttctgacattcgtattttttctgatgaggcttatcgacaggccgggtttgaggtgtcagacgatgtgtcagactgcgaggtgatgctgggagtgaaagaagtgcccttgcctgcacttattccgaataaaaaatattttttcttttcgcatactatcaagaaacagccttataaccgggaccttttaagggaaatcctaaataaaaatatcgaactctatgatcatgaggtgatcgtgaaagggagtggagccaggcttattggttttggtcgctatgccgggctggtaggagcttataatggtttccgcggaataggactgaaggaagggctttttgagcttccaaaagcagagaacttgccagacctgaatgcgatgtgcgcagagctcgataagatcaggattccacgaatgaagatcgtgcttaccggaagcggaaaagtggcccgcggggccaaagagatcctcgatcatatgaagatcaaggaggtaaacgttaatgaatatcttgaagaggattttgacgaaccggtttactgcaggatagatgttttagattataacaaacgcagggacgggaaggtgttggataacaaagatttttataaacatccagaagaatatgagtctgattttatgcgatttgccaggcaaagcgatatgtttatcgccgggcatttctatggagatggagctccggctttctttactgctgaagatgcaaaatcgcctgattttaaaataaaatatatcgccgatatctcctgcgatatccatggacctgtagccagtaccatcaggccttcaaccatagccgaacccttttatgggtatgatgcccaaaatgagatggaggtagatttcagagaaaaggattcgatattggtaatggcagtagataacctgccttgcgaacttccaaaagatgccagcgaaggttttggggagatgttccttgagcacgtgatccccgcattttttaatgatgatatagatggtgtgctaaaaagggccaaaatgaccagcgccggtaaattgaccgtaaagtttgactacctcgaagattatgtaaaaggggaaccaattaaacaggaagattaatcagtttctgcaccaattagttactttttgaaaaagtttatttccgaacctggtccagggagtttatctcttcgcgataggctgcgggaagtataactgatcttaacactcgatcaagtttaattcttcgacttagtttgtatggggggatcaagagtgtgaggagcgagaatttccgaagtgataaaagttttcttactttctccggagtgatataaatttgagtttcgagcaataagcggtaacgaaacggcccgagatgtttgcggtaccggcgatagagatcccgggtatacactccggcctccagattttgttccagatgtgatcgccgcatcttttgaaaggcttcaaagttttccggtaagccctgcaactgcatcctgtttccaacccggaaaaagacgttgaaaacctcctgtttttgggctaagctgagtttatgttcgaggagctcataagacctaatggaataatcgataagcataaagagcacatccctgtaagcccaatccggaatcgactttccgcgtttggattccacggcagaatggattgcagcgatagaatcaatagccttaagggcggcatccttttcagaaaaaactattttccgggcataagaaaccgtagagaagagtctgcccaggggatcatttggcagtctgccggtataataaagccagtctaccgctttgttgagagcaaactccgccgaagctccggcgaagataaaaagaatggtatccccctttccccagatttcccgtactatcgaatcctcatctacaaaatattccattgctgtctaattaattttatgatttacaaaccatacatttccgcaaggtctcctacggctaaagttccccaaagaataatcaagccaaggaggattttgatccagagtggaataaccaatcctgttttgtttttaagcaggctatttaaaggaggggggaaaatacaggaaaacaaaatatagaaaattcccggcaccggatgtaccaaaataagattcattattcccaacactaaaaaaatcagagtgaatatccagcttacgaagtctgaaataaaaaatttgccggtcattagattttgtttttaggagttatagatttttttatctcgcattattggaattttaaggttcctttcaaagcgccactttatttaatcaggcaataagaattatcccgaaatatgtttaactcccggcgaagggtgttccaaaaacgcctacggctaattccgcccaaattaagaagagtgccgccaggataattcctgataaaaggatccggttcctggtggtttttacttttcttaatacaaattcgattgccagcccggtacctaaaagcaatactgcggcaataacaaaatcggaagcggtccaaaccacctctttgctgaactgcacagcgatcaaaggaataagtaaaagaacagccacaataaatacgataaataataatctcttgtttttcataatatttagaattaaagcttgttgttgcgtaagtgctttgaaattcaaagtgccttggtaaattttttttgctatgtttttttatgattttgatttaaaagcttctcaatcgcttctatgtgttttttaaaatcctcccgtccggcttttgtggtgctgtatcgggtgttaggtttgcggtctataaatgatttttctactttaacatacccttttttctccagcgccttcatatggcttgcgatattcccatcggttacgcccaaaacctgttttagtgtggtgaaatcggcatactcatttaccataagcacactcataattcccagccttacccgattatcaaaagccttgttgatatttccgatgatatttttcatctgtttataatgttaacctcaatttgggaaattaggcacaggcttataatcatgctcctgtgtattgtcattttcgggtccggcatcatgctggttttcatctattcgggtttgcgctcatacctgttatacatccaaatgccgtaaaggatgtggaataggccaaaaccgactgcccagaagtataatccgtaatcgaggaactgggttgagactagtcctaataccacatttgtatatcccagagatctaaggtcgctaaaggtgtatttgctcgcgtgaattaacgccagcccgtaaaaaatgagcatagaaggcaccaaaagtcccaacagtccatattgcagcaataccaggcaaaacaatccgccggccgccaggggggtaaaaaaattgatcatcagtcttttactcgtgctatcccagatcttttgattattttgctttgcttttcgcgtggtgagggctatggcagttcctatggccaggattaggaccgcaatagccagaaagaataattggtctataagatcattattactaaaatttgcggccaccgacccgtagcttgcgttagtgtcatgctcggaaaggagtaaacctgcaatcactgctccaatgatggcatagcttccggcaaatacccctgccagtccgcttagggagata

SEQ ID NO: 1261 - DNA, 22156 bp, synthetic construct
  source 1..22156: mol_type = other DNA
  misc_feature 1..22156: note = Synthetic
ccgatggtactgcgcaagtgggagagtaggtagtcgccgtcttggttccccttacaacattcagttgtgaggggaatttttttatgtgtatatgccgcaaaggtgctttctagataccttatttatatattatcttcaggttttaaaaatactagttgttttagaagtttacatccatgttataatacctcttcagtcttgatttttttatatttttaggtgatatatagtgcttcgttaaaatttttgtttttttaataagaaattcctcgtttgcgttaccgacgaaacaatatttatattacatttgccctgattttgtaatgttgagtttacaatctttatatggcggatagcattaaacatttaggtattgtggaaagcatgaatggttctcatctaaaggtgaaaatcgttcaatcttcagcttgttcctcatgtagtgtaaagggacattgtagcgtgtctgatactaaggaaaagataatcgaagtatttaacatcctcaatttaccatgtaagataggtgatagaattatgctggctggcaaaacttctatggggatgaaggctgtattgttagctttcgtcgtgcctttttgcgtgcttatgttagctttggttttatctttaacatttatgggcgaagataacgaactgtttgctgcggttgttgcgctttgttctctggttccatattacgttatcctatacttgtgtcgtggaaagcttaaacgctcgttcaccttttacgtagaatcaattttataatttattaaataactaacttatattatggatttaattttaattgcagtgatttctttaggggcaattggattggtttctgccattattctttttgtcgcttctaagaagtttgctgtgtatgaagatccccgtatagcacaggtggcagaagtgcttcctcaggctaattgcggtggatgtggctaccctggttgctctggctttgccgcagcatgcgttaaggctggttcattggaaggcaaactttgtcctgtaggcggacagccaaccatgacaaaagttgcagcaattttgggattggaagccgctgcttcagaacctaaggtggcagtggttagatgtaacggaacttgtgctaatcgtccaagagttactcagtacgatggcgttcgttcttgtgttattgccaactctacctacggaggtgagactggatgtacttttggatgtttgggctgtggcgactgtgttgaagcttgtaagttcgatgctatccacatgaatcctgagacaggacttcctgaagttgatgaagctaagtgtactgcctgtggcgcttgtagcaaggcgtgtcctcgtaacatcatcgagattcgtccgaagggtaagaacaaccgccgtgtttatgtacagtgtgtaaacaaagacaaaggtgcagtagctcgtaaggcttgtactgcagcatgtatcggatgtggtaagtgtgttaaagtatgtccgttcgaagctattacattagaaaacaacttggcttacattgatcctgctaagtgtaaatcttgccgtaagtgcgaaatggaatgtccgcaaaacgcaattattgctgttaacttccctcctcgcaagccgaaaacagaagccgctccagccgatgcagctaagccagctgtagcaaaaccggccgaagcaaaacctgcagaagttaaagctccggttgaaaagaaagcagaagaagccgaaccaaaggcttaattcatctattagtaattaaaataaaacaatataaaagtgaagacatttagaattggtggagtacatccagcagaaaataaattgtcagccggtaaagcaatagagacccttgcacttcctaagcaagcagtctttcctttatctcagcatattggtgctccggctaccgctattgtaaaaagaggcgatgtcgtaaaggtcggtactaagattgccgaggctggaggcttcgtttctgctgctattttctcttccgtttcaggaaaagtaaataaggtggatagtgttatcgatgcaagtggttatcgtaaacctgctatttttatcgatgtagaaggtgacgaatgggaagaatctatcgaccgcagcgctgatttggtgaaagagtgcaagttgactcccgaagaaattgttgcgaagattaaagacgccggtgtagttggtatgggtggagcttgtttccctactcacgtaaaacttatgcctcctccgggatgcaaggcagaatgcgttattatcaatgctgtagagtgcgaaccgtatcttactgccgaccatcgtttgatgttggaaaaggcagaccagattttggtaggtgtttcattgctgatgaaggccgctaaggtaactaaaggttatatcggtatcgaaaacaataagcccgacgctatcaagttgatgactgaaaaggctgcaaactatgcaggcattgaagttgttcctttgcaggtgaaatatccgcaaggtggtgaaaagcagctcatcgacgctgttatcggtcgtcaggtacctgcacctcccgcaattcctatccacgtaggtgctgtagtgcagaacgtgggtactgcatacgctgtttacgaagctgttcagaagaacaaaccattgtttgagcgcgtggtaaccgttaccggaaagtcacttgctaacccgtctaacttcttgactcgtatgggtactccgatgagccagctgattgacgctgccggaggtcttcctgcagataccggaaaggtaatcggcggtggtccgatgatgggtaaggcattggtaaataccgaagttcctatctgtaaaggtagctctggcgtacttatcatgaatgataaagaagctaaacgtgcagaacttcagccgtgtatccgctgtgctaagtgtgtgagcgcatgtcctatgggacttgagccatatcttttggctacatgttcagcaaatgctgactgggaacgcgtagaaaaagaaatgatcatgtcatgtatcgaatgcggttcttgtcagtttacatgtccttctcatcgtccgatgttggactacatccgtttaggaaaaggtaaggtgggcggaataatccgtgcacgcaacgctaagaaataagtttttagaaaaaattatggctaataaattaattgtatcattatcgccccatgtgcataacaatgatagcgtacagaaaaacatgtacggtgtactcattgctttggtacctgccttgcttgtatcattctatatgtttggcttaggggctgttatagtcacgcttacttctgttttgtcgtgtctgttctttgaatgggctatcaccaagttcattctgaaatgcgaacgtactactattaccgacggttcggctatccttaccggagtattgttggcgttcaatcttccgtcaaatcttccgttgtggattatcattatcggtgcgttggtagctatcggtattggtaagatgaccttcggtggtttgggttgcaacccgttcaaccccgcattggtaggacgtatcttcttattgatctctttccctgtacagatgacttcatggcctgtagccggacagctcgctgcttatacagatgccgaaaccgcagctactccgttggcattgatgaagatggctgtacacggcgatgtagaagccttgaatcagttacccgatacattgagcttgttcctcggaaacaatccgggttgtatcggtgaaatcagctctgtagctctgttgcttggtttggcttatatgttgtggaagaaaattatttcatggcatatcccagtatctatcatcgctacagtattcgttttctcaggcttgatgcatttggctaatcctgcagtatatgcatctccatttgcccatctgtttaccggtggtttgatgttgggtgccatcttcatggctaccgactatgtcacttcgccgatgactcacaagggaatgattatttatggtgtagctatcggtttccttaccgtggtaatccgtttgttcggtgcttacccagaaggtatgtcgttcgctattttcatcatgaatgcattcactccgttaatcaacacttattgcaaacctaaacgattcggggaggtaatgaaaaaatgaaaaagctggaatcatctttattaaatatggtggtcgtattgaccgtcatttctgtggtagccggtggtatccttgcttatgtaaaccaagtcactgctggtcctatcgaaaaaatcaaagccgagacattgaacaacgcattgaagagcgtgcttaacgcagatgaaatgcctcaagtttcgaatactgaaaatatcgatgagtttaccatcatttatgaaaccaacaagggaactgccgttcaggctgcaaccgacggtttcggtggtaagctgaaagtattggtaggttttgccgaagacggtactatctctggttatagcgtattggaacactctgaaactccgggattgggagctaaagcaggcgactggttccaaaaaggaggcaagggcgacatcatcggaaagaacccgggcgaaaaagaacttacagtatctaaggatggtggcgatgtagacgctattaccgcatctactattaccagccgtgcattcttgttggctgtaaacaacgcttataaagcctacaaaggaaaagcttctacatcttctgatgcaacaagcagtgccactctgcgtgttaagaataatgaaacagaaggtagcgacgacgctgccgaatcaacaaatgagtaaggaggaaattgattatgaataacttgaaagttttattaaacggtatcgtcaaggagaatcctacatttgtactccttttaggtatgtgccctaccttgggtactacatcaagcgccatcaacggtatgtctatgggacttgccactatggccgtgttgatttgttctaacttcgtgatttcttgtatcaagaatctcgtaccagatatggttcgtatcccgtcgtacgtagtagttatcgcatcgttggtaacagtgcttcagatggtgatgcaggcatacgttcccgatttgtacgctactttgggtctgtttattccgttgatcgtagtaaactgtatcatcttgggtcgtgccgaagcattcgccgcaaagaatggtcctatcccttctattttcgacggtatcggtatcggactcggatttaccattgccttgacacttctgggtggtgtgcgcgagttgtttggtacaggaaagattttcggaatgacaatcttccccgaagactacggaatgctggtgttcgtattggcaccgggtgctttcatcgtattgggatatctcattgctattgtaaatcgctttaagaaagcataaacccttaaaaagaataagatatggaatatatattgatatttatcacggctattttcgtaaataacgtggtgttgtctcagttcttgggtatctgtccgttcctcggtgtatcaaagaaagtagagaccgctatgggtatgggagccgcagtggcattcgtattgacattggctaccatcgtaacttatgttattcagaagttcgtgctcgatacttgtggattagcatacttgcagactatcgcgtttatcttggttatcgcagcgttggtacagatggtagaaatcatccttaagaaagtttctcctgcactgtatcaagcactgggcgtattcttgccgcttatcaccactaactgctgtatcctcggtgttaccatcttggtaattcagaaagactacgatttgcttacaggtgtagtttacgcattctctaccgctatcggttttgcgttggcattggtagtattcgccggaatccgcgaacaactcagcttggtaaacattcctaagggtatgcgtggcatgtctatagcacttgtaacagccggattgctcgctatggcattcatgggcttctctggtgttgataaaggtttggcagcagtgttcggactctaatagatggaaaaagagcttcacttttattgagtgagcttatgccagaataaaatctccccatattatccgtttttagatgaaatggataatatggggatttttttgtagaatttgtgtacaaaacaccttgtttgtgttattataaatacctacatttgtcattataacttaaatgtatataaaaactttagcgtaatgaaagaaagaattttggttaccggtggaactggatatatcggttctcataccgtggtagaattgcagaacaatggctacgaagtagtgatagtagataatctgtctaattcgcgcgccgatgtagtagatagcatcgaacaaatctcaggcattcgtccggcttttgaagaagtagactgcttggattatgaaggtatggatgccgtattcaccaagtatcctggcatcaagggtatcatccattttgctgctagtaaggctgtaggcgaatcagtagaaaagcctttgaaatactatcgcaacaacttggtatctctgatcaacatattggagttgatgcctaaacacaatgtaaaaggtatcatattctcttcttcatgtacagtttacggacagccagatattcttcctgtaacagaagccgctcctatcaagaaagccgagtctccttatggaaacactaagcagatcaacgaagaaattatccgcgatactgtcgcttctggttctcctatccatgcagttatgttgcgttacttcaatcctatcggcgcacatccatcagctcttatcggtgagttgcctaacggagttccgcagaaccttatcccttaccttactcagacagctatcggtatccgcgaaaaactgagcgtattcggcgacgattacgatactcctgacggatcatgtatccgcgacttcatctatgtagtcgatttggcaaaggctcacgttatcgctatgaaccgtattttggaagacaagcagaaagaaagcgtagaagtattcaacatcggtacaggtcgcggactttcagtattggaacttatcaatgcattcgaaaaatctacaggcgtaaaattgaactatcagattgtgggccgtcgtgctggtgatatcgttaaggtttgggcagatccaactttggctaataccgaattgggttggaaagccgatactcctatagaagacacccttcgttcagcatggaattggcagttgcacctgcgtgaaaaaggtattcaataacatgctgttaatttgtgcaaaaatgtttgcacaattacaaaattgatttatatttgtattgatataaacgagcaaacatatacagatacgttcttatgtgaataacgatagtgtcactgtcgtaaagatagaaacgtgatgtttgctttgtagttttgtcgtgttttattttgtgtttgtgtagatagtgccccaacgtgagtcggggcactatttttttatgcggtatgctagcataccgcataaaaaaagcccaccgataaaggacgatgggcaagagcctaatgttttcacaacggaataatccttattgtgaattgcttcaatttagtatcagcaaaataatcaaataaaagtcgtattagcaaatatttacgataaaatatttatatatttgagaaaattataatcaaatagctatgaagagaatattagggcttgatctaggaactaatagcataggttctgcattagttgaaggtatagtaacagacaatggaaaagaagaactgagtaatatacgttactgcggaagtcggataatttcgatggatgctgctaagttaggcgattttgaacgtggtaattcagtgtctcaaacagctgatagaacaaaatatagaagtactcgacatctatatgaacggagtaagctacgccgtgaacgtttgcatcgtgttcttgatttaatgggctttttgccggctcattattcgaatagtttgacccgatacggaaagtttcgtgatgatgtagagtgtaaactgccatgggtgaaagatgatacaggcgtttatcattttttattcgaagaatctttccaagagatgttagccgatttttctaaacatcaaccacagttggtgtgtgatgataaaaaggttccctatgactggactatttattaccttagaaaaaaggctctttcagaaaagataactaaggaagaattggcttgggtacttctcaattttaatcaaaaacgaggatattatcaattacgagaggaagaaagtgatgtccgttctgataataaatcagaaaaataccattccctgaaggttgttaaagtagaggcgttggatgagaaaaaagggaaggcaataaaatataatgtggaattcgaaaatgggatgatttggtctcgtttcagtaatgttccattagattggaaaggaaaaattaaagatattatagttactactactcttgacaaggatggcaatccgaagaaaaataaagatggcgaaataatttgttctttccgtaatcccgatgaaaacgattggtctttgttgaagattagaacagaagatgaaataaagaatagccaggaaactgtaggtgcctatatttatgatacgctgctaaaaaatagacatcaaaaaatccgtggaaaacttgttcatactatcgagcgtaagttttataaggaagaattgaataagatattagagtctcagaaacgctttcatgaagaattgaatgacagacagttatttcttaattgcttggaagaattatatcctaataatgaaggacatcgcaatgtaagaagcggcaaaggacttgcagaattccttgttgatgacattcttttctaccagcgtccacttaagagcaagaaatcattaataagtgattgtccgtatgagtttcatacttgtatcgataaagctacaggcgaaaagaaacgtgttggtataaagtgtatttcttcgtctcatccgttgtttcaagagtttcgcttatggcagtttgtatctaatttgcgtatttatcagaaagagaaacgggtaaatggtaaattagaacaagatgttgatgttacgtcagagtttataaagtcggacgaagacaaagctttattgtttgaatggctgaatgataaacgaaacataaatcaaaaggcatttctaaaatacaaaggttttggtttaggtaaacacgcagaagaataccgctggaattatgtagaagatgatactaaaaaatatccatgcaatgatactcgtgccttgctcttggattatttggcaaaggcaaatgtgccaagttctttcttgacaaaggaaaaagaattggccttatggcacttgctgtattctatagaagataagcaggagttagaaaaagcattgggtacgtttgctcagcgtgaaggatttgatgaagattcttttgtagatgtatttaagaaatttcctgcgttcaaaaaagattatggagcatattctgctaaagccataagcaaattattgtcattgatgcgttgtggaaagtattggagcgaagatgccattgatgaaaatacccgattgcgtattcagcacattatagatggagaatgtgatgaatctataagaaatagggttagagagaagactatgcacctaactgatatttcatgctttaagtcattacctctatggcttgcgtgttatgtagtttacgatagacattctgaagctaaagaagtaaccaagtggaattctcccgaagatatagacaagtatttgcatgaatttaagcaacactctttgcgaaatcctatagtagagcaagttctgactgaaacacttcgtgtggtgagggacgtgtggaagcaatatggaacaatcgatgaaatacatattgagttagggcgtgaaatgaatggtacggccgataagaaaaagaaatggtcggagcagtccattaagaatgaaaatacgaacttacgagtaaaggctttacttatggattttatgaatccagagttcgaagtagaaaatgtgcgtccttattcacccagtcagcaagaactgttacgcatttatgaggacggcgtttttgacagtgtaggcgatgatgtgccagaagatataagtggcattctgaaaaagttcgctcaaacggatgtgaacaagaagccttctcgtacagaagtcctaagatataagttatggctcgaccaaaagtatgtctctccttataccggagagcctatacctttaggtaagctgtttacttctgcctatgaaatagaacatgtaataccacaatctctttattttgatgattcatttaataataaggtgatatgcgaagcggaagtaaacaaaagaaagagcaatcaattaggatatgaattcataaagaatcatcatggagagaagatagaactttcattcggtagaaccgtaacggtattgtctgtagaggggtatgaacagttattgaagaactgtttttctcataatcatgcgaagcggagaaatttgttattggaagatgtgccagaaaaatttatccaacggcaaatgaatgatacccgatacgtgagtcgagaaattatgcgtttgctctctaatatagtgcgagatgaagacgagcaagatagcaagtcaaagcatgttataccttgtaatggaggcataaccgattatttaaagaaagactggggacttaacgacgtgtggaatagtattatattgcctcgttttgagcgcttgaaccgcttgacgggaaaagagcagtttacatcaagaaacacaaataataagttaatacccgatatgccgcttgatcttcagaaaggatttaagaagaagcgtatagaccatcgtcatcatgctatggatgcgatagtgatagcatgtgctaatattaacattgttaattatttgaataattcttcggcttgtcatgatgcaaaaacttcacgttatgatttgcgtaaattgttatgccataagtgtaaatccgatgccgatggtaatagtaattgggtgattgataagccatggcctacatttacacaagatgttcaagaagctatacagcagattgttgttagctttaaacagaatttgcgtgttataaacagaacgtctaattactatcagcactatgattctgagggtaaaaaagaatatgtgcctcaaaccaatggagatagttgggctatacgtaaaccattgcataaagaaacgttatatggtgaggtgaatctacgcaaagttaaagaagtatcattggctgaggcaataaagtctgttcagaatgttcggaataaggacttgaagaagcgattgggcttaatgcttcaccaaggatatgatttaaagcagatgaaacgatattttgaagacaataaagatgtatggcaggatataaacttgtctaaaattgaaatctattattttactcaaaatactaacgaccgttattttgcaagtcgcgcatctgttgatacaaccttcaatcgtaaaaagatagaagaaaagataaccgatactggcatacaaaagataatgattcgtcatttggagagcaaagaagaaaacccggaattggctttttctccagatggaattgatgagatgaaccaaaatatcatagcattaaataacggagcgttccatcatcctatatataaggtacgagtttatgaaaaagctgaaaaatttgctgtcggaaagaaaggtaataaaggcagtaaatttgttgaggctgctaaaggtactaacttgttttttgctatttacgaagaagaaaagacagatgaggcaacaggagaagttaagcgtgtgcgtagttatgctaccatacccctgaatgttgctatagaaagacaaaagcaaggactttcatctgcgccagacaaagatggaataccagcaaaatatgttttgtctcctaacgatttggtatatgttccgactcaggatgaattggaaaaaggtattgtgatgtctaatattgataaggatcggatttataaaatggttagtagctctggacctcaatgtttttttgttaaggctaatgttgccaaatcaatagttgataaatttgaattttctccattaaataagatggagagagctttgtcgtctgaaatgataaaagaaatctgtgtgcctttaaaggtagatagattgggaaatatcagcatagactaattttatctgaaacggagctatagcatgatttgggtattatgcggtagttccgttttgtgtataaatatatgaaacttaatgatatactgctatgataaagaaaacactttatttcggaaatccggcttatctgtcgcttcgtaaccagcagttggtgatcaagcttccggaagtagtgaaaagtacttcaattccagatgggtttaagcaacagacagaagtgaccaaaccgatagaggatattggtgtactggtgttagataataagcagattaccattacacaaggagcattggagacattgctcgaaaataactgcgcggttataacttgcgacagtaagagtatgccggtaggattgatgcttccgctgtatggtaataccacgcagtgcgaacgctttcgacagcagattgatgcttcgcttccgctgaaaaaacaactttggcagcaaaccatacagtataagataaataatcaggccatggtgttggagcaatgtgtaggcgagaaacataagtgcatgtatgtgtgggctggcgatgtaaggagtggcgatcctgataacttggaagggcgtgcggctgcttattattggaagatactgatgcagcatatccccgattttactcgcgaccgtgaaggcgttcctcccaataatttgctgaattatggatacgccatattgcgtgcagtagtagcgagagcgttggttacgagtggcttgcttcctacattaggcatacaccatcataataggtataatgcctattgtttggctgatgatataatggaaccatatcgtccgtatgttgacgagttggtatatggattgattaagcagaaaggacttcctcacgaagaactgactaaggaatggaaggcggcaatgcttgctgttcccactttagaagtgaaagttttgggtaaacgaagtcctttgatggtagctgtggctcaaaccacggcatctctctataaatgtttcaacggagaattacgaaaaatcatttatcctgaacggtaagtatggacaggtttagcgaatatcgtgttatgtggatattagttctttttgatttgcctacagaaactaagaaagacaagaaagcctatgcgctttttcgtaagaatctgcagcgagatggatttaccatgtttcagttttccatctatgtgcgtcattgtgccagtcaagagaatgctgcggttcatataaagcgtgtcaagtcgttcttgccagaatatggtaatgtcgggataatctgcataacagataaacaatttgctaatatagaattattctacggaaaaaagcctcttcctccagaggctcctggtcagcaattggaactcttttaaatataaaatcccaccgttgagtgggattttatatttaggaacatcttaaattttaatttctaattttctttgtaatatactgtggtacagaagataacaaataacgggtgttcctaatggaacaaagatactaaattgaaagctattcacaacaagaactttctattttattggttgtttaaaggtgttcctaatggaacaaagatactaaattgaaagctattctactctggtcattattatatctgtaggtacggagaaacctatgggatgaacttcctccgcatcctcatcgccttctattctaatccatataccaaggttctcattcaaagtccagcgtatcttatttttggatatataatctattctaccacctggcataccattcctatcaaaatgtttcttacgctggtcataaaaaataagacctatagattcagggctgtaagaaaagtaagaggcagtaatataaatattctgttcaggacattttatgccgtcaacacgattagtgtttatcttaagatagtcatcagaatattgcccttttacgctgactgaataaccacccaatatttttacagttcttcctttatgtaaagtttctcctttgactaattttatagtgaaggtggtatcacatttctcacctctccatgttcctatgtaatcgacaacggagacatgtgcgttaatactaacacaagtacataaaacaactaaaaacaaaaatagcttcctcataaataataagcattaacattaaacaaaaaggtgttcctaatggaacaaagatactaagttgaaagcttttcacaacctaccgtggagagtggggctcacgaacacagaagcttcactactttggttcctgaccccaccaaagcattatataattgaatctttttccatcaggcgtaacgttaaaccagatattcttctttatttcaacctctatcttacgatataccgatatagggatagtggcatacggattgaaattcataaaaataaattctacatctgctactttcccggtatccggatctatatacattgttattataagttcttctccttttacacgctgcttttcgtcagaagagaatgcattgttcactattgaacgacatttcggttttgtccatgtttcttcctcaaattcgtttaaaaattcctcttctctactttttttctctcctgtatatctgtttatctgcttggcataaatgtacttgctatccttattataaagattaacaagccctgctccttctgtcacgtcacattggtaagtatacccttcttcataaaaagtcttgtcctgactgtagtaatttgtctgggctgaaagatcaaccataaacaggctgataaatagtaataaaaaaattgttctcatattagcaatcattttttgtttatagacacagaaacctcattacttcggttcctgaccccaccaaagcattatataattgaatttttttccatcaggtgtaatgttaaaccagatattcttctttatttcaacctctatcttacgatataccgatatagggatagtggcatacgggttgaaattcgtaaaaataaattccacatctgctattttcccagtatcaggatctatatacattgttattataagttcctttccctttacacgctgcttttcgtcagaggagaatgcattgttcactattgagcgacatttcggttttgtccatgtttcttcctcaaatttgtttaaaaactcctcttctctacttattttctctcctgtatgtctgtttattagcttgacataaatgtacttgctattcttattataaagattaacaagccctgctccttctgtcacgtcacattggtaagtatacccttcttcataaaaagtcttgtcctgactgtagtaatttgtctgggctgaaagatcaaccataaacaggctgataaatagtaataaaaaaattgttctcatattagcaatctatagttaaaggttgaatatttgagaaattagttacgatattacggttggcatcaggtgttcctaatggaacaaagatactaaattgaaggttattaacaacattatagctacggacaaatcggagaaagacatgaaaatcatgaaaacctttaacaaagtcatcttacttcgaccgaagtaagcacgttgaccgactcgaagtaagcgcttactccgttcgaagtaagcacgcgtatcgttcgaagtaagacgactttattaagaattagtgcaaccagcacgaggccggtgcggtggaagccggtggacataaagttttgggattgccccatcacaacggaaaactctgtccggcagaagtcgacaagcacattaccgagttttatgccggaccaagctgggaccacatggccgctccgggaatggtgaaacaatttgataccatcgtgaagcaacgtggcgtgctactggcaaaaggccgtctgctcggtctgcagttcgataccctgttcactgacgatttgtacatcagaatagcccgtcacgccatcgatatggccgaccgcatcgttcgtgccctgcgtgaaaaaggctacaagttcctcatcgaacccgaaaccaaccagctgtttgtcatcatggaaaacaagcatctggaggaactctcgaagaccatcggggtggaagtctgggaaaaggtagacgagaacacacagccgtgcgtattgccaccagctgggctactcgtgaagaagacgtggatgtgcttatcggtcagctgtaatttctcgaaacaacagacatgatgattgccggaacagcatccggcagcagataaaaataaagagtctcgattatcttctcatcaggagataaagagactcttttcctttgttattgtagaacaggatatagatagttccaaataagatttaactctgcctgcatgtcttggaggtgagctgtgacgacgatgacagcattcttctcaggaaaaaccaagataaattgtccattagcaccatccgcccggaatgcattgttccggcagcgccacatctggtagccatatccctgaagccaatcgctgttctctggtgtcatcttgaacatcttgagcattgctggagttacacccgctggacgggattctacttgtttggtagaggcttcttcaatccatttagatggtacaatttgctccccattccattttcccttctggagtaaaagcagccccatttttgccaaatcttctgttttcagatataggccccatcctccgcaattgattccttgaggactttcttcccaatgaacattagtaagacccaatggttcaaacaagcgtgggcgcaagaaatcaacaattttttcacctgttactttttggcagattgcagaaagcatataggttcctaaactattataggtaaaataagttcccggtttatgcttgattggatagttgaaaaattgcttgatccaatccgtgtcttcactatttcgtattgtatttgtaggatcagtttcatgaccgcagctcatggtgagtagatcctttattgttacgtcggccaaatattgaggtatcttagccggacatttgtcagggaagaaagatatgattttgtctgtcaatttcaatttgccttcagcaatagctagccccacagctgttgaagtaaatgttttactgatagaatttaaaatatgaggtttattctcttctccttcacccatcaatttttcatagtaaacttgaccgttttgtacaatcattacgctatgaatgtcttgacctgccagtctggccgcatcaatatattggttgaatgctgtcctcatttgtggagtagcctttccacgaggaagtttgcttgtactttctgtatcagataatgaactccaagcagaaattggatagacaaggagaaataaaaggagaagtgcagttctaaatattgtattcatcttgtgattaaaatttaagtttgacacagacaaaggtaaataataaaaaaacaatattccgactaattgtgaatgcttttttcgtgcttgaacaaatgaataaacatttgaacatgtcgacaagccatgttacattttatctttctaatattgcaatgttttgaacaatagataattttttaggaaccataaatgaaaaaagatagttattatgaaaaagaattacgcactattaattgtatttttgtttgttactttgtgtatggcttttgcacaacagcccattcggcttcacaagtttcccaatctctcctctgacacttggttctatagggatacctgtaggaatgtggcaggacgttttcctggtttttcaccgtttttcatgatttatcctgataaagcatgtgattctcttcaggctgtatccttaataaaggagctaggacttgaaaaatatgtgcgtacatattccggtagtgtttgtgtgatgaatccgatgggggctgcatatgacaataaagcagacttagatgcttttaaggaatgtctcgaaagaatgcgtatcactacaaacctgaaagttatcggtatcggtaaaggtgcaacatttgtgaacaaggccattgcaactcatgcaggcatgattgcaggaattgtttcgattgatggagataaaggaaagtttgatgcctcttatagtcctgttccagtgtatgtcactggtaaaggtgcatctcaaactgcctctatctatattaaacagaacaaagcgatgcttagcaaaaaagacaaggcctgtgttgtatataaaaacgaaaatgaaccattgcttcaagttgttgtcaacaacaagaaacatacatctttggcagaaacaatcgatgatgcatgggataaattattatgtaagaattatcgttttaataacttcaaacacacttggtatacgggaggatccgttgaaaaatatggtgattttgaactggaaccttatattatgcctgaagaatggggtataactcgtaaggtcatagaaaaggatctgttgggaactggtactttcctgtggtatgagttccatcccgaagctactttgaaagcccctaaaggctctgttcctttactgttgctgcttcatggcaataacaatgacccgcgtactcaggcagagacttctggtttcattgaattatgtgctgaagaaaattttgtagtggcagaattggaatggcagggtaatggttatgcgccaatgggctttgatggtattgaacaggtcgtttatcacatgttgaagacttatcctcagctggatccttcgcgtgtgtatgctgaagggttatctgcaggagctgctacagctactggattaggcatccgaaagtcatatttgtttgcagctgtaggggctcaatcagcagggttaactcccaatcgctatatgttcggttataacggtgaagccatgatgaacgaagtaattcagaaaagaggttttgtagagatgccttatttctcggtaacaggtaaggatgatgaagttgttcctttcgtgacaatggataactgggagaccaatgcttttttctgtgcctggaacgcataccagattatgaacggaatggaaatcagtacaaagccagatttctcattggacccggtatttggaatagaattggaaaatcgtgagactgtgcctactaataaaggtataacaatggaaatgggtgtccaatacaaaggggaaaaacctttgattaaagttgtagtcgtcaatgattatggtcactggaactttaaacccgatgctaaagtcatgtgggatttctttaaacagtatgctagagatcccataactaaaaaattgttttttaagtctgttggtaaatagttgattgtaattttaggtttggaggcgttgtccggtgatggatagcgcctcttttgatataagtatctgttatttggtcttatattcacttggtgaaactccgaattgtttcttgaaacttttcgagaaatgcgataatgtgctgaaacccgtcatgtcagcaatttcggatatcgtgtagattccttccaaaattaattcggcggcacggttcaatttgtaggtcttgaagaaaatacttggattttcgcctgtcaaacctttaactttataataaaacttggtgcgggatatatgcataagttctgtcatgtgtgtgatatctagttcggggtttgaaagttctttttccatcaggcgataaagctctgtcatgaaagcattatcttgtggtgacaagatgttttcttcaatgttgtcggtctgtgtggtcttaccaagcaagttccgtatctttttcctgttcttgagttgtgaattgatcagagcaatcaggtaattcgggtcgaacggtttggttacatatgcatctgcacctgtttccaaccccttcacctgattctcgatggttgatttggctgtgaccagaataacagggatgtggcagagctgtaaatcttccttgatggcacgacagagctggtacccatctttttcgggcatgatgatatcgctcagaatcaagtccggcgcttcttcccgtatgactttcaatgcgctgtctacatcgaaacggcagacaatcctgtaatggggtgataacaatgtttgcaggtaatggacaatttctgtatcatcgtctaccacaagaattgttttctggttcttgtcttcttctgttgagacttgtgaaacatgggctgtatcaaatacgttgatagggaagacctctgtctgattggttaaattatgctctttctcttcagttgtataactgttgtcgtttgtcggcaggatgaaagtaaatttcactccttcctcatcttttagattttcggccttgatgtaaccatgatgtagcttgaccagattatatacgtaatacaatccaattccggtaccccagttgtatgttccctgattgtttgagatttggtaatatcgctcaaaaatcttttctaatttgtcttctggaatatagcttccagaattggttaccgatatcttaatatattgggaatccttgttctctggattcaatctgaatagttttccagcttgttctttggtgatgacatcgaatgtgatattgatatatccacctctcggtgtgaatttcatggcgttcgacaacaaattgtcgaagattttctccatcttgtctgcgtctagccataccagcagtgtatcttcaagtccgtatgtcttcaaggaaatatttttttcttcagaattaattctgaagatatcactttgctttttcagcaaagtgataatatccgtatgcttgactttcagcttcagcgtatcgttttccagcttgtggaaatccatcatctggtttaccagacgtaacatccggttgacactacgctgtactatacaaagcaaattcttgttctcgtccgtgatgtctgcactgttacataactgatagacaggacctgcaatcatagttagcggtgtcctgaactcatgcgatatgttcgtaaagaaactcatattcatccggttaatccgttgttcctgttccatctcgactgcagcatgtcgggcaagcattttttcggtgcggattctcttccaggcgttggcgaataaggctatgatagttaggatgaatgttgtataaatcagataagcccaccaagtagcccaaggtgctggttcgatgatgatagtaatcgcattttcggtttcggcgatactttggtcattgttggtagcttttatcttgaatgtataggttcctgcaggcagattggcatagtaggcttcctggttgtgatgtgaatcaatccaatatttgtcgaatccttccaaggtataatggtaattgacacgtcctgactcagagtagtcaagtgcgctgaaggtgatgctgaatccattctggttatggctgaggcgtataattggattttgcgacaagtgtttttgaatgcattgattttttccgggatgaatcagttggttgtgtactttcaagtcttcgaacaataacgggaccttacgtttgctatgaatatccatcggatcgaataatgtgataccatgagtgcctccaaacgctatggtaccgtcagacagtttgcaggaagaacggtcatagaactggttgcctccaatcccgtcagttgcatagtaattaataatttctccggtcttgttgttgaatttgcttaatccgtaaagtgtactgatccagagattcccttgagcatcctgttcgatggcagaaatgtcggtacaagctgtaccgggaattgattcaatggtattcttgtcgggagagtaatgcaaaagaccatttcctaccgtgccaatccaaatatcgccttgtgcatcggtaaataaatctgttggaatgaaaacagaacgacggatacatctcttgaattcttcgtaaggtagttttgtctcttcaatatttccattttttacatctactaatgtaagtggcttgtttaaagcagcagccaacatcttgtctttgaatggaagaagcccagtggtaaaaatcaatttcagtccacttgctggtgtgttgaaagcttgtatggttttcatttcaagggtttgagtattgatttgatatagttgggtgccta

SEQ ID NO: 1262 - DNA, 22083 bp, synthetic construct
  misc_feature 1..22083: note = Synthetic
  source 1..22083: mol_type = other DNA
tttgaaatctttggtttccttcttttaaaaattgcaatgacttttctggtgtcattgtagcttgtgtttcttttgtatgtgctttcatatattatatttttagttattatttttttaatgtttactacgcgttagcatataagagtaaagaaacatttgttttatctattacactatttatacctctagtagccctatttacacacagtaggttaatgttactttttgttaagtaattagctatgttttgtatggcattgtctccttgctcaaaaacatatgttactgcatttttagagttttgcatatcagttaaattacttcctttttctactacagaaaaagaagttaatggctgctgactgtgcttaattaaatcttgcgtaaattttaaacttagtggttcttcatttttatttaaaactcccaatgctaatgtatctatgggtttaacagcgccatcattagcagctatcataattactcctttgtaatttttaagcacaaagtctgtaatatgatcaccaattacatttatcatcttaggttttctttttcctagaacaataatatctggttgctgttcttctatttgtttagctatttcgtttttaacgtttccaaaagaaaaactatatttaatttttatgttttgtactttagaaattggtttaattatagcactaattatacggtctgtactattgtactgctcattaatagcacgcatagcagacagttggttgtctctaacaactacatcagatgctttttttacatgaaaaaaagatacatctccgtttatcatttttgcaaggttaacagtactttttacagtagatactgttgtcttttttaaatctgataatacaagaattttatatttcttttttaacatagtaattagcttaaactaattttagattttggtcttagtttaaaaaattctataaaactatctgggttctctactatacctcttttagaaattagcttaatatcaatattacgttcttttgctttaaaggcaaaatcttctaatatttcaataatatcatagtctaagtatctagttttagtaacatcaaactctaagtatgtatctcttggcaaactatctaattcttttaaaatagctcctttgttaaagaaagtaacttcttctgcaagagacattttaattttgtgtttaccattactgttatcctctatgtgtaaaaagtgagaattttggtaacttttaagtaaaattacaactataccaacagctaaacctaaacctatacctactagtaaatctgtaaaaacaataccagctactgtaacaaaaaatgggatagactgtttccaacctagtttgtacattttagcaaataatgctggtttagccaacttataacctacaattaataaaattgcagctaatacagataacggaattttattaagtaacgttggtataagtattacagaaattaataacaaaaatccatgtaaaattgcagacatttttgtttttgcgttagactgtatgtttgcagaacttcttacaataacctgtgtaattggcaaaccaccaattaaaccagaaataatattacctgttccttgcgctaataactctctatttgtaggagttacgcttttttctgggtctagtttatctgtagcttctacacacaataaagtttctaaacttgctactaaagctatagtaaaagctgtaacccaaattgcaggattagtaattgctgaaaaattaggaaaactaaactgaccaagaaaagagtcaaaactatctggcacaggcacacttactaaatgcgcaggtgaaattgccaaagcatcattagtttgtgttactacgtaaaatataataccaacagcaacagctactaaaggaccttgtattacttcaaaaaactttccttttttaacaagaacattgctccaaagtaataatatacctaaacttataagacctactactgtaggaccaactgctatattatcaaaaatattaaagatagcagaaaaggtattttcaccagaagcctctataaaactatctgctccttctggttctgcatcatacccaaaaaagtgtgggatttgttttaaaataataatgataccaatacctgttagcatccctttaattactgaagaaggaaagtaatacccaataataccagcttttaaaaacccaaaaaccaattgtattatacctcctaaaacaacggctactaaaaagttttcataacctcctaatgagccaattgcagttagtacaatagctgctaaacctgctgcaggtccactaaccccaactctagagccacttaagcctcctactataataccaccaattataccggcaattaaacctgaaaaaagtggtgctccactagccaatgcaatacctaaacataatggtaatgcaacaaagaatacgacaatactcgctggtaagtcgctttttaaatttttaaacataaacatagtaaattttgcctcttgagcatatttttatcaagagggtattaaaataaattaataataactacactacagtgcgtagttaaagcctaattatactatgtggtactcgggagggggcgaaacaaggttaataagaggtctagggtattttttatctgaatacccttgtttttctctttttaaaacgtaagaaacgtttgtttcagaaaaactgtctacgcttaaatattttttagcgcaattatcttcttcttcagaaatggaataaaaagcagaaatatctacagaatcattcaccatagtaattatggttggcgcagataaaaacgccaagaataatacggtaaaaaatatagaaataatctttttatacatttcttttaataatcagaagtttacaaatataaaaccaaaacgctttatataaaatagctaatccttaaaaaaatgttaacaaaaacatttttaagtaattaaccatatttattctttatataatatacaggtctttaaacctgtatactatttactttcttttatactttttgctatttctaactctgttaaacacataaactcctactacaaatagtgctagtaatggaaatacaatatcacctcccatatttttatttttttttatttttaatgataaaagacacaattgctgccgttaccactcccatagataacgatgtaaatatgccttgtcgtatataattattaatgttaaaatattcttctgcgttttcttgagtcatttttcctgctcctacaatgtactctgtaatgttagaaaaatactcaggagatatgtaaacgtacgtaatgtattgcgtagctggacttaatatagctattactgcacttaaaacaataccgctaataaaaccttccttccaagtaattacacctttataatctgtttgttttttatcttttaaagcaaaaacatatatagcaatagcaactacaccaaacaagttggtatatattaaatgttcactaacttggtctgtatgccatcccaattgtttttctatgtatgcccataaaagtgcaaaaccagtaaagataaaaccccattttatctctgttttaaacttattcataaaagcttattttctatattttgataatgcatttttagtaaaatctgacaatactaacttaccagaaattattgctctttcttttaacaatgcatcccaattttctgttccttgccacaatattgttttcatttcttgcaaggcttctgggttgtatgatgccagtttttctgtaaaaatttcaatttctttatccatttctttaatagagccaaatacttttgcaaacaaacctttgtcttttgcccaatatgcactttgccaatctgtagcagctaaagatagttctgctaaaccacttttaccaactttgcgttctactgccggagcaattacaaatgggccaataccaatagatagttctgataattttatggatgccgcctcagtagcaaaagcataatcacaagctgcagctaaaccaacaccgccaccaacagttttaccttgtacacggccaacaattagttttttgcatttgcgcatggcgttaataacatttgcaaaaccactaaaaaattgttgcccttcatctaagtttgtaacctccattaactcatcaaaagaagctcctgcacaaaaagctttttcaccttcagactttaaaacaataacatttaccgtttggtcttctgataattttaaaatttctttggttaacctatctagcaattctgcaacaaatgaattacttgccggatgaccaaattctactgttgctattttattatctatattggtatataaactaccgtttgctcttgttgtacccataaaaacctttttattgtgtaaaattcaaaattacgttttttgcaagagcggacgaaactttgtgttaaatttaaccaccaatgcaccacctcttattagcatccaaaccacaaaagacaaccaaattcctgtaaagccccaacctaactctttacttaggtataacataggtacaaaacctaaaaaagtagcatctaaaagtgtatctcttaaatatttcatttcacctaagcctttaaataatccatcaaaaacaaaagctacagcattaattggtaaacttaaaattataatataaaaaacagcgtaaaaagtatctaaagcaacttgttcattagaaaaaattttacctatagggtaataaaaaacaaagcctaaaactgccaaaaccaaactaactgttattccatattgaagaatttttttagccaacagccaaaggctattataatctttagcacctaataatttacctcctaaaatattacctgcagcgccataaccatctataaaaaaagcagaaaacaaccacacatttatagctattgtatgtgcgccaataaacctatctcccaagtctgtagcctcccttaccgctaaaaccaatgctatatttaaagataaagcacgtacaaataagtttaaactcataattaccaaacgtcccagctctgggtgtataggaaaacgtagccttaaactaatatctgtttttaaaaccaataagaaaaatgctattattgccataattgcttgtgacagtaaacttgcccaggcagcaccatctaaatacattggttctaaaacgccttgtatgccatacacaaaaatgtaatctaaaaatatatttaatacagccccaattagggctattaccattggccaacttgtattttgcaagcctctaaaaatgcccattactgcaaacgtaaataaggttaaaggaaaaccccaaaccctaataccgtaataagacacgcaaaactctaaaattttaccttttgcctttaaaaacacaaatatttcttctattacaaaaactgtagaaagcagtataataatgctaagtagtatattaaaaaaaatagcttgtacaggtaatgttttaacctcatttaaacggccagctcctaaatactgagaaattatagcagaaatagcacttctggtttgcccaagaatccaaataagcatagataaaaaagaaccaacaatacctgctgctgccaaagactctagcccaaacttaggaatattgccaacaatagctgcatctgtaatagataataatggctctgatatgccagcaattgtagccggtatagctagcttgtttatgtttttaagatttacaattttattcaaaaaaaagtgggttttataaaactagttcaaaacaatgaaaaggatgttcactttgcttaggaaaaaatatatctcctaattgtttgtaacctctggtttggtaaaaatttacatttcgtttgtttacactaaaagtatctaaacgtacagatttaaagtcattatttttagcatattcctctgcaaaattcatcaatttttgtgcataaccttggccttggtattctgggtgcacagatagcctgtgtatgtacaagttagcttcattacttgttagccaggtaataggtatgtactcatcatccatatgtgtagacagtacaatggttcctattatttttttatcaacttctaaaacatataattcttcttgagcaatatcatgtaaaaaagcctgtttacttgggtagtgctcgttccattggtaaataccatttttaatcataaaagctgcacaagcttttgtaacggtaataattttatcaatttctgatttttttgctaaacgaatcatacgaggtataaattaaattgtaaatttagagtataaaatacaactgataaaatgtactagtatttttaattggccattaaccaagccaataatgtgcatatctggtaacctaattaaactgaaaaaagagaaaaatgaagaacatattggttcctataggaacatctacagaaagccatgaaacattacaatatgccgtagattttgctaaaaattttgacgccactatttatgtaatggaaatttttaatgtaaaatctgctggtgccggtagcttagcaaatgctacagataaaattgaaaaaaatagcagagaacaattgttagatgttgttagtaaggttgataaaaaaggaactgaaataaaaatagcaacctaccaaggtgacattattgaaggattaaaaaaaatagacaaacaatttttaggaatagacctaattgttatggctccaagaagtaatgatattaatgagagtaattaccttggcaacacatcaggaaaaattattaaacaaacagatattcctacacttattgtacctaaaggatatgtgtttaaacctgtaacttctatacttacagcttttaaatctggtattttaaaacgaaaaagaatactaaaccctttaattaccattaaaaagcaatttaattgtaccgtaaatttactattggtaaaaactcctggctacacagatgacgacttaaaagtagatactgctcttttagatattagctctaaaatgacactttctgaaaatgctactacctaccttggagtgttagagcactttttaactaaacaaccagatatgctgtgtgtgtttagaagaaaaagaggcttttttaaaaaattatgggagaaaaataccattgcaaaatctgaattttttgctcctgtaccagtattggttttaagtgttaaaaaagactaagctctttttgggggattagctcagctggctagagcgcttgcctggcaggcaagaggtcaccggttcgactccggtattctccacaaaaaataactttattaaaaaacccctttacagtgcgtaaaggggttttttagttgtaggttttgctgtcaaaaaaatagctttttttattattaaataagtttttatattagagctaaaattatactttttaaagtaagcctacccccctaaacttcttaaaaagatgttaacagtaagcataaaaaaagccccgaattggaagtcgaggcggcttaaatgttttcacaacggaataatccttattgtgaattgctttcagtactgtaaatatataaaaagaaaataataaagcaaatacggatttccgtaattgatataataaataaacttttagttttaacaaaaagcatacgaatgaaacaaattttagggttggatttaggaaccaatagcattgggtgggcgttggtaaaaaatgattttgaaaagaaagaaggtactatagacggtcttggagttagaataattcctatgagccaagacatacttggtaagtttgatgcaggccaatcacattcacaaacagcagaaagaactaattacagaggtgtaagaagattatatcagagagataatttacgtagagaacgattacatagagtattaaatatattaggttttctgccaaaacattatgctaactctatagactttgaaaaaaaattaggtcaatttaaaaatgggcttgaaccaaaattagcttataaagttgacgaaaaatcaaagtataactttatttttcaaagttcttttaatgaaatgttggatgattttaaagcgcaatggccaaaccttaaaattccctacgattggacaatatattttcttagaaaaaaggctctatcgaaaaaggtctctaaagaagaattagcttggataattttaaatttcaatcaaaaacgtggttactaccaactgcgtggagaagaagttgatgataaagacaagcaatttgttcaactaaaagtaaaagaagttgttgacactggggagacaattaaaggaaaatcattgtttgatgtgattttcgaaaacggttggaaatatgataaacaaatagtaaaaaccgaagattggatcaatagaacaaaagaatttatagtaactacaaaaacgctcaaaaacggagatataaaaagaacgtataaagctgttgattccgaaaaagattgggctgctataaaagcaaaaaccgaacaggatattgagcgtaccaataaaacggttggcgaattcatttataaaaatttacttgataaacctaaccaaaaaataagaggtaaactcataaaaaccatagagcgtaaattttacaaagaagaatttaaaaaaatattggttaagcaaattgagttacagcctcaactttttaccactgatttatacaaagcttgtattaaggaattatacccaagaaatgaagctcaccaaaatgctataaaaaaccgtgactttgtttatttatttatggatgatattattttttatcaacgtccattaaaaagtcaaaaatctaacatttctggttgtcagttagaacagcgtgtatactttaaaaccaataacgataaagaaaaaacagaagttaaagaagctataaaggcaattcctaaatctcatcctttgtttcaggagtttagaaattggcagtggttacaaaatttaaaaatctacaataaagttgataccgataaaggcgaacttaccgatgtaactgagcaattattaccaaacgaagatagctgggttgacttatttgactttttacaaagtaaaaaagaactagaacaaaatcaattcattaaatattttattgacaaaaagttaatcaataaaactgaaaaagaccacttcagatggaattatgtagaagataaaaaatatccttttgctgaaactagagcacaatttattagccgtttaactaaagtggaaggtgttagtgacattaatatatttttagataaaaaaacacaactgggcaataaagaaaacagcccgcttgtatcaagaatagagcaattatggcacattatttattcggtttcagatattaacgagtacaaatctgccttagaaaagttcgccataaagcatcatttaaatcaagaatcttttgtagccaactttattaagtttccgccttttaaaagcgactatggcagctattccaaaaaagcattaaacaaattgttgcccttaatgcgtagaggtaaatattggaatgaaagtgatattacaaataaagtaaagcaaagggtttctgagattatggaacgtgttaatgcacttaacttaaaagaagattataactctagaaaccttgccgaagctttagcaaatgttagtgatgatgatgtaaaaaaacagcttgttaaaagttttattccgtttacaaataaaaaccctttacaaggcttaaacacatatcaagcaacatatctggtttatggaaggcattccgaaattggcgaaatccaaaattggaaaactccagaagatatagaaatttatcttaaaaactttaaacagcactcgctccgcaaccctattgtagagcaagtagttaccgaaacattgcgagtggttcgagatatttggaaacatcatggcaaaagccaacctaatttttttaatgaaatacacgtggagttggggcgtgaaatgaaaaatccggcaggtaaacgtgaacaaatttcaaaacgaaataacgaaaatgaaaacaccaatcatcgcataagggaagttttaaaagttttaatgaacgattcttctattgagggtaatgtgcgagattattctccaagtcaacaagacatcttaaaaatttatgaagaaggcatataccaaaatccaaaggtagattattcaaaagttagcgaagatgaaatctctaaaattagacgaaataatagccctactcaaaaggaaattcaacgttacagattgtggctagagcaaggctatatttctccatatacaggcaaacctattccgttgtcaaaattatttacgcacgaatatcaaatagaacatattattccgcaatcacgcttttatgacaactcattgagtaataaaattatatgtgaaagcgccgtaaatgaagataaggataataaaactgcatttgaatatttaaaaaacaaaggaggaaatgttatcaatggacataaattactaagtctttcagaatacgaagaccacgttaaccaatactttaaaaccaaccgccaaaaactaaaaaacctattgagtttagatatccctgaagggtttattaataggcaaatgaacgatagccgctacataagtaagctaattaaaggattactgagtaatattgtgcgagaagatgacgaacaagaagccacttctaaaaacttgattcctgtaacaggtgctgtaacctcaaaacttaaaaatgattggggcttaaatgataaatggaacgaactaattttacctaggtttgagcgcttaaaccaattaacacaatccaatgattttacagcaaccaacaccaatggtaataccataccaaccgtaccagataacttgctaaaaggctttagcaaaaagcgtatagatcatcgccaccacgcattagatgctctggtagtggcctgttgtactcgaaatcacagtcattatttaagtgctttaaatactgaaaagaaaaattacggtttacgtgataaattattgattaaaaacaaacaaggcgattacaccaaagcatttcaaatgccatggcaaaatttttcaaccgaagctaaaaaccaactagaacaaacagtaattagttttaaacaaaatttacgggttattaataaagccaacaacaaattttggtcttatacagatgaaaatggtaagttgaaccttgacaaaaatggcaaacctattaaaaaactgcgcaagcagactaaaggtaataattgggcaatacgcaaggcaatgcataaagaaaccgtttctggcaaatacaatattgaaacgcctaaaggaaaaatagctactgcggtaagaggttctttatctgacattaaaaatgaaaaacatttagctaaaataacagaccaacaaattagagaagtaattttacctaatcatttaaaaaattatttagatgaaaaaggaaaaataaaatatgatgttgcttttagtgatgagggaattgaagatttaaacaaaaacattattgctttaaacaacggcaaaaatcatcaacctatacgtaaagttaaattttttgaaataggaagtaaattttctatatctgaaaatgaaaattcagccaagaacaaaaaatacgtagaagctgccaaaggcaccaacctcttttttgcaatatattgggatgaaaaaaagcaaaaaagaaattacgaaaccataccattaaatgaggtaattgcacaccaaaaacaagtagctcatttaccaaaaagtgaacgtttagccatacaacctaacagtaaaaaaggagcatttttatttacgctatcacctaacgatttggtgtatgtaccaacagatgaagaactaaccaataaatatgcaattgatttttgcaatttaaaccaagagcagataaagaggatttataagatggttagttcaagcgggaaccaatgtttctttgtaaaaggtgaagtagctacgagtatttggaacaaaaaagaatattcggctttaaataaaatggaaaaagatattgaaggtaatatgataaaagaaaggtgtgttaaactcaaagtagatagagttggaaatatatctaaagcttagaactatgataaaacgtactcttttttttggcaaccctgcatacctcagtactaaaaatgagcaattggtagttagttttcctgaagatactaaaaaggacaaaaccattgctatagaagatttgggctatgtggtgttagagcacccgcaaattacacttaccaatggcttattgcgcaaactagtacaaaacaaaactgctgtaataacttgcgacagccaacatttgccttgctctttattgcaacctttggtagggcatagtgaacagaccgagcgtatgcgccaccaactaaatgctagcttgcctttaaaaaagaatttatggcagcaaaccataacctataaaataaacaaccaagcaaaccatttgttacagcgccaaaaaaaagcactaaagttaaaacgttgggcaaaagaggttaaaagtggcgatagcggcaatcatgaagctattgctgctgcttattattttcagtctctgtttagtagcattgcaaattttagccgcaaccaaaagggagtaccacctaacaatttactaaactatggctatgccattttacgcgctgttacggctagagccttggtaagctctggtatgttgccaagtgttggtatttttcataaaaataaatacaatgccttttgcctggcagatgacgttatggagccttaccgtatttatgtagatgctttagtgtatagcttggtagaagctggtggcaatattagtgaactaaaccaacaattaaaagcacaattgctaagcatacctgctttagatgtgtatatagatggcaagtatagcccgcttatggtggctatgagccgtactacaaatagtttatatgagtgttttaatggtagtagccgtagaatattatacccagaatatatgtaataatgtttgcagataattttagccgacttaaccaataccgtagtatgtgggtacttgttttttttgatttaccaaccgaaacccgtaaagaccgtaaagcagccagtggttttagaaaaaggttgttagatgatggttttactatgtttcagtttagtatttatttgcgtttttgtgctagcagagaaaatgctgcggtacacataaaacgcacaaagcttaatttacccaagcaaggcaaagtatgtattatgcaaattacagacaaacagtttgggatgatggagctttttcatggcacaaaagaggtaccaccagaacccccaagccaacaactagaacttttttagaacagaaaaaacggggatttaaactactaaaaaccatacaattacagtttattttacaatgctacaaacacgcttaaaaaacagtataccagcattttatagcgggtatactgcgaatcatcaataaaattaatgaactgaaagcaattcacaacgtgcttgtagtaattgcaaagaagaacctaactgcgaatcatcaataaaattaatgaactgaaagcaattcacaacgtcttttccattagtagtaatatctacgctactgcgaatcatcaataaaattaatgaactgaaagcaattcacaacaagatgtggttcctgttcttacattatcagactgcgaatcatcaataaaattaatgaactgaaagcaattcacaacggcacaaacattaatcttaatgatgcttatactgcgaatcatcaataaaattaatgaactgaaagcaattcacaactagacctatactcaaaagtccttttggtttactgcgaatcatcaataaaattaatgaactgaaagcaattcacaacatcctagctcctttagtttttctcttccttactgcgaatcatcaataaaattaatgaactgaaagcaattcacaacgtgctgctaacggcattagcagttaaagttactgcgaatcatcaataaaattaatgaactgaaagcaattcacaacggacgtgaacgccgtaattggtttctttaaactgcgaatcatcaataaaattaatgaactgaaagcaattcacaacattaaaaagagttagttaaatggatgagaactgcgaatcatcaataaaattaatgaactgaaagcaattcacaacgtaaacaaggacattgctaaaacaatggaaactgcgaatcatcaataaaattaatgaactgaaagcaattcacaacacaactaattaacacctttttattattatgactgcgaatcatcaataaaattaatgaactgaaagcaattcacaacggttcttattgggcagaatattatgatgaaactgcgaatcatcaataaaattaatgaactgaaagcaattcacaactaaagtatcagcagacagaccgaaacacaaactgcgaatcatcaataaaattaatgaactgaaagcaattcacaacaggatgattcgttaatattaggtttgcaaaactgcgaatcatcaataaaattaatgaactgaaagcaattcacaacattagtaagcatttctatcaactgctgattactgcgaatcatcaataaaattaatgaactgaaagcaattcacaacttgatggcgtaatagaagcaaccgcttataactgcgaatcatcaataaaattaatgaactgaaagcaattcacaacaaaaacactacttcctattgcataacccgtactgcgaatcatcaataaaattaatgaactgaaagcaattcacaacagtattctctggacaagaatcataaagccaactgcgaatcatcaataaaattaatgaactgaaagcaattcacaactacaaatgctctttgaagctataagagataactgcgaatcatcaataaaattaatgaactgaccgagcgtagcgaccgatgaattcctataaaaaaataacaacaaatatatgaataaagcaattactcactttacatctattttttttaaatgtgttcgtgaagctcagtcttcgctttcacaacttataactcccgccaataatatttttactaaaaatacctataaaattaatgaactgaccgaacgtagcgaccgatgaattcctataaaaaaacaataacaaatatatgaataaagcaattactcactttacatctattttttttttaaatgtgttcgtgaagctcattcttcgctttcacaacttataactcccaccaataatattttttactaaaaatacctgtaaaattaatgaactgaccgagcgatagcgaccgatgaattcctataaaaaataataacaaatatatgaataaagcaattactcactttacatctatttttttaaaatgtgttcgtgaagctcagtcttcgctttcacaacttataactcccgccaataatatttttactaaaaatacctataaagttaatgaactgaccgagcgtagcgaccgatgaattcctataaaaaacattaacaaatatatgaataaagcaattactcacttcttatctatttttttttaaatgtgttcgtgaagctcattcttcgctttcacaacttataactcccaccaatagtatcttttactaaaaatacctgtaaaattaatgaactgaccgagcgtagcgaccgatgaattcctataaaaaacattaacaaaaatatgaataaagcaattactcacttcttatctatttttttaaatgtgttcgtgaagctcattcttcgctttcacaacttataactcccaccaatactatcttttactaaaaatacctgtaaaattaaaaggtaggccaactagtggcttttaaaaactaatgctttgttattaacttctgttgatctctaaaataactaggagtataccccattttacgtttaaaggttctattaaagttagatatgttgttaaacccactatcaaaacaaatttcgtttatagagcgttctgtctctataagtaaccttgctgcgtgccccaagcgcaaatcactaacatagtcagagaatgaagaatttgtactttttttaaaaaaatggctaaatgcagactcagacatatttaccaaacttgccacatcttttaaaggtattttttgatgcagattttctttaatataattgttcactttttctattcttctgcttttatgtattgtataatggtctacataagagtgagatgccaacatttttgtattgcgtgcaatagacaaatcatacaaaatagataaaaaattaagcaaggaatcaaaatcctgagattctgataaacgtaatatttttggttttaaaactgctattgtttctttagaaaataaaatacctcttttagatttttctattaaatctcttataggcaacattaactttctgtttaatgttaattctgataaaaacttttcatgaaactgtacggttaccacatgagcatttgtgtttttgtcttcacccgtccatgcatgtggtgtgttagagccaaccaaaaccaaatcattagctacatactcttgtatagagtctccaataattcttttgcctgacgagtttagcactaaattaagttctaattctggatgaaaatgcacaggaaaatcaaacttagcagaatgatgattaaggacaatgaaaaaatcatcttcagaaataggcactaattctcttaaaatacgcgcttctttattcataatagtatcaaatcaaatttataaaaaacaaggtgtcaattatataaaaatgtaaataaacgactacatttttatcaaattaaataaaaataacttaaaaaataactgttaaacacaaaaaatatgaattaaaatatcaataatacaatccaaaattcatataagtatcactatttaacatcatttacaaaattaatgttaatgatatgttattcttttgtaaacaacttaattactaactaaaaaattcatgaactaatgaaatatgagtttcaaaaaagtatgatttttattgttttcttaattataggctttactggagctgcacaaattaaggtaaccggaacagtaaaatctaacgacggtgttcctctacttggtgttaccattatggagcagggttctagcacaaacggaaccactacagattttgacggaaactttgctattgaagttgatagtcctaaagatgtacttgtaatatcttacattggctttattactaaaacgatttcgataccagaaaacaacattgtaaacgtacagttagttgaagatttagaacaattatctgaggtggtagttgttggttatggctctgtaaaaaagagcgaccttaccgggtctgttacttctgtagaaatggacaacataccatctaaacctgccaactctatagacggtttattacaagggcaagttgccggtgtgcaagtaactacaccatcagacaaccctggtgctggcgcagttataagaattagaggtggtagctctttacgtggtggtaatgatccgcttgtggttgtagacggtttccctattggatatgccggagatttaaaacaaatatcgccacaagatattgcctctatggaagtacttaaagatgcttctgctgctgcaatttatggttctagaggtgcaaatggtgtaattatgattacaactaaaaaaggtgccaaacataccacagaggttaccgtgtctcagcaaaatacatatgctagttttacgtctgatttaaacctgtggagagatcctgttttaatggcagaattaagtaacgaaagcagaattaatggtggttttacccctatttacattggtgctaaagatgcaaatggcgtttactacccttctgttaatgaacttaaaaatggcaattgggcttacaatacacgttgggatgatattgtttttcgtgaccccgtatctaacaacacaaatgttgctgtacgtagccaaacagaccgtacacagtttagcctaagtacaacatattataccaatgagggtgtttatattaatgatgattatgaaaaactaaacattaacttaaatgtaattcataaaatttatgatgataaggttaccattggtggtaacattatttactctaaaggaaaccaaaataacaatggtggtttagcctactggcgtaaccctatttttcctatttatgaagatggcaatcctattaatgattactttttagcaggttctcaagactactctcaccctattgcattaacagaaaacagaaccaataaaaacaaatttttagactttattggctctgcttttattgaggtagattttactaaaaatttaaaacttaaaacccaagtaaaccataaatttgggcgttctattacagattactacaacccaaaaatttatacagaagacggcacctttaataatggttctggtggtattaacaattgggaaagtagtgaaaccgttgcagaaacttttttaacatacaacaattcatttaataacatacacaactttactgcaatgggtggtttctcttaccaagggtatgaggccagaacatctgacctaaaagcgtatgattttttaaatgaatctttaggcaatggtaaccttgctgctggtaacccagaaaagcaatctgttgccaatagcctttctgaaaccgttatgtactctggtcttgggcgtctaaattattcttatgacgacaagtatttggtaacttttacgatgcgtacagacggctcatctaaatttggagaaaacaaccaatgggctatgttcccctctggagccttaggttggaaaatgcataaagaagattttatacgtaatttaaatgtttttgatgaacttaaactacgtgctagttatggtatatctggtaaccaaggtatttctccttacttaattaatagtaggtacggacaagaccaatactatgttaatggccgttggcaaacaacaattggccctggttatgtagttgggcaagatagtcaaagtggtaaaaaaacgtggggaggtattcctaatccagatttaaaatgggaaactacagagcaatttaacattggtgcagattttgccttttttaataacagattaaaagttactgcagattactacaaaaaacatacgtcagacttattacgcgagcgtttgctttccccttcttcttcttatgataaaatgtgggttaatgatggcgaaatagaaaaccaaggtgtagaggttacattagatggtactatggttaacaaagaagactggggcttaaacggtatgtttattttctctagaaacaaaaacaaagttgttagtcttggtaatgctgtttcttctggtttaaatactgatgctttaactggtattaaatatgagttttcaggcagccaagtagaagctttccgtgctataccaaacatactagctgttgggcaaccaataaatgtattttatggttataaagtagatggcattatacagtctgaggccgaaggcttagcagcaggtttacaaggcaacttagcgcaaccaggagagtttaaatatgtagacttaaatgaagatggtgttatagatgaaaatgaccgtactataattggtaatcctaatccagattttacagctagtttaaaccttaatggccgttacaaaaactttgatttttctttattctttaacggtagttttggtcaagatatttttaacacaaaagcatttagtgagccaggaaacataccattacgctggacgcaagacaacactacaaacaactacccaagcttaagagacggacgcacactttatatgtctgactggtttatagaaaaaggaagctttgtacgcttacaaaacgtttctattggctataacataaaaaacttaaacactgcttggtttaaaaaaggtagaatttttatgaacggaaccaacctattcaccataacagattttaatggttatgacccagaattaggtggagacggtatttattggggtggttaccctaagttaagaaactggactttaggtgtagagttaaccttttaaattcagttaaaaatgaaaacatttacaataataaacgaattgaaaatgaagcaatttaaaaaattaatagtggcacttactcttgtagtaggtggtacttcttgcgaaggtttagacgtagagcctactggtttttattctgatgaaaacttttacaagactattgaagatgcagaggcgtctattttatatgcttatgatgcactaacattagtgagttacgctcctgttacgtattactttacagaattagcgtcagacaactgcattgttaaagcagatgaaggtgcagatgcacaggcatttgtaaattgggaggtaacagctcaaaaccaattactaacacagtattacagatctatatatattgctgtaaaccgtgccaatgcggttatagaaaatatagaaggcaaaggctttaacccagaagatgaaaaacgcattttaggagaagctttgtttttaagagcttacaaccactttaacgctgtaaaagcctttggtttagcccctttacaaaaatctctaatagataagttagatgaaaccacagctacactgcctgcagatatgcaagaagtttacacctttttaatagacgatttaactagagcaatagacaacttagaggtaaacagagttactggtcgtgcggataaagttgctgcacaagcactgctttctaaagtgtacttatttgctgcttctgctaaagaaagtggtgttcctaagtacaatactattacagaaagtgtagacaatttatatgctaaagcagcagattatgcaggtatggttctaaacaaccaaggagaatatagtcacgatactgatctacaaaatatttataatgttgactctcctaacggacctgaacatatttttatattatcgttagataggtctggcacagaagaaggagattactctaaattatctaaatactttattccttatatagatggtgcaacagtttatctaaaaaatacaaatggcactttttctccaacacatgacgggtggagcgtttttcagactacagataaattatttacttcttatgaaacagaagacaaacgtaaaacagatttgtttgtttctgaaatatacaaccaagatggtgttgctgtaggttctgttgcagatggcactgtaatttatccgtttacaagaaaatacgtagatcctttatttgaaggcgataaaacaagtacaagaccatacttaattcgttactcagacatacaattggtttatgcagaagctactgctaatgcagatggtttagcacaatacaatcaaattagaagcagagcaaacgctacagagctagctagtattggtggtttatctaaggcagactttagaaaactagttgtagaagaacgccaaagagaacttgcttacgaaggtgaccgcctatgggatcttagacgtacaaacacagtacaaagcaatgtaaccaatgccgctggtttatctccagaagcagttgctttttatcctattccacaacgtgaaatagacttaaaccctaacatcaactaaactaaagcgcaatgaaaaaattaaataacatatattttatagtgctggcactattttttgtggcctgtacagaaaatcctctagaagatgtagagggcacagattggcaaaaagaacgcaacgtggtttctattttagttgaaggtcaaataggtacagctattatagaacgtaattttgatgatgctaaaattaaaatttatgcaaaaacagaaaatatagcagatttatctaaggtagaaattaaaaatattgagctttcatatggtgcaacttctgcaaatgaaaagggcacaacattagatttaagttctggtacagctacaattgctgtaacagctggggctggcgaaaccctaaattgggaagttacattactaccatttaagtctgacctagaaggcacttggtacattggtgatgtacgtatgtattgtgatatgtttacctgggagagctggggctgggaa

SEQ ID NO: 1263 - DNA, 21840 bp, synthetic construct
  misc_feature 1..21840: note = Synthetic
  source 1..21840: mol_type = other DNA
aagattctgttcgctaaagacaggttcatctgccccaacccaagcttctaacgagcatgggcatttgttgataattcttttcatattacaataaatattatgtagtggctccattgcctcatacataacataacagataaagtgtcagacaaattaccctctcatcatcataatatcagacctcagttcgatatattctttgtacttttccgggttgttcacgtaatcaatcacacgagatatggccatatcagcctgtttctgccggactttggtgtagtatcgtataactccttttgatttgtctgagtggcctaagcagtagtctattatcccgtcaggaatacctatttcagaggcgtactgagcgaaagacttgcgggccgaataaaatgtaacacgttcatcaatatttaactcttcagccaaatctccaagagaatacgtaacatactgagaaaagttgtgatatgtgaatttatacccaaaatcaagtttccccgtccttttatccatccacctgcatattatctctcttgcttgagacggtattgtaaatgtgattacactatccgactgcattcgccctttagtctttgagcgtgaatattccaatacatcttttctaaagtctgtttgcataatgtctataagattcatccctcccaggtaaaaggaaaggcaaaaaaggtcacgtgccataatcagctttcttttttctggtgaagattcacgaatcttgttaaaactctgtactgtcaaatcaagcttcctgataggggctgcagatattcttgttgttacaaaaggatgtatatcgtaagatatattccactctcttatcgctctgttgatgacagatttcatctgggcgagcattgtgtttactgtggtttcagtcacttttcgcttccgtatgaatgcagcaaaattctggactagtgatggggttaaatctgagagaagtatgtcacctcttgcaaagtcacgaaaatacctccccaccctttcaatagacaatgcgtatgaatctcttccctcagacttgagatagtctacaaaattgctacatgctgatgaaaaggtttgctcatcggaaagattgtctgtagaaatgatttctttaatttgccggcaggaataaagttcaagatgttttattgagtccagtttctcttgaaggtcatcaaggatgttcctaagtttccggtttatcgcagatgcctctggatgcttcacgacctgaccgttcttaaactggttctctgaaataatgaatcgtgtgacgatatatgttgtttcatgcttgtgacggagtgcaattcttatcttatgtcttccgtcttttaatgcttttgccttgaaaatggtaagtgatagagttgccataatgattaaaaaatttaaggatactccagggatactcacagaattgtaaatttacaattcaaatccttttttttaatcatcgtaataagcagtagaaaatagaaaaaccgcctaattcacaatgtaataagcggttttaagtcggagccgaaagcgggactcgaacccgcgacttactcattacgaatgagttactctaccaactgagttatttcggcaacgtgtttcgttgaaaacggttgcaaaattactcttttcttgaaacctgccaaataaaaaagagatttttttccgaaaaactacatttttccggcccgtacaacccgtttccgttacatcacaagagcatttgacacattattacgtgtaatttgtacaatagtcccttgtctgccttctgccgattttctacttttacccgcaaaatgaaacattacactaccatgaaaaagaaactgataatttcactgctggcactggcttcgctgggagccggagcacaaaacttgcaaaagggagactacggatacttgtactgccacatgagcggacgaggagaatggacggcctacgccctgagccgtgacggcgtacactttcacgacctgattgatggcgaccccgtatacaatgtagaagaaatgtcaaaaatagagggaggagcacgcgatgcctttatctgccgtacgtccgacggaaagggctacctgatggtgactaccgacatgagcaacgccaagagccgctcgtggttcaactacggcatcaacctgctgaaaagtgacgacctgattcactggacttctaccaccttcgacttccgccagggaccggacattttctgtgaccctcagtcgcccgacgtctataaggactacagcaccatcaaacgcgtatgggcaccgcaaattttctgggacccttcgtacgtatgggccgatggcatgaagggcggatacatgatatactattcactgcttaatccggcagaagaccagtacgaccgcgtgttctattcctatgccgacgccacctttacacgtctcactaaaccccgcctgctggtggactggggatatgctaccatcgatgccgacattaactatgtgccggccgacggactctatcacatgctcatcaagaaagaaggaggtacacccggcatctttgccgctacagctacaaaactgaccggtccttataaaataaaagatgaaaacgactatgtgaagtttgaaggcaacaaaaagtgtgagggctgctctgccttccagttggtgggcgactctacctggcgcgtggcctacatcgaatactcctccaagcccaaaagatatcgcatctgccaggccgatgaaaaactcgccaacttccactcccccgtcaccatggagggcgtgaaacatccgcagcacggctcgttcatgcgactcaccgaagaagaatacaagcgcctgcaagagtggtcggacagcatcatgcgcgaaagagccgcccgaaacagcggagaaaagaaataaaaagaggaaaatgaaatatttttgtaaaaacttttggcaaacatcctttcatttgagcagaaaacattatctttgcactccgaattatgacgtgacaaaagagtttgatgtattactgtataacacatagtaaaaagaataagcgcacattcggagttccggcggaatggacaaatgccggaagctatttcttttttcttttatgtcacttatttcctgaatatttaagatttcctattttttcaaacacccggaactgcttttcggcaagtccgggcgttttttcgtatatacgagagtagaatagaaaaaatacaagatataaagattattagtaacaaggtaatgagaaatgtaacattgatcctcgacgacgggagccgctttcatggcaagtcgttcggctatgagaaaccggtagccggtgaagtagttttcaatacggcaatgaccggataccccgaaagcttgaccgacccttcgtatgccggtcagttgatgacactgacttacccgctggtaggtaactatggtgtgcctcccttcacattcgaagcaaacggactacccactttcatggaaagcgagaaaatccatgccgaagcgattatcgtaagcgattacagtgaaaaatactctcactggaatgcagtggaaagtctgggcgactggttgaaacgcgaacagattccgggcatcacgggcatcgacacacgcgaactgacaaaggtattgcgcgagcatggagtgatgatgggaaaaatcgtgttcgacgatgagccggacaacattcccgaagctacctatgcaggtgtgaactacgtagacaaggtttcttgcaaggaagtgattcgctacaacgaaggcgaaggcaagaaaaaagtagtactggtagactgcggcgtgaaatcaaacattatccgttacctgctcaagcgcgacgtggaaatcatccgcgtgccttggaactacgacttcaactctctgcagttcgacggtctgttcatctccaacggtccgggcgaccctgacacctgcgatgcagccgtgcagaacatccgcaaggccatgcagaacgaaaaacttcctatcttcggtatctgtatgggtaaccagttgctttcaaaggcaggaggtgccaaaatctacaaactgaaatacggtcaccgcagccataaccagccggtacgcatggtaggcacggaaaagtgcttcatcacctcacagaaccacggttatgccgtagacaacaacacactgggagccgactgggaaccgctcttcatcaacatgaacgacggttcgaacgaaggtatccgtcacaaaaagaacccctggttctcggctcagttccatccggaagctgccagcggtcctaccgacacggaattcctgttcgatgagtttgtaaagttgctgtaatccactaaaaaacaaagaagacaatgaaagaaaacataaagaaagtattgctgttaggttcaggagccctgaaaatcggtgaagctggtgaattcgactactctggttcgcaggctctgaaagcgctgaaggaagaaggtatcgaaaccatcctgattaacccgaacatcgccaccgtgcagacttcggaaggtgtggcagacaaaatctacttcttgcccgttactccgtatttcgtagaaaaggtcatcgacaaggaacgtcccgacggcgtgctgctgtcattcggtggacagactgccttgaactgcggtgtggctctctacaaagccggtgtgttcgagaaatacaacacccgcgtactgggtactccggtacaggccatcatggatacggaagaccgtgagctcttcgtacagaaactggacgaaatcaacgtgaagaccatcaagagtgaggcggtagaaaacatcgaagatgcccgccgtgcagcgaaggaactgggttatccggtcatcatccgtgcagcttacgcactgggaggtctgggttcaggtttctgcgacaacgaagaagaactgaacgtgctggccgaaaaagcgttctctttctctccgcaggtgctggtagaaaagagtctgaaaggctggaaggaagtggaatacgaagtagtgcgcgaccgtttcgacaactgtatcacggtctgcaacatggaaaacttcgacccgctgggtatccacaccggtgagtctatcgttatcgctccgtcacagacgctgaccaacagcgaataccacaaactgcgcgaactggccatccgtatcatccgtcacatcggtatcgtgggtgaatgtaacgtacagtacgcgttcgaccctgaatcagaagactaccgcgtaatcgaggtaaatgcccgtctgagccgttcttctgcactggcatctaaggctacaggttatcctctggctttcgttgcagctaagttgggattgggttacggactgttcgacctgaagaactcggtaacaaaaacaacttctgccttcttcgagccggcactggactactgcgtatgtaaaattcctcgctgggacttgggtaagttccacggcgtagaccgcgaactgggctccagcatgaagtcggtaggtgaagtcatggccatcggacgtaccttcgaagaagccatccagaaaggtcttcgtatgattggtcagggcatgcacggtttcgtggaaaacaaggagctggttatcgaagacatcgacaaagcactgcgcgaaccgaccgacaagcgtatcttcgtcatctcaaaggctatgcgtgcaggctacacagtagaccaaattcacgacctcaccaagattgacaagtggttcctcgacaagctgatgaacatcatgcagacttctaaggaactccacgagtggggcaacaaccatacacagctttcacagcttccgaacgagctgctctacaaagcaaaacgtcagggattctctgacttccaggtggcacgtgccatcggctacgaaggcgatatggaagacggtatcctggaagttcgtaaccaccgcaagagcgtaggcatcgtgccggtagtaaaacagattgacacgctggcagccgaatatccggcacagaccaactacctgtacctgacttacagcggcgtggccaacgatgtacactacctgggcgaccacaagagtatcgttgtactgggttcaggtgcttaccgtatcggttcatccgtagagttcgactggtgcggcgtgcaggcactgaacaccatccgcaaggaaggctaccgctcagtaatgatcaactacaaccctgaaaccgtatcgaccgactacgatatgtgcgaccgtctgtacttcgacgaactgactttcgaacgtgtgatggatatcctcgacctggaaaacccgcacggagtcatcgtatctaccggcggacagattccgaacaacctggcattgcgcctggatgcacagaaggtaaacatcctaggaacttctgccaagagcatcgacaacgctgaagaccgcgacaagttctcggctatgctcgaccgtatcggcgtagaccagcctgaatggagcgcactgacttcaatggaagacatcaacgcatttatcgaaaaggtaggcttccctgtattggttcgtccgtcatacgtgctttctggtgcagccatgaacgtatgttctaaccaggaagagctggaacgcttcctgcagctggccgctaacgtatcgaagaaacatccggtagtagtaagccagttcatcgaacacgccaaggaagtagaaatggatgccgtggcacagaacggtgaaatcgtagcttacgccatctctgaacacatcgaatttgccggtgtacactcaggtgacgctaccatccagttcccgccgcagaaactgtacgtagaaaccgtacgtcgcatcaagcgtatctctcgtcagattgcgaaagagctgaacatctctggtccgttcaacatccagttcctggctcgtgaaaacgacatcaaggtaatcgaatgtaacctgcgtgccagccgttcgttcccgttcgtcagcaaggtgctgaagattaacttcatcgaactggctaccaaagtcatgttaggcttgccggtagaaaagcctgaaaagaacctcttcgacctcgactacgtaggtatcaaggccagccagttctcgttcaaccgtttgcagaaggccgaccctgtgctgggtgtagacatggcttctacaggtgaagttggctgtatcggcgacgatacttcatgtgccgtactgaaagccatgctgtctgtaggctaccgcattccggaaaagaacgtcctgatgtctaccggtacactgaaacagaaagtagatttgctgcaggcagcgcgcgccctcaaggccaaaggttacaacatcttcgctaccggcggttcttctaagttcctggcagaaaacggagtggaaaacacccgcgtatactggccaagcgaagaaggtcagcctcaggcacttgaaatgctgcacaagaaagaaatcgacatggtggtaaacattccgcgtgacctcactcctaccgagttggaaaacggatacaagatccgccgtgccgcagtcgacctgaacattcctctggtaaccaatgcccgtctggcaagtgcattcatcaatgccttctgctctatgagcattgacgacatcgctatcaagagctgggacgaatacaaataatccgtaccgcttaaaaatatagataaaattaatcccctccggaactatttgtaatgaatgagttctggaggggattttttatttatagaaaaataagacaataaaaaagcccaccgataaaggacgatgggcaagcgcctaaatgttttcacaacggaataatccttattgtgatttgcttcattttagttttacaaaaataaaaagaaacaacacaaaagacaagttttttcataaaaaattagtagttttgagaaaattgaaaatacaactatgaaacatattttaggtttagacttaggcacaaacagtataggatgggcagttatcaattcaaactttgacgaagcaacccaaaaagaacaactaaaaggtatagaggcagcaggaagcagaataattcctatggatgccgcccaattaggagacttcaataaaggaaattcagtttcacaaacagccaaccgtactcaataccgcagtacccggcgattatatgagcgaaaaaaacttcgcagagaaaggctgcaccgcgtattgcaactattgggcttcctcccatcccattacgctggccaattagaccgatatggaaaatttatagctaactcagagccaaagttagcttgggaaaaaggcgcaaataatttatcctactttatctttcaggaatcttttcaggaaatgctgaaagacttttcacaagaagatagatgtactaaaaaagtaccgtatgactggacattattctatctacgcaaaaaagcccttacacaaaaaatagagaaagaagaattagcctggattcttctaaatttcaaccaaaaaagaggatactaccaattacgggaagaagaagctgaaaagtccacttccaaaacacgacaatattttgacagccaaattgtaatagacatcgttgacacagaagaaacttataaaggattaaaaatatttaccctcactctagcaaatggagaaaaaggtaaatggtatgggaaaaacatacccgattggaaaggtcaaaagaaagaaatcattgtaagcatagacctggataaaaatgggaatgacaaatgtgatgagaacggagaacctgtcagacactttaaaattcccacagaaaaggaatgggaagaacaatggggacttgtcaaagctaaaaccgaaaaggacctgaacacttctaaaaagacagtaggcacttatatttacgatacattattacgaacccccgaccaaaaaattcggggtaaactcattcgcaccattgaacgtaagtattacaaagatgaactctatcaaatactaacgacacaagaaaagtttcaccccgaactaagagatggaaacctgttacagtcttgtattgaagagttgtatcacaacaacgaagcacatcgcaatacaatttctaaatatagtatgtccaaattactcgttgaggatgtcatattctaccaacgtccactgaaaagcaagaaatcactcatcagcaactgcccgtatgaagagcatacttatgtagataaggaaacaggggaaatccatacagcttctgtaaaatgtattgctaaatctcatcctctttttcaagaattccgtctttggcagtttctgtccaatttacgaatatatcaaaaagaaggaatcctcaatggtaagttcaccactgacatagatgtaaccaatgaatttctgaaaaatgcagacgattatacgaatcttttcgactggctcaatcaaaagaaagaaatcaaacaagatgcatttctcagatatccgccatttggattaaagaaaaatgtggcaaattatcgctggaattatgtggaggataaaacatatccttgtaatgagacacattctaggatattgctctattgggagaaagcaggtatagatcaatcgattctgaccaccgatatagaagaaaaactctggcatatcttatattctatttcagataaaaatgagctccagaaagcactgaaacattttgctgataaaaacaagttagaagataaatttgcagatattttccaacaaataccaccattcaagaaagactatggttcctactctgccaaagccatcaaaaaactgcttcctcttatgcgaatgggaaaatactggcatctagaatcaatagataatgcaaccctcacccgcatccatcaaattctgaacggagaaatggacgaagcaacggcaagcagaataaaagaaaaatacatccatttagataacttctcttcatttcagggacttcctacatggttggcatgctatatcgtatataatcggcactctgaaataaaagacatcacgaaatggaagcaaccttcagacattgatgcttacatacaatcgttcaagtagcattcactgcacaaccctatcgtggagcagattataatggaaactttacgtactgtacgcgatatatggaaacaaatagggcatatcgatgagattcatgtcgaattaggacgtgagatgaagaatcctgccgacaaacgtaaaaaactcacccggcaaatacaagaaaacgaaaataccaatctgcgcatcaaggcacttctcactgagtttgcaaatccggagtttgaaatcgaaaatgtacgtcctcactctcccagccaacaagatttattacgcatatatgaagaagaggtcttaaacgaatcagctaaaaatatgccagaagatatagtcactatactaaaaaaattcaatgagacagatgcaaaaaaacgtccgtctacttctgatgtattacgctacaaatgctggctggaacagaaatatcgctcaccttatacgggagccatgattccattgggtaaattattcactcctgcctacgaaattgagcatgtcattccaaaatctcgttactttgacgattcattcacaaacaaggttatttgcgagacagcagtaaacaaattaaaagacaacatgttaggttatgagtttataaagaatcattccggacaaataatagaactaggctttggacaaaaaatacaaatacaaaccgtagaagcctatgagcaatttgtaaaagaacactactcatacaatcctgttaaaatgaagaaactattgatggaagatattccagaacaattcatccagcgtcagttaaacgacagtcgttacatcagcaagtttattaaatcactattatctaacattgtccgtgaagaaggagaatctgaggccacttccaagaatattattgtttgtaatggaagtattaccgaccgtctgaaaaaagactggggggttaatgatgtatggaataaaattattctacctcgtttcttgcggttaaatgaaattacgaacagtgaccactttaccacaaccaataccaacaataagataatccccaccatgccattagcattacaaaagggattcaacaaaaagcgtattgaccatcgccatcataccatggatgccattgtcatagcctgtgccaatcgcaatatagtcaattatctgaataacgaatcagccagcaaaaatgcaaaaatctcacgtatggatttacgtcagattttatgtaaaaagacagaacctgacgcattagggaattatcaatggataataaacaaaccgtgggaaacatttacccaagatgtttatgcagttctagcaaatatcattatcagtttcaagcaaaatttacgcatcatcaataaaacaaccaaccattatttccgttatcaaaacgggaagaaagtacaatgtgtacaagaaaaaggagacaattgggctatccgtaaacccatgcacagagaaacattctatggagaaattaacttacgtaaagtaaacactgtgtcactgaaagtagcgctagaaaatccacagagaattgtagaaaaagatttaaagaaaaaaataaaagaattattgcaacaaggactcagcgaaaagcaaatcaaaaaatattttgaagaaaacaatgatatttggcaagatgtaaacctgaagaaaatccaattctattctttcacaaaagaaagaaaagaacgcttttttgcaagccgtgaatctatagatacaagtttcaatcaaaagaaaattgaaaagcaagtttccgatacaggtattcaacaaattctattacgtcacttaaggcaaaataataacgatccaaacctagcattttcccctgagggtattgaatggatgaacaaaaacattatatccttaaacaatggcaaatggcatcaacctatatataaggtaagaatatacaaacaagctacaaagtttgcaataggacaaactggcaataaaaccacacaattcgtagaagcagcacaaaatacaaacttattttttgccatatacgaaacagagcacaaccgcagtttcgcctctgttccattaaatgtggtcattgaacggctgaaaaaaggattgccaccgacacctgaagacagtaaagggaatccgcctaaatatgtattgtctcctaatgatttagtctatgttccaacaaaagaagaaatggaaaatagacatattaatcaacccatacaaaaagatagaatttataagatggtaagttgtactgaaggggaatgtcatttcattccatatttcgttgcaaagcccataattcaaactattgagttgggaagtaataacaaagcacaaaaatcttggcaagatgaaatgataaaagaaacatgcattcctatcaaaacagatagactaggaaatattataacgttaattagcctatgataaagaaaacaatgtattttggcaaccctgcatacttatctttacgtaatgcccaacttgtcataaaacttccggaagtggagaaatgttcttcacttccagaagcgatgaaacgtcaatctgaaataaccaaacctattgaagatataggggttgttattttggataataaacaaatcaccattacttccggagcaattgaagcattgcttgaaaataattgtgcacttattacttgtgacagtaaaagtatgcctgtagggttaatgcttcctctctatggaaacactacccaaaacgagcgttttcggaaacaactagatgcttctttgcctttaaagaaacaattatggcaacaaaccattcaagcaaaaatcaataatcaagcatcttccttagccttatgtacaaacgaagatataaaatgtatgcgtatatgggctaacgatgtacgaagtggagaccccgacaacctggaagcacgtgctgcagctttctactggaaaacacttttccatgatatcgaaaactttacaaggggccgagatggcatacctcctaataatcttttaaattatggttatgctattctccgtgcagttatcgcacgttctcttgtaacaagcggattattacccacattaggcattcaccatcataaccgatacaatgcctattgcttagcagacgatataatggaaccttatcgcccgttcatagaccgactggtctatcaactatactctgaaaacaaaatggaacttacaaaagaagtaaaagccagtttattatccatccccacaatagatgtcagaatcagtgggaaaagaagtcctcttatgatagcagcaagcctaacaacggcatcactatataaatgcttttctggagaatcacgaaaaatcatttatcctgaattttaatggaacgtttcagcgaatatagagttatgtggattttagttctttttgatctaccaacagaaacaaagaaagacaaaaaagcttatactgattttcgcaaaaatctacaaaaagatggattcacaatgtttcaattctctatctatgtacgccattgtgcaagtagtgaaaatgcagctgtgcatataaaaagagtaaaatcctttctacctgaatatggtcaagttggaattatatgtatcacagacaaacaatttggagaaattgaactattttatggcaagaaagcaagtgggataaaaacaccaggacaacaattagaactcttttaaaataataaatcccatggttaatatgggacttattacttcaagaaacaacttttactttttctaaatttacttataaccaactgatagacaacaagaaacaaccaataagttgtttccaatggttcaaagatactaaaatgaaagcaaatcacaactggactgaaaaggatgtatgggactacttggttgtttccaatggttcaaagatactaaaatgaaagcaaatcacaaccgacgagcagaaaaaacgggtggaagtctgttgtttccaatggttcaaagatactaaaatgaaagcaaatcacaaccagtggtataaggttcttccgcagcagattgttgtttccaatggttcaaagatactaaaatgaaagcaaatcacaacaatatttgtcccgcattccttcaaatggagttgtttccaatggttcaaagatactaaaatgaaagcaaatcacaacagaatttacaaatcccataaagtagactcgttgtttccaatggttcaaagatactaaaatgaaagcaaatcacaactttcttcccaattttgcatcaaaacagcaaattgtttccaatggttcgaagatactaaaagtttttctacatttaaatatcatttgtccctaaaataacacataaaaaactgcctccacaccagagtgttggagacagactttcttcattaataaaacctataattaatcaaccaaagggaacataaagccttttccgtcattatcatcaaacttagcttttgaaggaagaggcagatgtttggcattgttgctgaaatcccagagcatggtttcgtcctcggtgatttctcctgtgtcaaggttgcgtttctttccgttcaacggataatacagcaccagattctcgtcacttccgtctaccgttttccacatgaactgcttcaactgctgaggtgtgcgggccgtcttccagaaacggatttcacgaaccagctcgttcgcaccgccaatccagaaacctaccagaccgtaaggccctgtacggatttcacggtcggccaccaattccccattcacatatacgtaatttttcttaccgtcgtacacgaaagctatcatgtaccaggtgtcgggctgcgctgtaaagacatccgccggcacgtcaatctgagaaccaccagtcttaaactgaagttggtcgggacggatagtcacgtcaccgaagcgaggatagatttcatcgagtgcaccggacccagacacgagtttggtaccacagatggaacggttgttgctctggtatgcactacggttcaccataacctccatcgtccactggtccaccttgaaatcgtccgggaacatcttggcatcttcactgccgtatccgtcaatgcgaagacacttcgtcttgatgcgctgctccagtacaatcagtgactcagattcactgtcaatcacgggtaccgtaccgcccctcagttttaccggcaaggcgtagcttccctgcaaggagaatttcacatccttgaactttaccggcagatattgcagtgtctgcttggagttgaacaccacttccttgcccacctcatacatttcgggcggaagcatcaggtaatccgttccgtgcttcttgttgtatgcttccagctgctccttgttgccggcctctaccgtcaccgtcttagtatcattttcctgctgtaccagtgatacggtgatagacttcacgtcgacttcctttccttcttccacgaatacctgagaagattcgccagtcttgatgtaagccccctgtgccgaccggtactcactggttgcatccttgtataattcattctggcaggaacaaatcagcaaggttcctgcgaatatgctgaaatataaattctttttcataattcaaattttaatctaacttacccggataaaccacatttcccaagcgcaaggcttctctgagccatttgtaaggaggtgtatttccatagtcgtattccatgtgatacgtaccgatgccaccgatgcgtctgccgtcgggaaggtccagcgtggcataatcaaaaatctgacgcccttccggataagcattgatttccggacgtacgctggtgtaattatctactccacctgtctgccagccttgctcaaactctacggtgataatggtcttccgctcccagttttcaaggtgaggctgattgattttcctaagaacctgctcggtggaacgttcccagtacgcctgataaatatagtggtcgatgtacttggaagcctcggtagaaagtttctcaggctgaccgtccattaccagcattctgccggccggacgcaaacggtctgaaagggttttgataaatacgaacatgttcgtattgcccgaattttcgctgataatctccccgttagccatcgaacctgaatgaccatagccaggttcgtagtctatgtcgaaaccatccagattatacttttcaatcgtatcgcagatggcatttacataagccttcacaccttccacaaaattaccacctcccttttccacaatccagtaattcttcgggtcttgtcccggaggagtcatctggtcgcccaggtcctgtacaatccaacacagcagcgcttttcctcccttgatttcctggaaaaacttcaagtcttttttctgctcttccgaaaggtttcctcgcgtaccccacaaggatacgaagtctacgctgtcgggtagcatcttcaggtagttctgtgcattgctgcctcgtccggtccagttgccgaaccagccgaaccccttcacatgaggtgtctgacggtattctctcagtttggcaaaataatcgcgcatggagggagtcaggtcggcttcactttccgcctccagcaagggaatgtatttctccaggttctcctggttttcgaacgtttctctttcaggcacgttccattcggaacaggccacgaagcctgccgccagcagcagggctcctgcatatcttatgattcttttcatcacttcatttgtttgacatttccgtaaaactcatttctcatttcggctgtttcggacggttattgcgcacccaccacagcttggttgctccctggtcttcaccacccagcagcgccggcacttccgacatgttggggtttgtaccatattcggccggagcaaagcggaatctttcgggcgtgatggcatcttcttcacctcctatactcacgtaagctttgtcataagccggtttgagcaggtaaggatagccagtccggcgatattcggtccaggcttccacggcattgggatagagtgccaggtatttctgggtaatgattttctgcaacttcacttcgtccgaatccgcatcgttccacttgggagacacatttccggtagaaagcttgcaggaatactgacggttgtaaggcaacatagaccggctgatgtcataaggaaaatctgtaacctccagataggcagccactccacttactccgttttcttcgaacgacttggtaacaccttcttcatacagtgctttcggattacctcctgccagtttgtaaagtgcggcttctgccttcaggaaagacacttccgaagcacgcagccagaacaaaggagaagccgcatcgaccttgggcttggaggctcccgtcttggcagcggagctaagggcattgttgttcgtaggaggaagaggcatgaaatagccgtaagaatcggacgtgaacaaggcactcagacgcggatcgtcatacccctgcatgtaggcccagatggtagctcccaggcgacattctccgtagtcctctacagtcggcagcatggagttcatcagcggtaacttgtccgtactccgtattttggcctcctgtgccacggtttcaatgacacctccgtgagaagggtcaagggcaaacgtgatgtattcctttgccaatgcctcatccttgaaatgcacgcggacggctatgcgcaacatgagcgagttagccagtcgtacccagttggaagcgtttccgttataaatcacatcgtacgacggaagcactttcgatgcggtattgaccagcagcagcgaagcatccttcaaatcggccagcatcgccttgtacacggtctcctgagaatccagtttcggagcaatgtctccgttgccggcattggtatatacaatcggaccgaacacatccgtcgcacggagccaggcagtcaccttgacaatattggctacagcctgcacttccttgtcggcagggtcttccgaattcttcgtatgcttgtagatgtcattccatgcacggaacagtttcgaatagaaattctggtaagcatagctcatacgggcatccgtaaagttccacgtagcctccgtgttgaaattccagttgttgttcatgccccagtaaccgatgtagttaccggccgacatgatgtctgtattggccaggtcgttacccggtcctgtcgattcagtgggcgaaccgatgggaataaccagcttctgcatgtccatgaaaggagccccatacagcagtccgcccgtcttcattccttcttccgtcacaccatagatatttgtattgatctgctcatagttgcaagatgcaagtgccaatacggagaatacaggtatcaaatagtttcttatcttcatattatacgttgtttttcatgatttgttagaatccaaatttaaggctcactccatacgtgcgctggctgggcaacataaagtaatcgtatccctgtccgaaggtaccggtagaagccgtcagttccggatcaaaaggagctttgttgtaaatcatccagaggttggtgccatacacggaaaggttcacgctatggaacggggtacccttgaaccaggaattagggaaggtgtatcccaggctggcctcctgcaggcggacgttggtagcagagtacacattgtacgcatccaggttcaccaccgattcatagtagtcctttggctgaactgccacattgcccaccatgacttttccggcatcacgcgcatcggccgaagcctgcgacacaccgaactggtcgagcacggcctgtgtcttggatatcacgatacctcccagacgggcagtcacaaggaagttcaggttaaagcctttgtaggtaaagccgtttctccagcccaggttccacttggcattgacactgcccagcttgtaaggttccgtagattccgtggtaatggtctgaccttcgttgtacacgatgtaaccgtcctgatcacgtttcaggcgttcttccgcataaatcgtaccaacttcttctccttcgcgcagacggaaacgtcccaccttgatgtcactcaggtcgagtgcctctccggtcacgggattcttcacgttcgaagccagtgcgatgattttattacggttggcagtagccgtcagcgaagtgctgtaagagaacttgccaaaagtctggtcgtatcccagcgtcagttcgataccccggttttctacgttaccggcctgcacgaacatatagtcataacccgacgtttccgacaacttggcttcgagcaactggtcgtaggtattcgatttatacagcgtcacaccgagcgacacggtattgttcagccatttggagtcgatacctacctcataagagcgggttctctccggtttcagttccggaagcggataatacttgaaaggtttgattacacctccttcaatggagtgcgtaatggtgccgggagtcagtccggtgtaaggaataggcgaacccacctccgtataggaagcacgtactttcaggaagcccagcaccggtgaaatggactggcgcatggtttcgggcaacaagtccgtcacaatagccgaaagtccgacagaaggatagaatatccagggcgacttgctgttgaccagctgagaaggcttgtcggcacgaccggtcagtgtgagatacacggccgacttccatgagatttccgcagagccgaacacaccgagattcatcttacggttgtcacctcccgtctgtgaaggtacaccggtagaagggtctatgttatcataagcaaacagattcggcaccttaagcagctgtccgccatatcctcttccttttgtatcgtattcctcgaaagaagcacccacgttgacattggcataaaaatctccggcaaaaggcttcgaaaggttggccataatgtctgcatatttctggcggaaagtctcattcgaataagcataacgtcccagcggcttggcaaacgtaccgtgcgtagaggcataacgcttgtcttccttctccgtgtaggtattatccagacggcctcgtgcactcacgttcaggtaatcggtaatttcatatttcaacgatgcatacagcatgtagcggtctttcacctcaggacgcaaattgcggtaagccacccagtaagggttctgcacagccataccgaagtcgcccggtgtccacgactgcacattgtagcccagctcggcatcatagcgttcgaaatacgtttccttctcaaaattctctccgcgcggatacagataagctcccagaagagggttgaaatacgtaccgtaggacagcatgttgttgtaatactcacgcacgtagctggcagacaagtccatggtcagcttatcgttgaagaacttggtggtatttcgcaccatggcattgtagcggtggtatttgttgttgggcacgatacccttggcattgaccgccgaaccggacacatacgtctgattcttgtcatttcccacagacagattaaaagagttggtaaaagtggttccggtattgaagaagtcggccggattatatgaagaaggtaccggcagtttttctccccacgaggcagcctccccactcacgtttccgtaggtgttctggaagcgcggcagcacgaaaggattcgagaattcagccgatgacgacacgttgacattcacctttccggcagcacctttcttcgtggtaatcaggatgacaccgttggccgcattggctccgtagagtgcagcagccgagggacctgtcagcaccgacagactttcaatatcttcagggttgaagctggcaataccttcactcgacgtgcgtcctgcgccgaagcccgtaccgtcgcctgtgcgatcggcctgattgcccatgggcacaccgtcaatcacatacagcacgttgttgtctcccttgatagacttgtttccacgcatcacgacgcgggtacctccacccacacccgaagcactgcgctgaatgctcacaccggctacttttccattcaggctgttcacgaagttggcatcctttacctttgtcagcacatcattcttcacctcctgcacattgtagctcaaagccttctgtgagcgcttgatacccaatgccgttaccaccacttcatccagttgttcggtatcttccttcatgaccagaacacccagtgtttccttggcggaaaccgtcaggttctgatatcccacgtaagaaatttcaagcgtggccccttcgcctgctgacaaggtaaagttcccgtccatgtcggtaatcgtaccgtttccggtacccttttccagcacactcacccctaccagaggttctccgttgacgtcaacgactgttccactcactgtgattttgtttgcttgcgccgacacctgtacgggagacgcactggctcctcgcggaaggttggcataggccgcatttcctccctgacttatcagcaaaaggaatagcagctgagtagctctttctattttcatagatgatttaagattttgttggacaattaagtttagttatcgcggtttagtggtaccctgaggaagggaatccccctcctcaggtaccggttaaaaaacaatcctgcacaggtacctccctcaactgcgaaaacagtctgcgggctgtatctgtccttcttgtcagttttattcttcgattttagaagaacgctttctctatcctttcaaatgatataatacaggctcgtttgtaatcggccttatgaagtgatttttttctgtagtttagcttaagctcgttcagtttgtgtccgtaaaaacaaggtcggtagttttatcggggtgcaaatatatgcaattttaataaacttacaaacatttataaaagaaaaagagaaaaccaacgatattttcaccgcttgattttctcttattttccgtgattccgctgcgattcgaacgcaggacccacgccttagaagggcgttgctcta

SEQ ID NO: 1264 - DNA, 21835 bp, synthetic construct
  variation 1355: note = n is a, c, g, or t
  misc_feature 1..21835: note = Synthetic
  source 1..21835: mol_type = other DNA
  variation 18327..18426: note = n is a, c, g, or t
aatttacattaccgaccctcggagagagccggaaactatcccggtagcctgtacctacaggttatccatgagaggagggcacgcaaaatcaccctctcttataaaatttacaaggaagaatgggatagcacaaacaaggcaatcattacggataatcccaaccgggatagctacctgtcccaagcccgttgcggcatcgaagaagaaacaagccgtttgaaagccatcattcatgaacttgaaagcaaaaacggctacttcgaagtggaggagattaccgatgtataccattccagccgcatggaagaatcgggcgaacacagcctgaagaaactcgtctcccgcctgagccgcaacctaagcagatcgggacaggagcgcaccgcccgcgcttacggaagcagcctgcgaagcctgctattgttcctcaacaagaccgatatccctatctcctggctgagcccctcattggtgaagaattacgagcgccatctgaagaaccagggtaaagcccccaataccatctccttctatatgcgcaacctaagaagtatctacaacaaggccataacaaaaggattggtaaccaaacccgaccaaaaccttttctcaggagtgtataccggcgtgcagaagacccataaacgagctctttcacgtaaccagatacaagccctgtacaatgtagtactgtcgggaaccaaagaccgtacccgcctggaaacctgccgccggctgttcttcttctgcctgtatgcccgcggaatgagctttgtggatatggcatacctcaggaagaataacctcaggaatggcatcatccgctactaccgcaaaaagactggacaactattggagataaagataaccccggccatgcaggagattatcgactacttctccccaatggtaaaggcaagcccctatgtcttccccgtaattgacaacaacagccgcaaaccacaccgcacccaatacgaaacaggccttaccacccagaaccgcctgctaaaagaactggccaggctggcagggacaggtgtaaatctctccacccatatggcgcgccacagctgggctaccctggctaaagaagagaacctgcccctgtgggtgatcagcgaagggctggggcataacaacgaacggaccacctatatctatctctcacgcctggaacgctccatcctggacaaagccaacgacaggatataccaggccttgtgccggaagaataaacagccggagaaaaacggaagaaaaataattaacagcaaaaaggtgcgaaatacagaaattttgatacctttgtatcgtcggtaattacaagaacccgtattctgtcacttgctaanggaagaaaaataattaacagcaaaaaggtgcgaaatacagaaattttgatacctttgtatcgtcggtaatgagaatgtttccctatctgtcacttagtaagtgacaaattgaaaacaaacaggccttcaccaaacagaacaaatcctgtatacttccactacaaaatcccagcataattcttacagtttttatttttccggagaaaagtatatgtatgattttatctttgtaaaaggcaaataacgtccccggacaccgtttgagcggtaaaacccagttattaacatataaataatcctgtccggcagcataaagccggatggtaaaccttgttgttgtcttaatagcaggaagagtgcgagcctttccgcaagttttcttaataccatccattaaacatctgtgtgttaggttgtttccctaatattgcccttattatatataaaatactctaacagggtatattacattcatgctttgtaagcatactcttgttttccggattttactccaatttttgccatgtctctatcttgttgataataaatagcttatatccatacttgcaatcctgtttgtcacttactaagtgacagatggggaaacacgctgataaccagcaaggaaaggctatccggacatactcaaaccgtgataaagcaacatatcaaccttaagacaaaatattatataaattttgtgtcgggcggtagttcgcccggttgttttcatggccacgggttgcttgcggtaagcggccgtggcctaaaacaccccacccggcctccccaaaagggaggagtcgcgatgcgggctacagacaattacatattagtatgcaatcaatcatatatcctcaccctcttcctcatcctttggagagggtcggggagaggtggctatttcatcattccatctctttgtctccttccctttttggggaggtgggagaggatggccaataatatccggggaggcgatattaccgtcttgttgtctttaacaatgttgtcttatttgtcttcacttattcctcccgccgcttgcgaaagtagttgggcggagcctccccgtaacacaccccttcctgcctcccccgataggggaggtagcgcgaggtggtcaaaccacccagcccctgcaagcggtcaatacaaatcaaatttaaatataataaacagagcctctgcttctccctctcctgtggagagggttacagtgaggtgtattattcatctttccatctctccggtctcctccccatttgggggaggccgggagggggtggcttaaaaattacttttatgaaatcaacctgcacaaatctgagtaagcgaaggctattgccgttgctgctttttgcaatgctgcttttcagttccgggctgcacgcccagataaccattggagaaggcgaagaacctgttgacggcgctttgcttcaactcaaagacaagccgaatgtcaccggcaaaagtgtgaatgcgaccaaagggctgggcatgccccgcgtagaactaaccagtgaaaccgaccttttcccgatgtaccctaacgatgctacttacacagcggtgaaagcgaccgaagaccccaaacatgcggggctgatggtctacaacctgagtactaccgcccctttcaccgagggagtgtatatatggaacggcgccaagtggctacccgtaggttcgggtggcggcggaggtacatctgacaccttctggtatggggtaggcaccaccgctgcccatacctccaataccgacccatcgtacctcgatgccgaagtggtgataggtggtaccgatatagctaccgtgaatgggaaagatgcaagcctgagcgtatatggcgacggggcgtatatagaggggcagatctggcttacaggcaaggctaccgtaggctcggccactgctacccgcacaggctcgctgctcgacctgaaagaaaataacacagcgggcaaagtggtgaacgccaccaaagggctgggcatgccccgcgtgaacctgaccagcgaaaccgacctcttcccgatgtatacgagcaatggctcgggaggatatacaggagccacaaagagtacggaagatcctaaacatgcgggattgttggtctataatttgaacgacagcaacccttttgtagaaggcttatatatttgggatggcgaaaaatggcaacaggcggggacggggattgcagggccgtattgcccttcgcccaagattgcttcgccattgtcagacgtaactatcaactgctatgacgacaacaaagtaaccctcatagtagaactactacccaatataagtcaggacaatccagattactcatggtttgatgagaacgacaatcctgttgctctagcttatggttcaggaaattatcaatttgttgtcgataaggatatccatgatgggaaatccttttattgtaagataaccaacgattgcgggaaatcggttacttcctacaaatttactctgaacgtacttgataatcctattattttacctccaggctatgaaattggagcatcatttacgggtcgtacttgtttcgatattaatcgcagcaactttggtgacttctgcgggcttgaagccttacgaattaccacggcagtcaattttaaaattttaggtggagttccttacacctttacagcccctacaaccggtactgtacaaaacctccgttttgttgtggtagacgaagaaggttgtgtttcaagttacgatgcgggcgatattccgggtacgatggccaacagctctacatctacccttaccgtgttttacaaaactactcttaacgatgacaacagtagccccctgatagtaggacggactagcgacacagcagccaaagtgcatctttatgctatctacaactataatggcacggatgtatccattccgcttactgcaactatacaggattgcacctgctgtatgggggtgccagcgctgcaatcggagtatgtgcagcttaaacaatttcctggtagtgacgtttcccccgctgcgggaaactttgttgctacaggtcagaatatatgtattgctagagaagatagctctactaaagccacatggggtggagccatgggggcatgtcaaagcggtattttaggtgacagttctattggttggcgtcttcccaatctggccgaattattattgatgctcgcactaggtaacgatctggaaactactttgggagctgctccaggaacaactaatatgaatactggcaactatatgtattggagtgcaagtgagaatcaagcctctcaggcttgggttagtagaggatcagatggctacactagtggagctagtaagactacttcatcgtatggttaccgttgtgttaaaacctattgattagttaccggcgctcactctggtgcaagtataagatgtgtaaaaatttattaagaattatcccgcaggcggttggttccacctgcgggaacatgtaggggcgacttgccggtcgcccgatgttcagcgcgtgtggaaacaatgatggatgtgggaataataaaataccattattaccgggcgaccagcgggtcgcccctacgatttgtgggtaaatgctattacggttgcggatcgaaataacaatcgtcctgccagcgggtgggattgttgataatataatctgtaatattgtcgaatgcggtttggttgcggataatgtggtcgtggaaactgcgctgccatacgggcgctcccggcaaattacgtaaacaattgatacgggcggttaccattgatttgtaaccgccaatgattgcacccaccgaattggatttcggtcccgtaggggcgacctgccggtcgcccgttgatattgatatattgttttgttctatgttgttttcgggcgaccggcaagtcacgggcgaccagcaagtcgcccctacggtcataaaaaataaataaaattatctatatatgacagttacgagttatttcgccctgcgggcagtaacaagttacaattttataaaaaagtcacttttgtcacttttttatattaaacagttgcttatgagggtattacgattttttgtatatgtcactttttggataggctgtcacctttcggcacaagaggtgcagttgcaggcgcctgcattggcaggcaaggaagccaagctctattacttttccggggcaaaggtggattcgctgcattcggcggtcgatgcttcgggcaaggcagcctttactatcctcgctaaggattaccggggcatggccgcactggtcgttcccggggcgggcggcgtggaactggtagtagccgagccgtctgtcacggtagagtgcattagtaatcagttgaatactgaaatggcaactttccctgactccacagaaaactccttcctcaaacatatctttacaaaccaaagccgctatatgcaacagcaggcttggctacaggcaggcaacgggctattcgatgccggttcgcctgtcctgttggctattcagcctgagttggagaaagtggaaacatctatgcaggctctggacaaagagatagccgcctcaaagctctatgcagcgcgctatttccgtgtgtcggactatctcaaccgcctgtttgccgccgagcaacgcagcgataaggcagccttggcctcactgcgccgcgagatggaagaagaactggatatcgtggcgctgtacacatcggggcagctctggaatgcagtggtaaacctctacctttcgcttttcaacagggcgggcaacgacgacaaacagcagcaatatgcaagctctgtccttaccaccctgcaacgtcttcctgctccctgctacgaggcctttctggcaggctgtatcaccgagaccgagcggtttggctggcgtgaggcgcaggacagcatattgtcagggatatttgcccgccatccgggattttcctcttccataaccggccttcagcgttccatcggggcataccttgtcaaggagggcaaatcgatgccgcccgtcctcggattggaggcgaccggcggggactataataagatgctgcttgttttttacgactcggattgcaatgtctgtgtcaacgagatgtatcgcctgatagccctgtatccggtattgcatgacgggggcgtgcgtgtggtttccatctctgccgataccgacagcaagcgttatgaggcatacagcaggaagcttccgtggaaagacaagttgtgcgactttgagggttttagcggcgataactttgccaattataatgtgataggtacgccttgttttgttctgctggagagagataaccagttgtcggggatgttttattcggttgccgagttggaggaaaagataagaggaaagaattaagaatattcagtaactgtttaaattttatacgaatattttattatacctttttcttcgttcatttttagtctgttttcggctgttttttactttctctcaactcaaccaacggtcacaggagcgaagcgtatgtaaatagcccgctattatcgtttcaagaaagaaaaaaacatctctaaaacatctctaaaacatctctaaaaatttgaacgaataaaatttaaacagttactcagatacaaaataagaaggaataagctaagtgaagattaggaaacaggatagcaatagcagtctacgacattcccttgtttatcaaccataaatttggtaaaattctatttaatcgcttctccccaaaagcccttgctgttggattttagatgtttatacagagggtaagattccgtttgttaaaatcggtaagaaggtgttgtataagcagaaagagattgcaagtatattggataaaataaactgcaaaattataataaaaagaggacggaaattactttccgccatcttatttgttttcacaacggaataatccttattgtgattagctttcaaatatttaacaaatatacttctgttagtgttaaaatccaaatgtttttattaaattggtcgaaacaaacatgaatttgggattatgagcaagaaagtattaggattagatctcggtacaaactcaataggatgggctttagtaaactacatagaaagtattcgggagaaccagtttcaaccttctaatattattgacatcggcagtcgtataatacctatggacgctgctgcgttaagtgattttgataatggtaatttaaaaacacaaaccgcagaacgaacaagatatcggagtgtccgccgtcttcatgaacggtacttattgcgtcgcgaacgcctgcatagagtgttatatattttaggatttttgccggagcattatgctaagtgtattgactttgagaaaaatacgggcaaattcttatccgattcggagcctaaaattgcctattctctgaacgatgaaacagatagatatgaattctattttaaagaatcgtttgtagagatgatacaagactttgtcaaatatcaacctgaacttgtaaaggacggtaaaaaagtaccttatgactggactatttattatttgagaaaaaaggccttatcggaacaaatatcaaaagaagaattggcttggttgatcctgcatttcaaccaaaaaagaggttattatcagcaaagaggagaagaggaagatataaacgaggctaaagaataccaaaaactgcatgtggtaagtgtagaggattcgggagataagaaaggagatgctatatggtacaacgtgcttctggagaatggagatacttacaagaaattgagtaggatacctctcgattggataggcaaaacaaaagagtttattgttacatctaaggttgataaggataacaatgaaaagcgaacttatagtatcccaaccgatggagactggacattaataaagaaacggaccgagaaagaaatagaagaatcgtataaaacagttggttcttatatctatgatacattattagctaatccaaatcagaagataaaagggaagcttattcaaactatagaacgcagattttatcgaaaagaactcaatcagatattaaataagcagagagagttccatcccgaattgaataatcagggtctatataatctttgtattacggatttatataaaagtaataacgcttatcgtaacagcatacaaaacaaagactttgtatatcttttcattgatgatattatcttttatcaacgtccgcttaagagtaagaaatcattgattgaaaattgccaatatgaatacaggacatataaaaatcctaaaacgggcgagcctgaaaaggagtatctgaaatgtatatccaaatcgcatccattattcgaagaattcagattatggcaatttctgaaaaatgtgagaattatcagaagggatgatagtatggatgttactaatctgtatttgcctgatgaagacagttatgttgcattgtttgataaattgaaggaaaagaaagaagtagtagagaagtcttttttatcattaatcaaaggtgctaaacttaaggatacagagtatacttggaactatggggatcgttcattgccgatgtgccctacacacgccgaatttataaatcgccttaaacatcttaacctggatgataatttcctcatgccccaaatagaagagcatctgtggcatattttatattctgtaagcgataaacaggaattggagcaggcactaaaatcttttgctctaaaatatgaaatagagaaccttgatgaatttgtcgcagagttaaaaaaaattaaacccttcgataaagactatgcttcatattcgtcaaaagcgataaaaaaactacttccactgatgcgaataggaaatcattgggaggagaacacaattgaaaaaaagacaaaagagcgtatcaataaaattatagatggagaatattgtgaaaccataaacgagattacccgagaaaaagtgaagaaagagctgggcgaagaattaagtttatctctcttcaggggattaccgctttggttggcttgttatgtggtatataaccggcactctgaggcaggtgaaacaactaaatgggaatcgccggaagatatagataagtttttggaagcgtttaaacagcattctcttcgcaatccggtagtagagcaaattgtaacagaaactctgcgagtggtacgcgatatttgggtaaaacacggtaacttatttgaaatacatatagaattagggcgtgagatgaggaaccctgcaaagaaacgacaggagataacccgcaggaatctggaaaatgagaatacaaaccaacgtataaaggcattattatctgagttgaagaatgaagggaacgacgtacgtcccgagtcattatcccaacaggaacgcctcaaaatatacgaagaaggggtattggggtcagatattgaaataccggaagacattgtgaaaattacccgacagaaacagcccacacagtccgaaattattcgctataagtgttggttggaacaaggatattgttcgccatatacagggaaacctatcccgttggggcggttgttcactagtgaatatgatatagaacacataattccgcaagcccgttattatgatgattcgtttagcaataaaataatttgcgaaagcgccgtcaataaagataaaagcagcatgctggcttgtgaatatatcagattgcagggagggaaaaatattcaacttggtaatggtaaacaggtcacagttctttcttttgaggaatatgaggattttgtcaagcgtaattttaagaattcttctctaaaaaagaagaaactgctgatggatgaaataccggactattttatcgaacggcaaatgaatgatacacgatatataagccgttatataaaaggattgttatcgaatattgtcagggaagaaaacgaacaggaagctacatccaaaaatattatatcagttacaggcgtagcaacatcgaaattaaaagaagattgggggcttaatgatatatggaataaaattgttactcctcgtttcgagaggcttaatgaattgactaagtccaacaactatggacattgggtagacaaacagactttcagaattcaagtgcctgaagcgaatcagagaggattcagcaaaaagcgtatcgaccaccgccatcatgcgatggatgctctcgttatagcatgtgcgacccgctcacatgtcaattatctgaataatcagtctgccaaattatcggataaagaaacccgttatgatttgaaaatgaaattatgctcaaaaaataaacagggtaaatggttgtttgataaaccctgggaaacttttacgcaggatacgcaggaggctctggctaatataattatcagctttaaacaaaatcagcgtataattaataaatcaaccaataaatatcagaaatacgaagatggcgttaagaaattggtttcgcaaacaagtggtgataattgggctattcgtaaaccattgcataaagaaactgtctatggaagagtgaatttgcaattaaagaaaacagttaccttgcctatcgctctagataattggagaatgattattgataaggagattcgtgataagataaaactactgtttgatgaaagattcgataaaaaacagattctggcctatttcaagaaaatcgggaatcgatataatcagaaagatatatcaaagattgaagtatattattttagcgatgaaaaagagcctttagtcgcaacgcgtaagacgttggatagcagctttaccgttaaaaatataaatgcggtcacagactcaggcatccggcaaatattattgcgccatctcgaaaaatatcaaggaaagacagaggatgccttctcgcctgacggtatcgaagatatgaatacgaatattcgatttctgaacaatggaaaatttcataaaccgatttataaagtaagggtgccagaaactttaggtaataaattccaagtaggttatcggggaaacaaaaaggcgaaatatgtagaggcagcgcaaggaacaaatttattctttgctgtttatcagtcgggtgaaggtaaacgtagttttgataccattccattaaatatcgttattgaaaatcttaagcggggagaaaatgcggttcctccagcaaatgaaaaaggagacagattactatttaccctttcacctaacgatttggtatatgttcctactgaagagcaacgggaaagcaagattggcataggggatatagaaaagaataaaaatagaatatataaaatggtttcagctacgggtagtcaatgtttttttattccttattatattgcgtcggctatcattcctacaactgaattaggtacaaataataaagctcaaagagcttggactggtgaaatgataaaagaaatatgcttgaaaatagaaataggtagattaggacatattgtaaatatagcttatgattaaaaagacactatattttggcaatcctgcatatttaagtatgtcaaatatgcaaatgattgtaaaactaccagaagtagaaaatgcagaagtaccggattcttttaaagagcgttctaaagcaagtatcccgatagaagatatcggagtggttattcttgacaataaacggataactataacacatgggttgatagaaaaactattagaaaataatgtagctctcgtaacttgtgattctgcacgaatgccagtgggcttgatgcttcctttgtgtgggcattctactcagaccgagcattttcgtgaacagatagaggctacccaacctctcaagaaacaactttggcaacaaacagtcaaagcgaaaataaaaaatcaggctactcttttagaatcaacaagagaaattgattcaaccccgatgttcaaatgggctgacaatgtaaaaagtggagatccagataattatgaagcacaagctgcagcctatttctggatgaatatttttcctgaaatccctgattttcggcgtcatagagaagggatacctcctaataacttgttaaattatggttatactattttacgggcagtcattgcccgtgctattgtctcgtcaggaatgctaccatcattaggtatttttcatagaaataaatacaatgcctattgtttggctgacgatattatggagccttatcgttcggtcgtagataaggttgtaattgacatagttagtactgggattgatatatcagaattgaatcttgaattgaaacaagtgcttttatctattccagctcaggatgtattaatgaatggtaaacgtcgccctttattggttgctgcatcacaaactgcggcaagtttatacaaatgtttttcgggggaatttcgcaaaattgtataccctgatataattatctgattgtaaatgagcttatccagactaaatgaatacagaattatgtgggtaatggtattttttgatttaccaactgaaaccaagaaagagcgaaaaatgtatgcagattttcgtaaaaaactcatacaagatggtttcacaatgtttcaattttcaatttacttgcgtcattgtgttagtagggagaatgcagccgtacacattaccagagtaaagaaaagtttaccaccaaaaggttatgttggaattctaagtattactgataagcaatttgaggcaatggagctcttttatgaaaaaaaggaaaaaaatataactactccatatcagcaattggagttattttagaaaacaaagaatcgggaaaattaccgattctttgtttggatatacacattttcttcaagtctaaattttgttgtaatcgtttgatatatagcactaatattgagggtatgctgtatatcctcacgctaatatactaatttgaaagctaatcacaactggtggtacagctacaacagatagaaaaagctgtatatcctcacgctaatatactaatttgaaagctaatcacaactctctgtgcttcgttcacatcaatgctaggctgtatatcctcacgctaatatactaatttgaaagctaatcacaaccaccaagacatcacagagcgtatcaacacgctgtatatcctcacgctaatatactaatttgaaagctaatcacaacaaagtgcggaaacatgcgaatctttaacatgctgtatatcctcacgctaatatactaatttgaaagctaatcacaacttaccacttcttgaaacacaacttcttgacgctgtatatcctcacgctaatatactaatttgaaagctaatcacaacttttttcaacttcgggttcttcgacatcttgctgtatatcctcacgctaatatactaatttgaaagctaatcacaacgccctggctaccttatcttcgatacgttcagctgtatatcctcacgctaatatactaatttgaaagctaatcacaactcgcaggtttaaaggcattcccatacggcggctgtatatcctcacgctaatatactaatttgaaagctaatcacaaccactctatcgctactttctgccaattctgcgctgtatatcctcacgctaatatactaatttgaaagctaatcacaacaaaagcattatatgataaaaaaattgatacgctgtatatcctcacgctaatatactaatttgaaagctaatcacaactctctgaattcgcattctctgcacagtttagctgtatatcctcacgctaatatactaatttgaaagctaatcacaacccattgattacgatcatacccggcgcaacagctgtatatcctcacgctaatatactaatttgaaagctaatcacaacggtcgtcggtcagtgcatgttttttactagctgtatttcagcaaccgtttggggctatttttcgttgtggagatctattatctcgtccttgagtatatgttgatgtctgttgtcggacaaatccagttcctttattgttcgatatttgaggtttcctttgtgccttacaacaaaaaatacatggttgctgtcccagatattcagaagatgaaaatcgttgtaaaatcggtcggcaacaataacattttttcgatataattcaaacaggctcttaatatcccgcggtaaaacgttggcggggaaatttgtggttttctatctcatctgttaccgccacggcaagatcttctaccgataaaaccgattcgccgttcttgtcgaatatcggttcgtctgtacccaggcggtatttgcctgtccgtcctgtcttgattccctgatgcatgttgatggcgggagagaacattgtccagtccagtccggtttcttttttgagtacatccagataatccctagcggcggttgctcccgctttgatgctttcgggaaagtcttccccgtctactatttgtttcccgtcgatgtaaaggcttccggctccgccgataatgatataacgttttacgcccgcttcttttacggcttcctgtatggcttccgaacctttcataaagtcattgtagatattggggttagtccatccggggttgaacgcgcttagtacgatatcgttgcctttcagtgcctcagccagtgctttggtgtctgttacatcaagggctatggttttaggatttccgtcttttacgggaattttgtctaccgagcgggcgaatgctgttacttcataacctctgttgattaattctgctaataggtgtgagccaacaaaacctgttgctccgatcaatgctactttcttcatgatttctcttttttattaatgtatttattctgtatacttatttattacagttttgagtaaaaaaatatcaactgaacctgttgctgaaatcagctaacgtctgtcccgacaactgccgtaccattatgttttcagcttcaagattcaacttgttcaggtgctcgtttatctgcttgcctacaggacattgggggttgggcgaggccagttcatttcccagtatagtgtgcgaactgacggtcttatatacatccgatagataaatttcagccgccggccttgcaagcatacatcctccgtgcttcccttccttgcttataacaatcccatgcttgcgaaggttcgatagttcttttcttaccagcacaggatttatattcatgctccctgccaggtaatcggaggcaagcagtttgtccggatttttagccagaagcaccagtatatgtattgatatggcaaatctgcggtcgttcatactgtaatatttattattacagtacaaaggtaaataaaaaataatgatatgacaaaaggaaaatgagaaaaatttattataacaattccattaggaaataaagcacgttaaactcaaaatagcacctcacttatatcagcacatacacaatcttctttgtcttaaagtattcttcttcgaagtacatggacaaatcgtctgcttcggcagttttcttaaatggctgtagctcgctgtccagattaccgcctttgaggcagatcaggccattgggcagggcgttgcgctgctccttcgatatgtttttacggatgatttttacaaggtcgggtaggggcatcacagcgcggcttactacaaagtcgaacttttctttgacttcttcggcgcggcaatgacgcaattgtatgttctccagccctatagcgttggatacttctgtggctacccgtattttcttgccaatgctgtctaccagcaggaagttgcacttagggaaaagtatagcgagaggcactcccggaaagcctccgcctgtgcccacgtccattatctgcgtgccgtctgtaaactgtatcagcttagcgatagccagcgaatggagtacatggtgcgtgtacaggttctcaatatccttacgggagatcacgtttatttttgagttccagtcggcgtatagttcatacagggcggcaaactgctctttttgtttttcgcttatattggggaagtatttcagaattatatccattatttacctgataaagatgagataggagaatcctcttttaatatcggagacagctcgctaaatgtgaatgctacttttatcgcccctaatgacggtgcagagtattctccctgattgaagaggtaggttatccctttgctgtcgatggcgaagttgttgttggaagcaatgtcttcaataccccagtatccgaattcgagaaggtcttcagccttttttacgttgttctgggctacgatcttatctgtcagcatcgtgttgagaagctttttgtattcagggatgaagatgtctttttcggcaactgtattaccggttttcaggtctataattacatttttgtagaaggtcgatgaattggcaccgcctttgaagtccatagacgatgtctggtaagatatgatcccatcctgatcgaacaaaacttcggagtttagagtcttgtagaatgagaaatagtcatcggtttcttccgaggttgcccaatcggggaactgtactttggcggcctctttatagttggctatataatccgtgataaatttatccacggcattagcggggctcaggtcttcgtacgattcctcttccaacaaggcgtagttaaattccctttgtatccttgtcaggatagtggtgtctgaatattgggacgggaatatatatctgatctttaccgaacaggaaggtttggtagaatcattttccagatggtatattttagataccgttatcgaatcatatacaatattgtttggcgcatcggcttttttgttttcacaagctgagaatgctaccaaaaataatacgaatatactgacctgtgtatatatgaatttcatacggacattgtttatgttttgctaatgttctgtttgtctctgactataccggtcagaatcgcttatcttgtaccttgttgttttttataaatgcaaatatacgataaaaagagaaaggacaaccggggaatcgttaattttatgaatatagcaacttataaggtcatgtaaaagtcatattcatgaaaatgtaatcgccttattcctacctatatagattattgaattggtggcaaaaagtcatattagatagaaatatgtatgttttttatctagctttgtagatgtatgacaataatacttcttgaaaaactatacataacttatggagtaatgtcatatttgtttatcattcctgcaatagcagctttagctattgggcttcctccatcttttcagatttagctgcactgggtgtagaggaaatgaatgaattggagatgagagatgtagatgggggaatactttttgaacttgctgctgttatagcaatcgcatatggcgcttatcagattggatatgctgttggagaagcatgtaaaaatgcagggctataacaaaatacaaaaattattttaaaaattacgatcatgaaaaacttagatttaacaacattgaatttaacagagttaaatgatgaacaattacaaaaagtagaaggtggcgcaaaagaatggttattacatgccgcagcgatttcttgtattacacctggattaggtcctgtagcaggcttatttattcttggcgtatataatggttataatgcttaatataatgatatggaatataaaaaaatagcactaaatattttctgtatctttattatcattgtaggaacatatcttttaggtcatgccgttggagaagcatgggctaattatgataaatcaactaaagtagaatctgaaaaataagagaaaagcatatttgggtgcttattatttaggacattataatggcaaacatgcagaaaaataaatttctttttttacagattatagcttatttagggtgttttatttcctttggaatgatttattatgctattttttacacaaaaaatgcaataaatacattacctttttatatggcatttatgatagtctcaatatcaataagtatcattgcaaaaaagaaatattnnnnnnnnnnnnnnnnnnnnnnnnnnnnnnnnnnnnnnnnnnnnnnnnnnnnnnnnnnnnnnnnnnnnnnnnnnnnnnnnnnnnnnnnnnnnnnnnnnnntttttacacaaaaaatgcaataaatacattacctttttatatggcatttatgatagtctcaatatcaataagtatcattgcaaaaaagaaatattattcgaagaaataaaggattagaattgttaattcagataaaagcacagctaccctgctcgcgcaggcttccagtctgtgttgcgaaaattacttgcaagagatcttgttatatcttatttagtttgcttcgcaatatacatactggaagtctgcacaagcaagagtatatgatttgaagaataaaacgtatcagtatacagtagattatgaaattagagttggcttaggaatgaaataaaaaattaaataaggaaggctctgggtatatctcccaacagcttcctaccttaactatttacttaaattatgaaaaagtatttatcattaatcgtttttgtatctctattggcattaatgttgttttttcgtttgtctttcagtaatggagatatattagggcaattgtcatatttgtttatcattcctgcaatagcagctttagctattgggcttactccgcgattattaacaacgaaaaatattatttatctaacaataggagtgattttaggagtattattaatccgaagcgagcaaaaccatataataatctataaggctttatttacaataattggtggatttttatcttggctttatttatttttgattaaaatagaggattaggattactacttaccccatcttttcagatttagctgcactgggtgtagaggaaatgaatgaattggaaatgagaacagaggatggggctaggttggccagatggttttaaggttcttaacatgatataatacagatattcacattacaatatttatctatatgcttaataataaattaaaagacagaaatcaaatcgttatggcttttgtaataatcgccttagtattaactgtctatttcattgcctcagtcgctaaataccctgattcatttataaatggtttactcgggcgttgataacttttgctgccgtatgatacaatagtagtcacgagattataatttttttaccaatatgagaaaaaaatatcatcaatatttaattgcaattgttattgcgatttttgttacgcccattattgtgaataactggattgcttttaagcactttatactaaatatcgcaacacaatattttgatttttttaaatgaatcctaaagccaatgaaacgttcaacttttttctgaataatatctctttttatcaaaaagttgcttttgcagtattttgcactgctttggtagtctttctttcgggtgaatttgcctatatattagggaagcatcttgctttataacataaagtggataaggtagaagaacagataaaaatcaaattgatgattacgagtctgtataacaggtctggaaataatgttaagtagttgattctctttagaaatgaacatagttaaagacatttttatttttctgaaaagtccaactactgcaggtcggattcggttgcagactcttggatttgttaagacagggttagcatgttatctgttaatgatgttaacaatattttttgttggaattattgtaatctcaccattatcatatttcggactcatgcctgagaaaagcaaaatggacttgattttacaaaaagtagtaataatagccgtagtcggacctgtttgtgaggaactaatttttcggttaccgcttattttcactaaaagaaatttattgattgcaattgttttgctagtctttttactaaataaatcagatattcccagagctatagtattgagtatagtgattataggagttggtttgtttcttttgtactataagaagtttaggattacagagtttttggaaaatgtatggaaaaatcattatacgttcgtattctatatctttgtattattgtttgcatgtattcacataactaactatagggatctttcgtttattcaatattgtctaacccctcttattgttgtgcctcaattgattatggggatcttttttggatataccagagttcgttataaaaacggtttaataatatcaatttttatgcatatatgcttaaattcgttatctttactttttgcgtttagattgaatcctgattcttagcaactgtttaaattttattggtattcggctatgagttatttagagatagattttttgattttacaagaatttattataaagatttaattagagaaaattatgaacagagtgagattatttaatactaaatgccggaaagttatttctgtgttatcggctatatatctgctatattacctaataacccggtttgatgattttgtaagaggttttgttgctgcacatcaatcaatgaccggtttattttgacagaaccacttgctgttttgggtgcagtatatgtaggtgcatattatttaggatattataatggaaaacatgcagaaaaataaatttctttttttacagattatagcttatttaggatgttttatttcctttggaatgatttattatgctatttttacacaaaaaatgcaataaatacattacctttttatatggcatttatgatagtctcaatatcaataagtatcattgcaaaaaagaaatattattcgaagaaataaaggattagaattgttaattcagataaaagcacagctaccctgctcgcgcaggcttccagtctgtgtgttgcgagataaagacacagacaagagggggatgatacctataatgtattatattgcggtatatgttatttatcagtaagttaactatggaaaagattctacagttttataaaattaaatatttatctatatgcttaataataaattaaaaggaagaaatcgaatcgttatggcttttgtaataatcgccttagtattaactgtctattttattgcctcagcaattgaatatcccggagtttttatagatgggcttctcggacgttgataataatactagtttattttactataccttgtactaccttgatgttttattttcgggtatgtttgtccttatattagggaggtatcttgctttgtaaaatagctagggtaaaggaaagtaatatgagaaaattcttattcttaatcgttgtcttttgcttctgcaatacaacgcatgttttcggtcaggtaatagtgtttgaaggtgaatgttgcgaagcacttgcaggatataaaacgaaatacgacaatgattcaacggtagtcagcaactttcgatcgttctatcaaatagaaatgagcgaaatggctaaagctgagttgtttaaaaagaaacccgctgagataatcgcgtttttcaataccgacgctggcaaaaaaaatcagatgctatataaaaggttac

SEQ ID NO: 1265 - DNA, 21811 bp, synthetic construct
  variation 15873..15964: note = n is a, c, g, or t
  source 1..21811: mol_type = other DNA
  misc_feature 1..21811: note = Synthetic
gattcggtttttgttaaaaatgagcgactttatttagccgccaaaactggcgaagatacttttacgatggtagaaatacccgattccgaacccaggttttttgtgtttccaaaagaagaatcaaattcgttttacgtcacatttatagatgatattttaagatataatcttcaaaaacaatttgataacacagatacagatgaggtaaaatttcattctataaaaatttcgcgcgatgccgaactttatatcgaagacgaattttctggaaatttaatgcaaaaaataaaaaatgcacttcctaagcgagacacaggccaagcaacccgcgttttaatagaccccgaaatgccccaggattttcgtgaaattttaaaaaaggttttagacgtaaaccataccgatgtagttttgggcggacgctatcataattttaaagattttatgaagtttcccaatcctacgagcaaacaattggaaaacgaaaaattgcctcctttacctcatcctgttttatccaattgcaattcgatttttgaggcaattgataaaaaagatcaattattgcattacccctaccaaagttttgatccggttataaaacttatggaagaggctgccacagacccgcaagtaacgactattaagatgacaatttatcgggctgcagacgagtcgaagttgaacgatgctattgctttggctgcaaaaaacggcaaagatgtaactatttttattgaagtaaaagcacgttttgacgaacaaaacaatttaaaatggggggctatttttaaagaaaatggcgcacgtgttatttacagttacccagacataaaagtacattcaaaaatactttatattgaaaaagaaacaaacggcaaatccaagcgatacgcctacatagcaaccggaaactttaacgaaaacactgctaaactctatacagattttggcttaatgacagcacataaaaaaataacaaaagacttaaaaaaagtatttctggttttagaaagagaactaattgtgcctaaaacaaaacgattactcgtatcgccttttaccgcacgagaaagatttaccgctttggtcgaaaatgaaatagcgcttgccaacgccggcaaaaaaggaataattacccttaaaatgaacagcttacaagacaaaggtatgattcaagaattatacaaagccagcaatgcaggagtagaagtgcgtttattaattagaggaatttgttcgctagtgcccggtattgagggacaaagtgaaaatatttatataaccagtatcgttgataggtttttagagcacggccgaatatacattttcgggaacgatggcgatgaacaaatatacataggttctgcagattggatgactcgaaatttaacccatagaattgaagttatcactcctattctggatgaaacacataaaaaaaccattagcgaccttattgatttacaattgcaggacaatataaaagcgcgtattgtggatgccaaacaacaaaataaatacgttcaaaataccaacccaaaagtgcagtcgcaattggctacgtatagttattttaaagatgaaattttaaattaaataaagtttaactcacgggcgtgtgcaatagcggcatcgctattttctactaaaagtaccggtaccgtttcataacttttaaacaatccttgcacccgaagcattttttgtttgtgatttacatttcgcaaataaattgccaagatacgttctggatgggcttcggctatttcgatataaatatcggggtcatgctcgccgctatcgccaattaaaataaacggtagttgaggatatgtttttaaaatattgataatctctttctgcttttggggtttttcggaaataggcttttttaaccattgttttggcaccaaaggatttataaaatcgcgaagcaaaattggaccttttacaaagctatttctgtttaaaaacacttctaaatatttatataaattccacggactatggcttacataaaacaacggattgctttcagcaccttgttttccattgtgtaatttttcataaaaatgagcagcaccttctaacggaacacgtttttcggctcgtttaaaaaaagtgttttttacaactttccacttaaagcgggaagttaaccctgtgtgaagaatagtatcatcaatgtctgtaataatgccaaactttgcctgttttgaagggattaaaatttcccctttaaaaacattattctgttgaattttcctgccagaagtttcatttacaaatgaaattgtataatgaagccagccctcttcatctgtaagcgttctaagatttgatagtttttcatctatcaaaaaatatccttgggtatcggtaacagttttaatagtttgcccgttgggaagggtaagtaatagtgttgtgtttttaactttatcggttaaaaaacgtttccacgaattccaaagtaaattaaaaacacccgttttagataggtcaacaccttcgtcttcaatcgccctgccttttacatacaaatggctgttggtaccataactgcgaaaaggtattattgtgattggatcttttttaaagaaagtcattaaaaataccatgtttcgggccaaagccacattaacaagagtccaaaagcaatggtaattccaaaggctattccaacccattttgccaattgccgtgtaccgagaacagctgccatgatacctttaaaaacaaggtttgatagtgatgccaataaaataaggcgccaccctgttgaagtatttaatccaccagatttcatggtttgcgaaagcgacaaggtaatggcatcaacatctgttaaaccactaattatggctactacataaagggcgtcatttccgaattcttgctttgtaaaggctactgccaataaaatagcaccgtataacaagccgaaaataagtgcacttttaaattgcgccggattttcgggttcgggcattttatcgtcttcgccgtttttactaattaaataaaacaagccaacacataaaagaatcattaaaaccaaaacggcagcgatgggcaaaataagttcaggaagtttgttggggataaccacgcccacttctattaatacgcgtacaaaagcaattgccgaagccgcagtaataacaaatgccgccataatatttatagagctactgtcttttgtttttcgggcatagctaacggtggttgcagtactactaattaatccgcctaaaaccccgttagagataattcccaccttttttcctacaaacttgtagatgaaatatcccactacgcttatacctacaataagggtaaccataagccaaatattacgcggatttaacacatctaacggcccataagttttatcgggtaaaataggaagaatgattaaagagatgcccgcaaatgtcataatagcagccaggtctttctcgcttagtttttcaataaaactgtgcaagcgttcttttaaatataaaagcactgccatagttccacccacaattactgcaattaccctatcgcccattacaaggtaggcacccacagcaaacataagtaaagcagcaacttcggttgtttgcccaatatcggtttcgtcggtttttttaatttttataatattggcggtaaccaaaagtgcagtaaggcaaaggcctaaggctggaagaatatatggattatcaaaatcgcgtgctaaaaatgccgacaaaacacccattacagaaattaatgtaaaggttcgaacgcccgccatttcgtgatcgcttttttgacgttgcaatcctacaagcattcccaatccaaatgcgatggctaatgtaataaggtcgtggtagttcatagctaccgacaagatagcaaaaattgaatttaatttttataatgaaatgtaaaaggaagaaaaaatgtttgagataaaaacaaaaccccaaaggcttttaacgcttctggggttttaaaacaagtattaaaagaaaaattactattccttatcttttattttaattttcattccgtctacatcttttaattgagcgcgaacttcctcttcggttccggtaaacgttcgtgtttctttcgtttctactccattaaccgtttttacaatagttacgttggctgttacttggtcgttactatcatttttaagcatttcaacaattgtttcggttttgttttttaggttgtcaccttcaacaattgtacttccgttggtaatgtattctacttgtttttcggttaaaaccgttttattgccatcagcatcgataacatatacttcttcggtagtggtttcaactgcttctgctgcggaagcatctactgtatgccctcctaaaattggtgcaattacaagtccaattaaacacgttagttttattaaaatattcattgatggccccgatgtatctttaaatggatcaccaacggtatcgcccgttacagcagccttatgtgcatcacttcctttataggtcattttgccattaatcattactccagcttcaaaagatttttttgcgttatcccaagcgcctcctgcgttattctgaaatatcgcccaaagcacaccactcacggtaacacctgccatatagcctccaagcatttcggcaattgccatattattcattccaaaaatcataggtacaaaggcaataattatcgggaaaccaatagtcataatacccggaagcaacatttctcttaaagaagcttgggttgaaatagctacacatttatcgtattgtggcgtacccgtaccttccataatacccggaatttcccgaaactgtcttcgcacttcattaaccatttgcatagctgcttttccaacggcattcatagccatagccgaaaatacaaccggaatcattcctcctacaaatagcatagctaagaccggagctttaaaaatattaataccgtcaattcctgtaaaggttacataagcagcaaatagcgctaaagaagttaaggccgccgaagcaatagcaaatccttttccggtggcagctgttgtattaccaacagaatctaaaatatctgttcgttcgcgcactataggatcttgttcgctcatttcggcaatacccccagcgttatcactaatagggccaaaagcgtctattgccaattgcattgccgttgtagccatcatagccgaagctgctagggcaacaccgtaaaagcctgcaaaagcatacgatgcccaaattgcaccagcaaaaagtaaaactgatggaaatgttgaaatcattccggtggccaaacctgcaataatatttgtacctgcacccgttgaagattgctgaactatttttaaaattggttttttgccaagacccgtgtaatattcggttaccgatgaaattacagcccctactaccaatccaactaaggtagcataaaacactcgcattgaagatatttcttgcagtccttcaccaaagaaactcatattcatagtttcgggaagcatccaaagtaccagaacaaagcacgaaatagcaactaaaattattgaaacccagttaccaatatttaacgcgcccataacttgagcttctttagcatcgttgcttttaatttttacaagcatagtaccaattaccgaaataattattcccgctcctgctattgccataggtaatagtacggggccaatgcctccaaaatcgtctacaattgcaccacccatgtcttttataacatagtttcctaaaaccatggcagcaaggacagtagccacgtaactaccaaataagtcggctcccattccggccacatcacctacgttatcgcccacattatcggcgatagttgcagggtttctggggtcgtcttcgggtataccggcttctacttttcctacgaggtcggcgcccacatcggcggctttcgtataaataccacctcccacacgcgcaaatagcgcaatagattcggctccaagagagaatcctgctaaggtttctaatacaattgtcatatccattgtattagtccaaaccccgcccataaaatagtggaagaaaaagataaaaaaggcagttagacccagtacggcaagcccagcaacaccaagccccataacggtaccaccgccaaaagaaatttttaaagcattgggtaaactggtacgggcagcttgggtagtacgcacatttgttttggtagcaattttcatccccatattaccggcaagggccgaaaatatagcgccaaaaacaaaggctacaactattaaaatatgtgtagtaggaaccacaaaagacaccacggccaaagcgatactaactataacaacaaaaatggcaagtaatctgtattcggcgtttaagaaagcgagcgccccttcgtaaatgtggtcgctaatttctttcattttaccatcgcccgggttttgttttaacacccacgagcgcttaacggccataaatacaaggcctaataccgccatcgctatgggcgcataaatcataattgattccataaaatttttagatttaggttagttttgaaatttttcaaatccaaaaataggaaaacagattgtattacaaaatagtgtaacgcaggaaacctaacggtttgattgcaaataaatttgcgaaccatactgttaggtttaaaatattatagcgctatgcgctaaaacttatatgctaaagcacccgtgaaccttaggggtttctttatatcgctttacgcactgattgtaaatttcgactgcttcggtagcatcaccccagccaccaacgtctacttttttcttttctaaatctttataaacttgaaagaaatgttctatttcacgaaccaaatgcggattcatatcagacagatcgtccaaaatgctccagattggatctgaaacaggaacacaaataattttttcatcgggtcctttttcatcggccatatggaatacaccaataggttttacttccataacacacatggggaaagtaggctcgccaccaagtaccaatacatctaaaggatcgccatctaaagctaaagtttcgggtataaaaccgtaatcggcagggtacatcatactgctaaaaagcatacggtcgaaacgaattttttttaattcaaaatcgtattcgtatttattacgacttcctttcggaatttctatcaatacatcaaaagtcttactcatagtctttctctaattaatttttgagggtgcaaaagtactgctttctttgcaattggggaaacctccctcatcttttcttttgtattatcagtctttaaaaatttgttgtgttttttttagaaaaagtaatttcgggttttgtaagtttcgcttataatatttcggtaattttaaaactgaaattcaaactaaaaaaatacaattatggctaacagtccaattaccgttgaaaccgtttacaatgcgcccattgaaaaagtttggaaagccattacaactaaagaagaaatgaaggaatggtattttgacattgaaaattttaaattggaaacgggttacacgtttgaattttggagcggtaccgaaaataaaaaatacctccataaatgtgaaataaccgaaataattccgctgcaaaaactagcgtatacttggcgctacgatggatacacgggtgatagtttggtaacatttaacttgcaacccgaaggtttaaagacacgattaaaacttacccacagcggggtagaaacgttcccaaaagaagaaaaagactttgtaaaaagtaattttcaagaagggtggcaccatttaattaccatttcacttcccaattatttacagcaataaagccgaattagtgttaaaaacaattactatttgtttgttaaagttacgttagcgcaaataagaaaatacttacaaattttggtcatttctgaaaaaaatactttaaataaacttctgattatcaagcaaatttcggctttttaaaatttcaacattacaatattttaaaaaaaattgcctttgccaaaattagttaaggtgcgttaaaacgtgcaatatattctgcaatgctgcgctaatattgcggtgtgggattgctttacccgcacataatcaaacctaaaaaagtaatcaaataaacaaactatgaaaacaaatgtaattttaaaatcgatgctggcgctaatgatcctcgtaggcttcgcatcttgtagcgacgacgatgacgctatggacaatcaaaccacttacaacgcaaaagtgtacattaccgatggccctatagacaatgccgaagtagccggcgtttttgtaactattgccgatgtaaaagttaacggaacaagtgtagatggtttttcaaaaactactgtaaatctgcatgcactacaaaatggtgaaacacaattattgggcgatgtagatttaactgccaacacgtataaccaagtaagtttagtgttggacgaccaaagtgatgcggcaggaaattcgccagcaaactacgtacttacaacaagtaacgaaaaaattgagcttactgcagataacaataccattaatgtaaatagcagttttgatattgaggctaccacaactaatgagattgttatagattttgatttgcgtaaagccatagttgcagacgccacaaatgcgggttataactttgccacgcaaacgcaattagaaagcagtgttagggttattaacaaaaacaatacaggaatcattaccggtacagctacaaataatactggtagcgatggtaaaattgttgcctatgcatatacaaaaggcacctatacagcgagtgaagccgaagaaaacgcagcaggtgtaagatttgcaaatgcggtaacaagcagcgtagcaacaggtacaaataatgaatttggactttactttttaaatgaaggtgcttacgaaattcattttgcatcttatcaagatacaaacaacgacggtgtttatgagtttgaaggaatgattgaagccgaaggcaatcttggattagacttattagatgtaatggttactgccaacaccgaagtatcattgcaagtattattacttgctatctttgggggatagtaagtctttaaactaactaccataaaaaacctcctgctgggaggtttttttattttaaattctttttaaaaactcctttttcttgtatttttatataaataccctcaagttatgaaaatacatttttcacttttcgcagcgctatttataaccatttccctttccttaaactcctgtggcgcgaaaaaaacaacagactgtatagacccagcagctataagcgacggaccttgtactatggagtacgaccccgtttgcggttgcgacggtaaaacctactccaacccctgtgtagccaaacgtgctggtgttaccacttgggtacgtggcgcttgtgaggattgaaattatttttgaagcccctcctttactattacaacaaatttaaatagagataaaaggctctttttatctacagcacatcgataaaatttgttgaatactaaaaaatcttttagtttagtcggtcaaattaacggtttgcccacggcaatttgttaacatccccactaattttctcccctaatttagaaagcctcgtttaatatagatgaagttttcagcaattttttgtttgtatataccacgttaaaagctttaaaacgagtgtttaaagtagcagtggggaattgtaaaaggcgcagagaaagtttgacgataaactttgtttaagcgactaaaaaagagcaaacaatacaatttaatgcacggcttacaatgtttaagctcgcagcattttatttttagactatggatttagtgaaacatttaatcaaaaaaaaatgccccacattggaaggtgaggcggcttaaatgttttcacaacggaataatccttattgtgaattgctttagaattgtatttcaaatatataaaaaataattatagaaccaaactaaccaattatgaaaaaaatattaggacttgacttaggaaccaactctattgggtgggcgttgatagagcacaattttgacaaaaaagaaggtagaattgacgatttaggtgttcgtattatacccatgagcgctgatatcttaggaaaatttgatgcaggacaatcacattcgcaaactgctgaaagaacaggatatcggggtgtaagacgattatatcaacgtgataatttacgtagagagcgactgcatcgggtgttaaatatacttgattttttacctgaacattatgccgagcacattgattttgaaaaacgattaggacaatttaaagaaggtaaagaaataaaacttaattacaagtctaataaagatagtaagttcgagttcatttttaaagcttcgtataatgaaatgcttgcagcatttaaaaaatatcaaccaggtttattctatgtaaaggctaatggaacagaaactaaaattccgtatgactggacaatttattatttacgtaaaaaagcactatcacaacccttgacaaagcaagaattagcttggattattttaaattttaaccaaaaacgcggttattatcagttacgtggtgaagaaattgacgacgataaaaacaaacagtttgttcaactcaaagttaaagaagtcattgactcgggcgaagctgtaaaaggaaagaaactatttaatgtgatttttgaaaacggttggaagtatgacaaacaagtggttaaaaccgaggattggataggcagaacaaaagaatttatagtaactacaaaaacacttaaaagcggtgaaataaaaagaacatataaagctgtagattcagaaaaagactgggccgcaataaaagcaaaaaccgaacaagacattgaacgctcaaacaaaacggttggcgaatttatctatgaagctctacttcaagatcctactcaaaaaataagaggcaaacttgtaaaaactatcgaacgaaaattttataaagcagaattgcgagaaattttaagaaaacagattgaacttcagccacaactttttacaaccaaattatacaatgcttgtattaaagaactatacccaaataacgaagcgcacagaaattcaattaaaaaccgcgacttcctttacttattcctggacgatattattttttatcagcgtccgcttaaaagtcaaaaatctaacatttctggttgccatctagaacaacgaatttataccaaaattaaccctgtatctggtaaaaaagaagaagtaaaacaagctgtaaaagccataccaaagtcgcatcccatatttcaagagtttagaatatggcagtggttacaaaacttaaagatttatgataaaataaatacagataaaggcgagcttgccgatgtaacaaatcaattattgccaagcgaagaaagcttgttggatttattcgactatttacaaactaaaaaagaattagaccaaagtgggtttataaaatattttattgacaaaaaactaataaacaaaagtgaaaaagaaaattaccgatggaattatgttgaggataaaaaatatccttttgccgagaccagagcgcaatttatttctcggttaaataaagttaaaaacattaataacatcagtgaatttttaaataaaaaaacacgactgggcgagaaagaaagcagtccatttgtaactaggattgagcaattgtggcatattatttattcggtttccgatattaatgaatacaaatctgcattagaaaagtttgctttaaaacacgatatagataaagagtcttttgtagccaattttatcaaattccccccttttaaaagtgactatggcagttactctaaaaaagccctcagcaaattgttgcctttaatgcgccgaggaaagtattggaatgaaagtgatatttcaaataaggtcaaacagcgtgtttctgacataatggaacgcgttaacgcacttaatttaaaggaaaattacaacgcaaaagaattagcagaggcattaaaaactgttagtgatgatgacgtaaaaaaacagctcataaaaagctttgtaccctttaaagataaaaatccattaaaaggtttaaatacctatcaagccacttatttggtatatggcagacattcagaagtaggtgacatccaaagctggaagacacctgaagacatcgacacatatcttaaaaactttaaacaacactcactacgcaatcctattgtagaacaggtggttaccgaaaccttgcgagtggtacgagacatatggattcactacggtaaaagtcagctcaattttttcaatgaaattcacgtagaattaggccgtgaaatgaaaaacccagctgataaacgcaaacaaatttcaaatagaaacattgaaaacgaaaataccaataatcgcattagagaaatattaaaagatttaaagaatgatacttcaattgagggtgatatcagagattattcaccaagccaacaagatttactaaaaatttatgaagaaggcgtttaccaaaatccaaaagtagattattcaaaagtaagcgaagatgaaatcacaaaaattagacgtagcaacagcccaaccccaaaggaaattcagcgctatcgcttatggttagagcaaggctatatttcgccttataccggcaaacctattccgttatcaaaactatttacacacgaatatcaaatagagcatattataccgcagtctcgctattttgacaattcattgagtaataaaattatttgcgaaagtgcggtaaatgaagacaaagacaacaaaactgcttatgaatatttaaagaataaaagtggtaatgtaattaacggtcataaattattgagaatagaagaatacgaagctcatgtaaaccgatactttaaaaacaaccgtcaaaaattaaaaaacctactgagtgaagatattccagaaggctttataaatagacaattaaacgatagccgttatattagcaaattaataaaaggattgttaagcaatattgtacgtcaagaaaacgagcaagaagctacctcaaaaaatcttatacccgtaacgggtgctgtaacctcaaaactaaaaaacgattggggactaaacgataaatggaacgaacttattttacctcgatttgagcgtttaaatcaattaacacaaaccaaaaattttacaacatcaaataccaatggtaatactattcctactgtaccagacgacttgctaaaaggcttcagcaaaaaacgtatagaccatcgccatcacgccttagacgccttggttgtagcttgttgtacgcgaaaccacgtgcaatacttgaatgccttaaatgccgaaaaagcaaattatgggttgcgtaaaaagctacttattgttaacgaacaaggagatttcacaaaaattttccaaatgccttggaaaggttttacttcagaggctaaaaatcaattagaaaaaacggtcattagctttaagcaaaacttgcgtgtaatcaataaagccaacaacaaattttggtcttttaaagatgaaaatggcaatattaatcttgataaaaacggcagaccggttaaaaaacttcgaaagcaaactaagggagataattgggccatacgtaaggctatgcacaaagaaactgtctcgggcaagtccaatattgaaacgccaaaaggcaaaattgcaactgctgttcgtggatcattggccgacattaagaacgaaaaacatttgggtaaaataacagatgtgcaaataagggaggtgattttacctaaccatttaaaaaactatgtagatgaaaaaggaaaagtcaaatttgatcttgcctttaacgatgaaggaatagaagatttaaataaaaatattatagccttaaacaatggtaaaaaacatcaacccattcgtaaagtaaagttttttgaagtaggaagtaagttttctatctctgaaaatgaaaattcagctaaaagcaagaaatatgtagaggcagcaaaaggaaccaaccttttttttgcggtttattgggatgaaaaaaaacaaaaacggaattatgaaacagtaccattaaacgaagtaattgcacatcaaaagcaagttgctcatttaactaataatgaacgtttgccaattcaaaccaacagaaaaaaaggtgactttttatttaccctttcacccaacgatttagtttacgtgccaaccgatgcagaggtagccaacaaacaaccaattgattttaaaaatttacatcaaaatcaggtcaatagaatttataaaatggtaagttcaagtggtaatcaatgtttttttataaaggacaaaattgcaactagtatttggaataagaatgaattttcatcattaaataagatggaaaaagatattgatggcaatatgataaaagaacggtgcattaaattaaatgttgatagactcggaaacataaccaaagcataatagcatgattaaacgcacccttttctttggaaacccagcctacttaagtacccggaacgaacaattggtggttaattttccccaagatgaaaaaaaggaaaaaacagtacctatagaagatttaggctatattgtattggaagacccacaaattaccgttaccaatggattgcttatgaaactggtccaaaacaagacggctgttattacctgcaacaagcaacacctcccctgctcgtttttacaaccattagtagggcatacagagcaaacagagcgtatgcggcatcaaataaatgcaagtgtaccccttaaaaaaaatctatggcaacaaaccgtacaagcaaaaattgaaaaccaagcagcacatttaaaaggacgtaacaaatgcgacttaaaattgaagcgatgggcaaaacaagtaaaaagtggcgatggcgataatcacgaagcctatgcagcaggtcattattttcaacaaatctataattgtttactcccagcgtttagccgtaaccacaaaggcatggcccccaataatttattaaactacggttatgccattttaagagccgtagtagccagagcattggtaagcagtggcatgttgccctcggtaggtatttttcatcgtaataaatacaatgcgtattgcttggccgatgatattatggagccctaccgtatttatgtagatgcgatggtatatgagattttggaatctggcgctaatgtagaagagcttaacacagccataaaatcgcaattgctaaccataccagcgctcgacgtttttatagacggtaaatggagcccacttatgaatgccgtaagcagaactacaagcagtttatacgattgttttaaaggcgaaagccgaaagattttatttccagaatttattgtgagccacccttaaatgattgaccaaagtaatttttcacgattaaaccaataccgttgtatgtgggtactagtattttttgatttaccaaccgaaacaaaaactgaacggaaagcggcagggcgttttcggaaaaacttgttggatgatgggttcgagatgtttcaatttagtatttatctgcgtttttgcgccagtcgcgaaaacagtagcgtccatattaaacgcacaaaaaacaatcttcctaaaaaaggcaaggtgtgtattatgcaaataaccgataaacaatttgggatgatggaactttttcacggtcaaaaagaggttattccagaaacaccatcgcagcaattagaacttttttagaatttaaaatgtgtgattgagcgccgttgagacctcagttacctttgcaaaatttcatttctaagcaaaggcgtaaaaaacagaataccagccttttatggcgggtatcctgtgaatagtcaactaaaannnnnnnnnnnnnnnnnnnnnnnnnnnnnnnnnnnnnnnnnnnnnnnnnnnnnnnnnnnnnnnnnnnnnnnnnnnnnnnnnnnnnnnnnnnncctgtgaatagtcaactaaaatacaattctgaaagcaattcacaactagtgccgagcatagaaaatgaagatggcgcctgtgaatagtcaactaaaatacaattctgaaagcaattcacaacgatgagtgccatacattgggggcgtttccacctgtgaatagtcaactaaaatacaattctgaaagcaattcacaactgcaatgttcttttcaagattgcgaaattctcctgtgaatagtcaactaaaatacaattctgaaagcaattcacaacgcacgcccccgataaccaagaggtagttgacctgtgaatagtcaactaaaatacaattctgaaagcaattcacaacaacttacttcaggaaaattaaccgttggccctgtgaatagtcaactaaaatacaattctgaaagcaattcacaacggtttgggtgggtttaaaatttattttcagcctgtgaatagtcaactaaaatacaattctgaaagcaattcacaacgtatgtgtgttacttcaaatacttcagttacctgtgaatagtcaactaaaatacaattctgaaagcaattcacaacagccagttaattcttcggacaatgaactgcctgtgaatagtcaactaaaatacaattctgaaagcaattcacaacacgcagacgatttaaccatttttgagagccctgtgaatagtcaactaaaatacaattctgaaagcaattcacaacagaaagctcattccaaggaataacatatcccctgtgaatagtcaactaaaatacaattctgaaagcaattcacaactacatcaatagaagattgtagtaacaattcctgtgaatagtcaactaaaatacaattctgaaagcaattcacaacttaggtgtttcaactgttaatacgctttcacctgtgaatagtcaactaaaatacaattctgaaagcaattcacaacacaactaggatatgaaagcaatcaaatttcctgtgaatagtcaactaaaatacaattctgaaagcaattcacaacaaagcgatacatctacaaaatcgtgtccaccctgtgaatagtcaactaaaatacaattctgaaagcaattcacaacgccagccacaatcgttcctaaagtataagtcctgtgaatagtcaactaaaatacaattctgaaagcaattcacaactataggtattcgtaaaagttgctatttgctcctgtgaatagtcaactaaaatacaattctgaaagcaattcacaacctgaacactcaacggcatttttgagccgtccctgtgaatagtcaactaaaatacaattctgaaagcaattcacaaccaaacaagattctcttattggattggaaagcctgtgaatagtcaactaaaatacaattctgaaagcaattcacaacccagttgaagctggctctattaaatcttttcctgtgaatagtcaactaaaatacaattctgaaagcaattcacaacgtatcggtagtacttaaagaacgataaaaacctgtgaatagtcaactaaaatacaattctgaaagcaattcacaacgaatgtttgggtacactaaagcatctaaacctgtgaatagtcaactaaaatacaattctgaaagcaattcacaactgtttagttgccatagccaaatatttttttcctgtgaatagtcaactaaaatacaattctgaaagcaattcacaactgtgaagggatgaagcttcatccccatagacctgtgaatagtcaactaaaatacaattctgaaagcaattcacaacgaaactaaaaaagaataattaatcaataatcctgtgaatagtcaactaaaatacaattctgaaagcaattcacaacttcgtattgctgttcttgttgggattttaccctgtgaatagtcaactaaaatacaattctgaaagcaattcacaacggattgaaaccaacggacgaccgcaaacaacctgtgaatagtcaactaaaatacaattctgaaagcaattcacaacaaactaattgttctaaaaaatacaattcttcctgtgaatagtcaactaaaatacaattctgaaagcaattcacaactggcctacgtagatattggcactaccttttcctgtgaatagtcaactaaaatacaattctgaaagcaattcacaactcgacaaacgcaaggacttaagcacctaaacctgtgaatagtcaactaaaatacaattctgaaagcaattcacaacgctacgtattttcgtctgttatggcaaaaacctgtgaatagtcaactaaaatacaattctgaaagcaattcacaacaatatggaaactctgaattttgttccaattcctgtgaatagtcaactaaaatacaattctgaaagcaattcacaacaccacttgataaaccattatataatactaacctgtgaatagtcaactaaaatacaattctgaaagcaattcacaactttaatggtcaagtaaaaccatttagttctcctgtgaatagtcaactaaaatacaattctgaaagcaattcacaacaaatactaattaacatgaatgcaaaaattacctgtgaatagtcaactaaaatacaattctgaaagcaattcacaacagcagctgtgcgggaggcacggccaaatttcctgtgaatagtcaactaaaatacaattctgaaagcaattcacaactggaatttcaaagaaaatttcctttcacgtcctgtgaatagtcaactaaaatacaattctgaaagcaattcacaaccggaaatggttatgacaaaggatttgaagtcctgtgaatagtcaactaaaatacaattctgaaagcaattcacaacagaagaacttaatttaattgaagaaaatacctgtgaatagtcaactaaaatacaattctgaaagcaattcacaactgagggagaaaataatgtttatctgcttcacctgtgaatagtcaactaaaatacaattctgaaagcaattcacaacacgcaaacagataataaaaacattcgacgacctgtgaatagtcaactaaaatacaattctgaaagcaattcacaacatgttttacttgttggttgaaatccatttgcctgtgaatagtcaactaaaatacaattctgaaagcaattcacaactatttaaacttgtttaaatcagcgtgtagacctgtgaatagtcaactaaaatacaattctgaaagcaattcacaacggattgggtaagagagcaatctgaatacaacctgtgaatagtcaactaaaatacaattctgaaagcaattcacaaccaggattgtacttagaactttgcgaagcggcctgtgaatagtcaactaaaatacaattctgaaagcaattcacaacgaggttagaatgttggcttctcgggcggctcctgtgaatagtcaactaaaatacaattctgaaagcaattcacaacttaatacgtttatttaaatattctaacgcccctgtgaatagtcaactaaaatacaattctgaaagcaattcacaacatttagcaattcactcagtttggctgtcttcctgtgaatagtcaactaaaatacaattctgaaagcaattcacaacctttgcatatccattgtattatttttaaaacctgtgaatagtcaactaaaatacaattctgaaagcaattcacaacgacattctgtgtaatgtccaaacacatcgcctgtgaatagtcaactaaaatacaattctgaaagcaattcacaacgtaacgttattagaaacactatttgctgtacctgtgaatagtcaactaaaatacaattctgaaagcaattcacaacgcatacgtagacccaaatgcttcaattaagcctgtgaatagtcaactaaaatacaattctgaaagcaattcacaacaattgtgtgtccgtattgattttgaagcacctgtgaatgatcatctaaaatacaattctgaaagcaattcacaactgagaaattcttacctttatgccagtaatgcctgtgaatgatcatctaaaatacaattctgaaagcaattcacaactgctgttgccgccagcgtttataaattaatcctgtgaatgatcatctaaaatacaattctgaaagcaattcacaaccgaaactgattttttagatgattgggctaacctgtgaatgatcatctaaaatacaattctgaaagcaattcacaacaagtaaatatacaaggacacggaaaacatacctgtgaatgatcatctaaaatacaattctgaaagcaattcacaacaaaatagttgcttgatatttcgataaaaaccctgtgaatgatcatctaaaatacaattctgaaagcaattcacaacgtgatttctacattcgtttagataatgatacctgtgaatgatcatctaaaatacaattctgaaagcaattcacaacagaatattacaatgataaacgaatgataaacctgtgaatgatcatctaaaatacaattctgaaagcaattcacaactgtgtacgcgtccgttgctgaataagctgccctgtgaatgatcatctaaaatacaattctgaaagcaattcacaacccactttcaaaagtgactgaactaccatcgcctgtgaatagtcaactaaaatactcccgatagctatcgggactgaaagcaattcactagagaggtctcgactgcgctcgacctgacattatagtgaacagtcacttaaattaagtttattcgttctcgcaaatagtattttgggtattggtaaatgacgagcatttctgaatccgatgtagtagcttcagcgactcaactatccaaaataagataaggagttgcatacacaacaatcacttagattgagcgatgtaatcttataattagaagtaaggaagtttttaattgagaaaaaaattttattgtttataaagaagatacagccaactaaccacaaaactaacaaacacccccaatactgaagctaaaaaattaaaaccaatgtctactagatcgaacacacggtagggtataaaatattgaatacattcgtctaccacaccaatactaccagcaattaatacagctaatattttgggaaattgaacattgttaccgttacgccttctttcaactaaagcttcgtaaattaataaggcgagtaggccgtattcaattatatgtgagcgttcggcaatagaaaggtccatgcgaagtagtgtcattgtgtaaacaacgcctacacctacgtaaacccaaaaacccaaatgccgacttaaatttgctaaaccactaattataaaagtaagcattaatagtagaaaaaggtaaaaaatactctgttccaaaactctttgccgaaccataaaatctataagctggccgccaaaaaatagcgttgcataaatagcaattaacactgcggccgcccaagtccaaagccgacgctctttatttgatgtaaattttattttggctttcatcaataaaatttggctatactaagggtgctaagtgatatttcactgtaataattgtagcatatcgaattgtattcgcacacttataaatgtacgaaagtatatccataagttttaaaaaagacttattaggttgaaatattaaggcgcttgtgggaactttaaaacgttttatagctattatgccaaatataactttatagctgttttgagtagaacctagatatgtaaattaaaaagtttatagattactttaaaacaaaaaacctccttgctgtctttgcaaggaggttaatggttaaaagattaataaaaacctattttttaattaaacgcttggttatctcaccatttgc

SEQ ID NO: 1266 - DNA, 21805 bp, synthetic construct
  source 1..21805: mol_type = other DNA
  misc_feature 1..21805: note = Synthetic
actgaaacaaagcgatgtgaaattggaacaaagcgatgtgacactgaaacaaagcgatgtgacactgaaacaaagcgatgtgacactgaaacaaagcgatgtgaaattggaacaaagcgatgtgacactgaaacaaagcaataaaacactgaaacaaaattcagtgacactgaatcgaaagagtgtgacagtcaaacaaaatgatctgacactgaaacaaaattcagaaacattgaagcaaaattcaattacatcaaagcgaaaaggtgtgacagtgaaacaaaatatagtgacagtgaaacaaaattcagtgaatgtgaaacaaaattcaattacattaaagcgaaaaggtgtgaaagtgaaacaaaatattgtaacagtgaaacaaaattcagtgtctgtgaaacaaaattcaattacattaaagcaaagaggtgtgaaagtagaaagaaaaagtgtgaattagaaaatgtttggaaaaagtgacatatttgtcagtgaaagttaaaaaatagacgggaaatgatgttttataaaaattaaactcagaaactttttatcgagggaaatcaccatttcagtatctccttccgaagcgggtctttccggaaggtttgggaatgagtagaatgtttagcaggggacgcatatatgcgtctcttgcagtattattttgtcaggaaatttctttttaaattaaaaactaaaaatgaaaagtaaaaacctacacgtactgccggcaaagagcggttgggctataaagggtgaaggtacataatacacgaatcaccaaaacaaaaaagtgaagcaatagaaattgcaagaaagatctctatgaaaagaatccgccgcggcagaccgaaccggtaattcataacaaagacggaaagatcagtgacaaagacagtttcgggaatgatccttttccgagaagagatattaagcattaatttacagattttaatctgaaaatttattatgtttgtatcagtcggcgccagccggctattgttctttcatatttgttcttcctttaattaaaccccgcatgttttttgtgcggggtttttttgtttttcaattatttataaatgaacattgaacatttaaaaatgaattcctatttttaatcaaaattccggaaaacaaatattaataattaaagacattgtccctcgaatccgcttacctcaaaatatcagaatccgtaaaagattttaaaacaaccgaaaagtactatttattttttgcttatttccaggctcacaaaagaaatttttcattccgcattattaattatataagttatactaaatgaagcttaatacaattttagaaaaatacagtgatgtattgttagatcagatctcatcagataaagttcaggaagcactcacattgagattgcccaggtcagtgattactcaggaaataatctctgccctcagttctttgtcttatatttcagataaacttactaattcaaaaccaccaacttatgcatttcttaaaattatattatcagaagaaaattattcggtacctatagatggattcagggaaaaggttttagggaaaattaaagagctaagtattaaatctctttctttatctgaacaatcaaatcataaatattacaatctttataaaaatattttgaaaagttcttggagcagtaatgatgatattgatgaaagcgaatcatctattttagaggctttaagaggagaattaaatatatggaaacatgagcattatataatagaacatcatcctgagatactaaaactatgggatctgaataacaattatgttgtttcaagaaattttcttctttcgacaggattaattcttacatacgaaaataattatgtaattgccgaagaagtagccattcaaatagaaagggctttaggaattgaactgaatgatataactctgaaaagaatgctatcaaattttaagaaagaagaactttctaaaatattggaaatcaatggtttagcaatcagcggatcaaaagaagaaatcatagaaagaattttgagtgctgttattcctccttctgaactgcttaatgtttttcagttagaaactttaagagaatattgtaaaggtaactcaattcaaagcagtggagtaaagggtcatgttattaataatattattcaacactttgatcaaaatctggatttagtaaaggaggcagacgaaattttaccaatcttgattccagaaactccggaaataagaattctagataaaacaaatttttcgaaaattctttcttacttgactaacaatcaattatatgatgcattatttcaatgttccttacaaagaagcggaacgaaagatgaaaagatattcaggctggtagaaagcaattggtcagaaaaatcaatattgaataaattgaggaaagaagatctttccacaatatgcagaaagcttggtctgaatgtctccggagttaaatctgaacttacagatagaattttatttgaaccatttatttttaaatctaagccttcagaggaaattcaaagcattaactcagaaaacattttagaaaaggaaacattcaaggtcgaagtcgaaaacgaaaatgaatctgaaattcaaaaagaaattgtagaaaatattacttcaccattaccattatgctttgaagaaataaattccaaatactcagatttacaatatgatgaaaaagtgattctctctttgataaaggatataaaatcaatgactgaacaagacattgaacgatctgttttaagacataaactaagatggtttttacataaagctcacatgatggatttaatttcaaaattagagttaagtaatgaaaatccaataaaaattaaaagtgcaggtagtgttaacatttatgaatgggttgggaatgctcctcaaaaagaagaagctatagaaaaaagatcagcaagagatataatcgatgccttaaggcaaggagttgttccaaataataacttaaacttgctggttgtggggcaatcaaatgccaggaagcatttatgcgatttgttggaagaagcaaacttaggaaagtctccttttaaatttatcaggggaccttatggctcaggaaaaacatttgtatgctcatggttaaaagaatatgccctgcaaaacgaatttgctgtctctacaattaatataggtcctgatcaaccattatcagatcttccggtttttttctcaggtcttataaacggacttcgaacaccggaaaagaaagaatcgagtgcattagaagatattttggaatcctggttattaaacattcataagaaaactgcacaaatagaaggtttaaatatatttgataaaatcactagagataaattagataagttaattgaaattgtagaaaaaagagttgaatcagagctttcaaatatttctgatattgacccgggatttgcgcctgctttaagagcattttattttgctaaatataaaggtgatcaaaaatctgcatcagctgctgttgcatggcttacaggaagtcgctcattgtcggggcagtctttaagagatattggagtaaaaggatatctcgaagcaaataatgtgttttcaagaattagagctttattagaagttattaacggggcgaagtatagaggattggttttattggtagatgaactagaactcgtaagaaaatttcctcatacaagacagcgcgaacaagctttagaaactttaagattgttaatagacgaatcagggaaaaatggtttaccgggttgcctggttttattaacaggcactgacgagtttttcgaagatgaaaggtatggtcttaaaagctatcctgctttagcagaaagagttctaatatcacctgtcaatgaaaactttataagtatgagacaaccgattattacattagaaggattagataaggaaagattattaagtgtcatttcaaaaatccgagatctgcacgggattgcatatgaatggagttcttctgaagttgtaaaggatgatgcagtaaataatctaatagatgactggacaacattcggagattcaaatataagcagaaagccaagaccggtattaagagaatttatacatatccttgacttatgtgaagaaaatcccggagttaatgttaatgaatttattaaaatgaacagcaatacagatgttacttcaatgataccttcaattttttctaatacttaatataagttattgaatccttcgactctaattcatccaaatttgttaaaatatgttattgatgataaaaattggaaagatcttacagacatacaaaaagaagcaattccagttatattaaatggaaatgattgtattattgaagcacctacttccggtggaaaaacagaagcggttttatttcctactctaactactgcttcgaataataaagctgaaggtgtcagaatattatatattgctcctttaaaagcattattaaatgatatagagttaagagcaaaagtttatgctcctctttgtggattgagatcttttaaatggcatggagatgtcagtcagacagaaaagttaaaacaaattatcctccctccacaactattattaactactccggaatcactggaagctatactcttaagaaaacctgactggacaaaacttttttcaaatttacagtctgtcataattgatgaaacacatagctttgcattaggtgacagaggttcacatttattatcaatattggaaagaattgaatatgatattaagttaaaaccgcaaagaattgcattaacagcaactattggaaatcctgatgaattattgtcatggctagctggaaataaaagaatacctggggttaaaatttccgtgcaaagtaaatttgataaagaaaaagattacaagatctgtcattttgatgacgaacttgacgaattagaatccggaataaataatgcaagagatctcactgaatatctatataagttgttagcattaaaaaaaacaattgtctttggaaattcaagatcaaatactgaacaaattgcaaagtttgttaatgaaaaaaataaactcataaattccaaaaaccctatacaagtaagaactcatcattcttcagtaagtaaatattacagagaactggctgaagacatgataaaaattaaaagtgaaacaggaattaatgcaataataagtacttcaactcttgaactgggaatagatataggtgaacttgatcaggttatacaaatggggggattatcgagttcaagttcttttttgcaaagagtcggaaggacaggtagaagagatggtaaaccgcaattcttcagagcacttacacaaaacaaggaagatttaattttgatgtgtgcttgtataaatttaggattgaaaagaatttcagaagcaataaatttttctaaaaaagcatatcatattttagttcatcagattatttgtttaagtttacaaaaaaatggtataagcgttgatgaagcatggcaaatattttccggagcatattgcttcaaaaatatttccaaggataaatttttacagcttattgaattcatgataaagaatgatttaataagggatactgatggtatagtcgttggagaagttgtggaaaggcaattcttatttgcaaattggaaaagactttttgcagtttttgacggcggacctatgtacaatgttgtaaatgggaaagagcatgttgggatgcttgattgtgcatttgcgcgaagtcagaaaattccatttttgtttgtattaggcggaatagaatgggaggcaattaagattaatcacgaaacgcagcaagtgttagtacataaaacgaaaattggaactgcaccaaaatggaatgtatttggaagctttgatgtaccttatgaaactgctcaggaagttggaagaatactgacaggtaaaagtagtattgatttcttagataaaaatgctgcatctggaattgaatatctcaggaatcactattataatctcaaatgggaagaaaatacttggataatagaaatggaaggattaaataaaatatgcctgtggacatttgggggggaaaaattgaacagaactattgcaaattttattgatactgatcaaaacattaagtcaacttatgattataaatgtattgtcattaagaaagaagagggtactaataacacagatcataaagagcaaaatgaattttccaatacaattttaaatttgttgaatcagatatatcagttaattcatgatgaaattgcaaataaaataaaaactaatattgtgtcagttaattattccaaattttcaaagttcattcctgaagacttatcaaaggaaagtattattgatagtaatatggatgttggtttgttgaagaaaatattttcggagattaacataaaaatatttagaaatgaaaaaaattaaattaaaaatttttcccattaataatttatttcaccaccgttattggtcttccggaaagtttgcactctgaaaatttgaaaagtagtttgcattttattgcaaactttccggcgaccaacaacaaacccgttgataagcgtagctcctttataccattctgaattatacttgtaatgaaaatataatggaattatcttagacaggattctgcaaaagggagttaaatatcataataatcctgtgaatcctagatggaacttagttgaaaatcaggagaactataaatattcttccgaaaagttttattttaaagggattgaagaatttggatttcttgaacactacatggatgtataaaagtggttctttcatgaaagggtctttgttgttggtcgccaaaaagtttgtcaggaattattctttcttgaaatcgtcaaaaaaacttttggaagaccaacgacgacgagatataaaaaagtttaataattgtattttaatattaatttattttgttaaaattcaacaaataattaaatgcattaataatataaaaggataaacaagtgtggacttcagataaattttacatttctaaactttttctaagatcagatatttgtatataaaaaagaaagcggcttcaatttcttgaaaccgctttaaatgttttcacaacggaataatccttattgtgatttgctttcaaattctgtttacaaattaaataattaataaatataaaaaaatactattatgaaaaaaattttaggtcttgatctgggaaccaattctataggatgggctctgattgaaaaagaaagtatggaaaacaatcttttatccaatgggaaaataattgcttccggatccagaattattccaatgtcacaggatgtattaggaaaatttgatagtggtgtttcagtctctcaaactgctgaaagaaccaattatagaggtataagaagacttagggaaagacatttactccgcagggaaagacttcatagagttttgaatattcttggctttttaccacctcattattctaaagaaattgattttgaaaaaaagctcggtcaatttttacctgagaaagaacctaaaattgcgtatagaaaagttaaaaataaatcagagtttatttttgaagattcgttcaatgaaatgattaaagattttgaaaaacatcaacctcaattattaaaaaaagataacggagatcctgcccttataccatatgactggacgatttattaccttcgtactaaagctttaaataagaaaataggaaaagaagaattaagctggattcttttaaacttcaatcagaaaagaggatattatcagttaagagaagatcaggaacaggaaaatgagaataaaatttctgaatatttttcattgaaagtagttaatgtaacagcagatgatgcaaaaaaaggaaaatcagaaatctggtatagcgtgcatttagaaaacggatggatttacaggagatcaagtaaagtatcacttgcagactggataggtaaaacaaaagaatttatcgtttcatgggaattaaatgatgataatactatcaaaaaagataaagaaggtaatgaaaagagaagttttagggcagtggattcagaaaaagactggattgctataaagaaaagtaccgaagagagaattgaaagaagtaaaaaaaccgtaggtaattatatatatgacacacttcttcaaaaaccatctcaaaaaattaatggtaaattggtaagagtaattgaacgaaaattttataaaaaagaattagaaaaaattttagataaacaaaaagaatttcatcaggaattgcaggatgaaaaaatttacagtaaatgtcttgaagagctttatgaatttaacgaatcacatagaaataatattattaaaaaagattttactcacctttttcttaacgatattattttttatcaaagacctttgaaaagtaaaaaatctttaatcagtaattgcaagtttgaaagcaggatttttataaaagacgggataaaagaaatttctccgattaaatgtatcgctaaatcacatccactatttcaggaattcagattatggcaatttctgaaaaacttaaaaataattgaacgggaaaaaaacgtagacgggaaattgcagtttgatgtggatgtcacaaatgaattcttaaaaactgaagatgataaagtgaaattatttgaatggctgaatgaaaaagaggaaatagatcaaaaatcgtttttaagatatccgggatttaaaataaaaaagaatgcagaaaaattcagatggaattatctggaagacaaaagctatccaatgaacgaaacccgatctaaaattcaatcaagattaaataaagtagaaaatattcctgatgattttttaacaaaagaagttgaattgaaactttggaatatattttattctatagaagataaatcggaattaaagcaagctttaaaaaattttgcaaacaagaatagtttagatgataattttactgatgtttttttaaatttcccaagatttaaaaaagaatatggttctttttcatttaaagctataaagaaaattttacccttaatgaggctaggaaaatactgggatgaaaacaatatagatccaaaaactaaagaaagaattcaaaatattatttctgcagttgaagatgaaacaatcagagaaagagttagagataattcaataaatcttagtaaaattgaagattttagaggattacctacctggttaatttcatacattgtttataacagacattcggaagatgagatctcatcaaaatggaaaactcctaatgatattgaactaattaaacaacatggaataagaaatccaatagtagagcaggtgataaatgaaacgcttatggtggtaagggatatttggaaaaaatacggcaacagtgaagaaaattttttcgatgagattcatattgaactaggacgtgaaatgaagaatccgaaagataagagggaaaggatgactaaacagataaatgaaaatgaaaatactaatttaagattgaaatgtttattaattgaattattaaatgacagcaaaattgaaaatgtcagacctcattctcctatgcagcttgagattttaaaaatctatgaggagggggcattgagttcaactaatggagatctacccgatgatatattgaaaatttcaaaaacagcatatccgacatcatctgaattaatgaaatataaactctggatggagcaaaaatatgtctcaccatataccggtcaggttattcctttaagtaaactatttacccgagcttatgatatagaacacataattcctcaatcaagatattttgacgattctttcagcaataaagtgatatgtgaatcagagattaatatagacaaaggaaatgaaactgcttatgaatatattaaaagcaattccggtaaatccattgaattaagccaaggtggaattgtaaatttgtttactacagatcaatatgaaaattttgtaaataaattttatttcaattccagaggaaaattgaaaaaattgctgatggatgatattcctgaatcatttattcaaagacaattaaatgactcaagatatattagtaaggttatgaaatctttaatgagtaatatagtgaaagaaaaagatgagcaggagtctatttcaaaaaatgtgatagttctaactggcgcagtaacttcaaaactcaaacaggactgggaactaaataatgtatggaatgaaattatatatccaagatttgagaggttgaatgaactgacaaatagtaatttgtttggcgattggacaatgaaagatgggaaaaaagtatttcaaacacagatacccattgaaatggaaaaaggatttagcaaaaaaagaatagatcacagacatcacgctttagatgcaattactattgcctgtgctacaagagatcatgttaattacttgagtaacgaaagtgcattaggcaaggataaaaaggatgttaaagaaaagagaagatatgatcttagaaataatttatgttttaaaaaatataatgatgaaaaaaaacaaaattataactggatattcaaaaaaccatgggaatcttttacagaagatgcgggaaattcaatttcaggaattatagtaagttttaaacaaaatctcagagtaattaataaaactattaactggtatcaaaaatggcaaaaaaatcattccggtgaaattaaaaagacttttgtcaaacaggaaaaaggtgaaaactgggcgataagaaaaccaatgcataaagaaacagtttcggggttagtaaatttaaaatttacgaaaacagtctcgttatcaaatgcaatatctgatcctgaaacgatatgtgatattgaattaagaactaaaattaaagaattaataagtgaaaagtatgataagaaacaaatattaagtttttttaaagagttaaataatgtttggaaagataaggatatttcaaatattgatgttttttattttgatgacaattatgtggcatcaagaaaaagtatagatgaaagttttaattcttcaaagattgaacaaataaccgataccggaattcaaacaatactaaaaaaacatttaagtaaatttaataaagaaataaatggtaagatcacagaacaacccgaattagcattttcagcagatggtattgaagaaatgaataaaaatatttttgaattaaacgggaatgtaaaacacaaaccaatctataaagtccgtattttcgagaaaaaaaataaaaaattcatagttggaatcacaggtaataaaaaagacaaatatgtagaagcagctacaggaacaaatttgtattttggaatttatcaggatgagaatggaattagatcttttgaaactattccttttaatgttattgtggaacatcagaaacaaggaactgaatcagttccactggtagataataaagggaataagttgttgttttatttgtcaccggatgatcatgtatatgttcctaaacctgaagaaatagaaaaaaactttaacgatattatagcagatcttaataattttgataagaatattatttcagatagaatttataaagttgttaaatttacgggaaatcaatgttactttattcaaactaatatttcaagtttgatacttccatataattctatcctgaaaaaaggtgaatttggaagtcagaactgctctgaaaaaacagttgacaattcacaaatggtaaaacattgttgtgtcattttaaattttgaccgccttgggaatttaaaataaggtaaaatgataaagcgaactctttattttggaaatcctgcatatctcagtttcaaagatgatcagcttaatattgaaattagagatatcagtattaatctaaatgaaactaaaattaaatcagattcatcggaaaaatccgaaaatgaaaatgataaatatttaaaaagaaaatcccgaaaagaaactattcctgttgaagatattggaatagttattctggaccatcacggagtgagcacttctcagtatttaatctcaaaactactggaaaataatgtatccgttatcttctgtaatgataagcatcatcctacaggtcttttattgaatcttgacgggaatacaatccaatcggaaaaattcaaatctcagattaatgcatcaataccattaaggaagaatttgtggcagcaaaccgtttcttcaaaaatattcaatcaggcagtactcttaaaagaaagaggagtcattatcggcaatatgcttaactgggcaaaaaatgtaaattccggggattcaaaaaatctggaagcaagagcatcagtatattactggagaaatatttttccggaagaagttaattttttccgggacagattcggagatcctcctaataatttgctgaattacggttacgcaatattaagagcaattgtagcaagaagtcttgttggttcgggattacttcctactctgggaatacatcacaggaataaatataattcatattgtctggctgatgacataatggaaccgtaccggccttttgttgacaaaatagtatatgatattttaaccgaagaaaaagatatgtttgaacttactacagaaattaaaaaagaattactaaacatacctgttgtagatgtggttattggcggagagaaaagtccattaatgatagcggtgcaaagaacaacttcatcacttgcaaaatgctttgaaggaaaaattaaaaagatcatttatccggagtttgtgtaatgcggttggatgaattcagaattatgtggatactggtttttttcgatctgccgactgaaacaaagagagacagaatcaactatacccgtttcagaaaaggaataatgaaagacggattcagtatgtttcagttctcaatatatacccgtcactgtatgagccgggagaatacagaagttcatataaaaagaataagatcaatactgcctccgaaaggacatataggaatattaaggataaccgataaacaattcggcgaaattgaaatattctatgggaagaagaagaatgaaaataaaaaacctcctccacagcaactcgaattattctgaatagaaaaatcttaaatgtttagttaaaataaaaaaaggaatagttttaaaactattccttttcttttccgacaatatttttcagttctgatattcttgttaagttctataaatattagcaacttagctataacgtgctgttgcaaatattgtcaaagaactttttgaaagcaaatcacaacataacactaaacttataatcgatggaaacagctgttgcaaatattgtcaaagaactttttgaaagcaaatcacaactgcactgtgtgatgtttctgtttgggatatgctgttgcaaatattgtcaaagaactttttgaaagcaaatcacaaccagaggagtagttgagtaaatactgtcattgctgttgcaaatattgtcaaagaactttttgaaagcaaatcacaactagaaactttgaataatgaaatctgaagtagctgttgcaaatattgtcaaagaactttttgaaagcaaatcacaactcctgcaggagtctcattttgtgatgaagagctgttgcaaatattgtcaaagaactttttgaaagcaaatcacaacaacgtataagagatactccccatagtatctgctgttgcaaatattgtcaaagaactttttgaaagcaaatcacaacagcctgccaatagacagtcagctctcttatgctgttgcaaatattgtcaaagaactttttgaaagcaaatcacaacccagagctgatattggtgtcttgagtaaagctgttgcaaatattgtcaaagaactttttgaaagcaaatcacaacgtaatctgcttctgacagacatcgcatattgctgttgcaaatattgtcaaagaactttttgaaagcaaatcacaacgtaaccccgttaatgtcattcgtgaatcctgctgttgcaaatattgtcaaagaactttttgaaagcaaatcacaacgccatttgaaagatgaagctgataagcggagctgttgcaaatattgtcaaagaactttttgaaagcaaatcacaacttttctgtttgtgatccctcatacttttctgctgttgcaaatattgtcaaagaactttttgaaagcaaatcacaacagaatctaatggatattatcttgcttctcggctgttgcaaatattgtcaaagaactttttgaaagcaaatcacaacaggaaaagtattaggtgatttttttttaaggctgttgcaaatattgtcaaagaactttttgaaagcaaatcacaacaaaaaattataaagtctcattcccagggaggctgttgcaaatattgtcaaagaactttttgaaagcaaatcacaacaaggcacaaaacaggatttagaacttttcggctgttgcaaatattgtcaaagaactttttgaaagcaaatcacaacgctttttgccaatatcttgcaacccatcttgctgttgcaaatattgtcaaagaactttttgaaagcaaatcacaacgaatattgaaagcaggggatttattagaaagctgttgcaaatattgtcaaagaactttttgaaagcaaatcacaacgcagattgggaatgtgcttgtttataagtgctgttgcaaatattgtcaaagaactttttgaaagcaaatcacaaccttcaggtgtaaatgctttggaatctaagctgttgcaaatattgtcaaagaactttttgaaagcaaatcacaacgaatacgtccgcatattcaatgagactaagctgttgcaaatattgtcaaagaactttttgaaagcaaatcacaacataacggataaatgaaagcattaatagcagctgttgcaaatattgtcaaagaactttttgaaagcaaatcacaacggttgaagatgtattgatacctaacgaactgctgttgcaaatattgtcaaagaactttttgaaagcaaatcacaaccatggcgcgtctttctgatcacaagatcatgctgttgcaaatattgtcaaagaactttttgaaagcaaatcacaaccaatgagggagcttaaagacggctgggctgctgttgcaaatattgtcaaagaactttttgaaagcaaatcacaacaatctgaagtatggagagacacacttgcaggctgttgcaaatattgtcaaagaactttttgaaagcaaatcacaactaacatgtatatcacaagttctttttatttgctgttgcaaatattgtcaaagaactttttgaaagcaaatcacaacataacaataaacatattcttgtatcaatccgctgttgcaaatattgtcaaagaactttttgaaagcaaatcacaacagtctgaagtatggagagacacacttgcagctgttgcaaatattgtcaaagaactttttgaaagcaaatcacaactacaacccatttacctttaaaccattttttgctgttgcaaatattgtcaaagaactttttgaaagcaaatcacaaccatcttcggtttgttcatcataccatttctgctgttgcaaatattgtcaaagaactttttgaaagcaaatcacaaccttagttcatcatagctcatatcaagtgtggctgttgcaaatattgtcaaagaactttttgaaagcaaatcacaaccttagttcatcatagctcatatcaagtgtggctgttgcaaatattgtcaaagaactttttgaaagcaaatcacaacgcgttgtagtcattaatgatttgagtgaaggctgttgcaaatattgtcaaagaactttttgaaagcaaatcacaacaaatatgcacgggtataacattgtgacgccgctgttgcaaatattgtcaaagaactttttgaaagcaaatcacaactttaatcattaaggtatgtattttatttgagctgttgcaaatattgtcaaagaactttttgaaagcaaatcacaacatctgggggaggtagtatttactccgtttagctgttgcaaatattgtcaaagaactttttgaaagcaaatcacaacggagattagcgaaacagccagatataatttgctgttgcaaatattgtcaaagaactttttgaaagcaaatcacaacaagggactgattatacagaagacaatgtcagctgttgcaaatattgtcaaagaactttttgaaagcaaatcacaactcatttcgctgattcctggatcaatataaagctgttgcaaatattgtcaaagaactttttgaaagcaaatcacaacgatatgtctgtaatttcagcaatgaacattgctgttgcaaatattgtcaaagaactttttgaaagcaaatcacaactaatggggattaatgatgaaaataaaaaaggctgttgcaaatattgtcaaagaactttttgaaagcaaatcacaacagattttgatttagcttctggtagaatagtgctgttgcaaatattgtcaaagaactttttgaaagcaaatcacaactggatcaactgtagatgctgttcaaagcgggctgttgcaaatattgtcaaagaactttttgaaagcaaatcacaacgatctgactaccattacctataagattgccgctgttgcaaatattgtcaaagaactttttgaaagcaaatcacaacgggttttcgttcattatgttcattaattatgctgttgcaaatattgtcaaagaactttttgaaagcaaatcacaacatcttccctgtgcttatgactccactgaaagctgttgcaaatattgtcaaagaactttttgaaagcaaatcacaaccctgtgaagtaaaatcagtaatacttactggctgttgcaaatattgtcaaagaactttttgaaagcaaatcacaacctgcatcatagagtatagtaatatcctcacgctgttgcaaatattgtcaaagaactttttgaaagcaaatcacaacgtatagggatatataagcctaagacaagccgctgttgcaaatattgtcaaagaactttttgaaagcaaatcacaacagaatttggaaagtgcaaaaatgaaatctagctgttgcaaatattgtcaaagaactttttgaaagcaaatcacaacgaaattctaactttgaatgtaaagaatttcgctgttgcaaatattgtcaaagaactttttgaaagcaaatcacaacaatcaatgttacatacctgcctacaatttcgctgttgcaaatattgtcaaagaactttttgaaagcaaatcacaacaagaatttgttttgaagcttaaacaacagggctgttgcaaatattgtcaaagaactttttgaaagcaaatcacaacagctcacacaaaggaaaagactttgaagcagctgttgcaaatattgtcaaagaactttttgaaagcaaatcacaacactcgcatcattcctccgctgtggtcgctagctgttgcaaatattgtcaaagaactttttgaaagcaaatcacaactattcgcataagttgccgctgaatctgccagctgttgcaaatattgtcaaagaactttttgaaagcaaatcacaactacatcttctgccataaaagatttattcatgctgttgcaaatattgtcaaagaacttttcaccgccgttattggtcttccggaaagtttgcactccagaagtttgaaaagtagtttgcattttattgcaaactttccggcgaccaacaacaaacccgttgataagcgtagctcctttataccattctgaattatacttgtaatgaaaatataatggaattatcttagacaggattctgcaaaagggagttaaatatcataataatcctgtgaatcctagatggaacttagttgaaaatcaggagaactataaatattcttccgaaaagttttattttaaagggattgaagaatttggatttcttgaacactacatggatgtataaaagtggttctttcatgaaagggtctttgttgttggtcgccaaaaagtttgatcaaatctacttctttcttgaagatagttctgcaaactttttggaagatcaacaacggcgggaaattaatttttgaccagtctaaagcaatgtagtgcttgtaaatttcattttttgtaatttgtttcataagggttcctttcagttaagaagttcatcaccgccgttgctggtcttccggaaagtttgcactccagaagtttgaaaagtagtttgcatttcattacaaactttccggcgaccaacaacaaacccgttgataagcgtagctcctttataccattctgaattatacttgtaatgaaaatataatggaattatcttagacaggattctgcaaaagggagttaaatatcataataatcctgtgaatcctagatggaacttagctgagaatccggaagattataaatattcatctgcaaaattttattataaaggggttgacgaatttggaatacttgaaaactatgtggatgtataaaggcggttctttcatgaaatggtctttgttgttggtcgccaaaaagtttgttaaagggtacttcttacttgaaaattgttcaacaaactttttggaagatcaacaacggcgggaaattaatttttgaccagtctaaagcaatgtagtgcttgtaaatttcattttttgtaatttgtttcataagggttcctttcagttaagaagttcatttttctacggaaaatcgtagctaatacgaaaataatccgtactaactcaaattgaaagtgagccctttgttaatttaccgacggcggaaaaaaagttttctctttatcagaattatcccaatccattcaatcctgctactacaataaaattcgatatcagaagctctgcctttacacaactcataattttcgatgcgctcggaagagagattgaaacacttgtaaatgaagatctgaaacccggaacgtattcgttgacattcgacgggagcaaatatacgagcggagtttatttttacagattggtttcggggtattttgttgagacgaagaggatgctgatggtgaagtaaatttgggatttgggttttttgttgcgtacttatttttattgtttcatgattttaccaatctaaccaattaaccaattaaccaattaactaattaacccattaactaattaactcctctaattcctatctattttgccggtactttttgcttggcaaatgatctcaattttgactcttctttatgactcaatttcttaccattatttatttctgttattttaatttcagaaggagtttctttttccgatattttattttgcggtattttctcagttaattcaatagcctcatccagtcctttgaatatgctattttttatttcagctgaagttctgcactttttcatttcttatttaatatatctttaattaatgaaatctttttcttgatcaatgttttatcctttgcagttagattatctttttcattcttctttaaaagtgagattaaatatatgattttgtattcctcgatgtctatatacaatactctgattcctcctcttttaccttttccttttatgctccatcgtaattttcttaatccttcagtacctgaaattacattaccgattttcggattaattagtaaataattttgcaagtgtctcaattcttcatcatcatttccggtttcactccagagattatcaaactccaaagtgatgacaaacatccttttcatagattctgtaaattattcatcattgcctaattcaaattaataccatcggctgaaaaaatatagtaatactaagtaaatttcaaaccatatttaggttttgggattttaaatttcaactgccttcgcagagtcctctctttaaagattttcaaaccttgcaaacattgacggagaataactctgcggaaacgacatgaaagcagcgagtttttgttgaaaaatttattgtataatattcgattccagtccttattgcaatcatttctcaaaatttaagatttaaatatagtttttaggagcgaggatcgggaaaatttcttttttgatttattagttactcttattagtttgtctgcaagaataaatcataagagaaggagggagtttttgataagaccacaattaaaccgaagtaagattcattttaacatttttataaaataatttattaacttccggtgagtttgctgagacaaagagtatgaccatgctgaaataatttcaaatttcaaattacagctaaagttctagtaaagtcaggacttacgtcctgacgcattaaacttataacttcaaattatataccctaatacttataggattgtcaaagtaaatactgattggcaattttagcttaatgaatccggatggtatctgcgtcaggacggaaatcctgacgacactgagtcaaaatcgagcgacaaattaaaaaaagtgtccctgtacagataataaatttttatttcccgccgttattggtcttccggaaagtttgcacttcaagaattccaaagataactaaattgcattacaaactttccggcgaccaacaacaaacccgttgataagcgaagctcctttataccattctgaattatacttgtaatgaaaatataatggaattatcttagacaggattctgcaaaagggagttaaatatcataataatcctgtgaatcctagatggaacttagttgaaaatcaggagaactataaatattcttccgaaaagttttattttaaagggattgaagaatttggatttcttgaacactacatggatgtataaaagtggttctttcatgaaagggtctttgttgttggtcgccaaaaagtttgatcaaatctacttctttcttgaagatagttctgcaaactttttggaagaccaacgacgacgagatataaaaaagtttaataattgtattttaatattaatttattttgttaaaattcaacaaataattaaatgcattaataatataaaaggataaacaagtgtggacttcagataaattttacatttctaaactttttctaagatcagatatttgtatataaaaaagaaagcggcttcaatttcttgaaaccgctttaaatgttttcacaacggaataatccttattgtgatttgctttcaaattctgtttacaaattaaataattaccgccgttgttggtcttccggaaagtttgcactctgaaaatttgaaaattagtttgcattttattgcaaactttccggcgaccaacaacaaacccgttgataagcgaagctcctttataccattctgaattatacttgtaatgaaaatataatggaattatcttagacaggattctgcaaaagggagttaaatatcataataatcctgtgaatcctagatggaacttagttgaaaatcaggagaactataaatattcttccgaaaagttttattttaaagggattgaagaatttggatttcttgaacactacatggatgtataaaagtggttctttcatgaaagggtctttgttgttggtcgccaaaaagtttgatcaaatctacttctttcttgaagatagttctgcaaactttttggaagaccaacaacggcgggatcgtagctattacgaaattaatccgtactaactcaaattgaaagtgagccctttgttaatttaccgacggcgggaaattatgatatgaactaatttattaaagatcaaatgataaaaactaaaaa

SEQ ID NO: 1267 - DNA, 21579 bp, synthetic construct
  source 1..21579: mol_type = other DNA
  misc_feature 1..21579: note = Synthetic
acgatacgacacagggcttgcctgcctcctcagcatagtcgaagagatacttgaatcccaaggcatcggtagcactggtatacatctcctcgcagttcttggcaatcagcgactcatgacccgtcacgacattggcaacaaggcagacctcactgccataggctattccgcgataggtttcatgtccgctggcaacgatgcctgctgtgtgggtaccgtgctgcatcagctgggagtctgtcgtatagccgagtcccatcagtgccgccctacccttgtaggtgcggcctacgggcatcatgccgtcgccgtcgggagccaacatatcccatagggctcccacgcggtagctgctatgggtggcgtcatagaagatagggtgtgtcaggtcgaagcccacgtccatcaccccaacgatgataccctcgccggtataggcaggatggccgccatcggcaacgtagcacttgtcggcaccgatgatgcttgccgtggtgtcggtggtcagcgaggcacgctcgttggcttcgacgcgcatcacctcgtcgcgctctaccagctcttccaaccggctcacgggtacctctacgatggcgatgtcgtccaactgtgcccacttctttccatcgaagtctgccatgagtgcatcggtatgttcaggcttcacttgcaggaacactatcgttctcggctctgccggctcactgcccagtgccgttgccttgcgctgacgcatcagcgacttgccgtccacgcctttccttgcctcctgcacctgccggctctccaccaacatccgtacccatcccgacatcttacccttaccgtcctgacgggcaaagagcatcaccgatcctaacagcaacacgattgctgcactatatttcaataacttcatgccgacaaaggtactatgaagcgaatacaaaacaaaagaaatcatcatttttgttgccaagcaggagaaaaaacaatgtagacggacggagtgacgaaagaattacttatcccgaactggcgtatactcttttattccggataaaacatgatgtgcatatagtttccgtccccataaccgaaacgctggataagcgtcggaccgtcgtagatggcttgcagttggagggctatgccgtattctgcgagacggaagaacgctttcggctgttttagctcatcctccgtaaacttgtataactggctgttgttgttgaactctatgcggatatggtggtcttcaccattatagttcaactgcaagagcatgacattgggaatgaaagtccagttaacgtgtgaatagtccgtatcgtagtcgaagccatagcgggcagtgatggtctgcggggaagcctcggcaagtgcacggctcagcccttcgtctgcatccacgacctttgaaatcagcgatacagggaagttctgaaagaacacatgctgcatcttgtagtcggacacatcgagttgcacaccgtcgagtactacttcgtgggctttcgttatgatgtgccgccctttctcgtccgtcaagtccttgcaatccttgtctttgtagacgatggcatactgtccgggatattcgcccgaaatgttctgcacatacttctccttttgttcgctcgtcaaccgcttcaccacactgttgtcgccgctgcaagaggccagggagaaagcagcaagtatcgcgaaggtaccgattaagcgagaggaaagtgatacctgcattactttcccgaacgtgaagtggggcgaccaaagaccaagcgcgagtctccaaattctcattgatttcattttcatcatttttattctgttttttcatgctattgtcaatatagcgatgaaacgtagaaattattgccccaacggtcattttttcggttcaatatcccattcgcgaggtgtccacctctttctttttcttctccttgaacttgccgatacggtagatggcggtgagagaatagttggtgtagggcatccagacgcgcatggcgtagtcctgatgggctatcgtggagctggtgctcatgtgggcgttcaggatgttctcgcccttggccacgaggctccactttccgttcttggaggtgtaacggagcgtggcattgagtcgcaggaaggggtcgatatcgtagacgccctggatggctttggtctggaagaacggattgaggatgaactggatgttgtgcttcttcgacaatcgggcgacgaccgtaccgccaagaatgccagagagacgggtgcggtcgatgggcaggtcaaagaattgggtcttgtcgtgacgatagagggcagtggcattgatgttaccgttgagccattggccgacgcggaactgtgcagaggcctgcagcccgtagtagttggaatagtcgaaattggtctccttcatgataacggccatgcggtctgtgggttgataggccatctgcacgaaatagtcgggctccagcatggcgaaggcggtgaaggtgtatttgcggttcagctgccacatcaggttgatgtcgtatttcgacatgggcttcaggtcggggttgccccatatctcgctgtaggcggaggcgtagtagatgctgctcatggtgctccagtagctgggatagacagcttcgctgctgaacgaaaggttgagcatatttttctcgttaacgttccacatcgcattgaactgcggatagatgcgccactcgttccacttggtggcatggtattgctcggcagtcacagacgcttccaggttcagcgacgttccaatctgtttactcattccgacgtagccgttcaagatgcgctcgtcatagtccacgtgcgaggtagcatcgggcatgggttgaccgttggcgtcgagggtggtctgataactgttgttattggtaaactgcactttgccgccgtagctcagctgccaacctttcggcagcgaatgggtctggtctatagtaaaaagccacttgcttactttctgtcggctatcaactgagagattacggctgatgtcgttcagccgaccgtacagatgttgcgtgcgcggctcctgatagttagtgtaggatgctccaagctgtaggccgaaaggagccgaatagctggcgtccacattgtgcaggtaggtatgctggtgggagtcctgcgtggactgcgccgtgcccgtcgtggtgttggcagagcgggtgctgttccattgtcccgtataagccaggctgatgcgatggtcgtcgctgatagcatagtcgagtccgatgcggtagtcatggtcggtgccatcactacggttgcgggtcttgtcgctgtaaggcacgcgctggccgccaagcggatggttggcctcatgctccacctgtccgtagcctgtgccatgggtaaacatatacgaagcgtcaatgcccagtttaccgtgattataggcgatgctgccgccagcatatcccgtaccgtatttgtgctgccgccagccgcccatcacctgtccggagagttgattagttccggtaaagtccttggtgacgaggttgatggccatgccccgtacatggtatttcgctggagccgacggcattacctctgcctttgccagcatggcggcgggcatctgcttcagccgctccaccaccttgtcggcactcagcgtggtgggcttaccgttgatgataagtgtcacggcctgaccggagaacatgatggtgccgttcatctcgctcacgccaggaatgctggtcaatgcatcataggcattatcggcaggatagacctgtagcagcaagggcatgttatagacaaggtgtcctgcctcagctttgacaaattgccgctcaccttttatttgtacgccgctcagggcgtattttccgggctgcatccgtattgttcctactcttggctggctgcatatcttgtagatggtcttatagcctacatacgagattcgcacaagcacggtaggctgttcgtatggaatggcaaagtagccgctttcattgctgacaccaccactaagcaacgtggagtcagcaggattgaggacggctatattggcgtatggcatgggctgtcccagttcgtcaatgatggtacccgtcaggcggcagtcggtcttgtgagtacactccacatagatttcatggtcgtcgggcttcacggtcatgcggacgggatagaagcctatcatctgcctgatggcatcgggcagtgtcttgcggctgacggtagtagtgatgcggaaatcctctaactcgttgtagaggaagttgatgacgtattctttctgcatgttgttcaatccaaaaagggcatcactgagcgaaacattattataggtatggctgatacgctgtgcgtatgcttcaatggctccgaaaaggatacaggccacgagcgttaaaacgtgtagtgcacttctcatcttaccaccagttttttgtcttccatgccgatattcacggcctcgaaagtgttcaacttctctacgacacgggcgagactgtcttcacgcttccagacgaaatggaaacgaagctcacgagccgcatcgttattaaactccacctctaccccgtgggcggctgctatagtcgtgagcatggagtcgagttgtacgttattaaagacataaggtgcatcacccactgtctcgctccctgcctcgctcccggtggagaggggaataggatcattcttcaccgtgtccgaaacctgagtgtattcactccccttgcctttgggagaggagctgggggtaagactccagatggcagcaaacgctatacccgatacgaagagtacgccaatgaaggaggctgctattttgtgatgtgagaagatgtgctttatcatgacagacttgacaggtggttcactgtcaagggcatccagttctacagcatgggaagcagcaaactgctcccattcgttatctacgtcgggagtactacccttcaactcatgatgtttgaaggcacgcttcgtgaaaccaagctgccgtaccagctgggacatctcgtcgtcagcgagtatctgccgtatctgattgtcggtcagctggcattgccttcttccttcttgctcagcaaaattgaagcaagcatctttctgctctggctcgtccgacagttgcccaaggtgctcctgcaattccaaaagccattctatacgctgttgcatttcatgcgactttttccttgcctcggcaaagtccatataagtatggcctctgctctcgtcttcatgaaaacgttcttcaatcattatatcgcttttgagtttgaattaaaatacgctttgattctctccaatgtctgcttcaggtgagtgtgaacggtctgacgactgatatgtagtgcctcagccacttcctgacaggtcatctcttgcagataacgcagacggaatatctccaggctcattggcggcaggctgtcctgcaagtaacgcatcagttcctccatctgtatttgctcatctaccgcatcgttgcagacgagtttgtcgctgtctcctgtaagcagacgtgcgaaccgttccttcacttgcttgtgctgcaacacattcaggcagcggtgacggacactcgtcaacaggaatgctctcgcatggtctgccttcatgacggtactactactgagcagagtggtgaacacctcactcaccacatccttgctctccgcctcgtcgaagagcagtgtgagtgccagatgatacatctgtgtgtagtatgtcttgaacagacattcaacatcttttcgtgtcatatacttatcatacagttctgacgaggaaaatgtaaagcgataataccataaaaaacagcccgccgatttaatctttgtgaaaagacttggcaggttctcgtcatgcaaagatatgacttttatgtaaaaccgcctaatgattttcatggtttgtcacgcctactcttcggtgcaatccatgtaatctgcggttaaaagtattcctgcaagttagctttgccctaagtttttgacctacgtcaataaatcgagcatttttcaaagttttaccccgaaaaagtttgatgtgtacgcacacggtcgtacctttgcaccgtcaaaagacaaaggataacgacttttataagtcaacaaaaaggataatataaggtaaaaagaaagtgaaagaaaggggctgtgaagcccgtaatgattcaggatttaaaattaaaaatttaaagaaagggtaaaaagatgaaaagaatgattttagcagttgttgccatgctgagcatgacaatgacattcgccaagagcgaaatggcagacatggagaacgagatgaacgcttacgagatgaacttcagcgtctactccatgaccaacgcactgaaactgaatgacgatcaggctgaggcagtagaagacatcaaccgcatcttcaacaaggagatgggtgccgctgccaaggcttcggcagacaagcgcagcgaaatgaagaacaaggctgtgaagaagaacctgagctacatgcactatgtgctgagtgagcagcagtatcacaagtacttgatctatctgaacgctacgatgatcaaccgcggattaaactaaaacgcacacgtaaaaatactaagagagagggcaatgccgactgggtgttgccctcttttttgttgcaggcatgaaaaaattacatgaagaaaacatcatcaacgcaaagcgaggatgtatctgccaagatactttctcgtttttttatttcgcaaaaacccttcacacgcccgtaaccgtctggctgtcagccgaatattgtgaagggtttgcatatcccacattcaggtctacctgttccctttcttccatcggataaacataaaaaaaactttcgatgttgtcacgaaacagactcattaaaaccttttgacacgtgtcggaaacgtttttgacacgtgtcagaaggttttccgacacgtgtcaaaaggtttgagaaaagcttcatcggaagttctttccaaaggaaagcgaattaaagtcgagcggagctaatgaagaagtagttcttcgcaagcgaagcgaccaaaggtcgagcgaaaagtcgatagatttatcagctggagactcagaatgcgatactaacggcttctgactccataaggccgaaggccgataaattcttctgacttcctctaactccataagtggagcgaatgcgaaacttgaataattatcaattgtgaattgtcaattgtgaattgtcaattgtgaattatcaattgtcaattatcaaccacaagcaaacccttcacagcatccgactgtctttcagcgagttacgacgctgtgaagggtttgtgtcaacagcaaaaaccacatattataagggaattgttttggcgttttctcacttttttcatatctttgcgaaatgaataaccaagtctaaatatggaaacaagattcaagaagaaagccaacatctttaatgtcatcgtgactgccgtgtcagccatgctgtctgtaggtgtcatgctctatgccgtagctcttttcggactgtatgaggctggcgaagaaatcatccttaacatgttctacatagcctgcatcgtcatgatgtggatgtacttcttcaaccgcctctctaccgacaagttcaactactggagctcggtgtgcgtggctataacggtattgttgcgcgacatcctcttccctcccccgctggctacctacgcccttcatctggcgtgccttacgctctcggtgtaccttatcctgatgcttacctacttctatgcccgcaaggagtggaagacttattccaaagccaacctgtggttcatctttattgtagacgtcatcatcgccgcactctacaactatgacatcttcatcgaagagtacgttggcgaggcgaagccctacctgatgacggaaatatggatacgccccacgattacctacggactggtggcttgcttcgtgacggaatcagactaaaatcaccaacctaaacaaaagaattgtatgatggaaccacatgagattagagaagccctgaagggcatgtacggtggagagaacagaccgattagcgacggcaattacgacaagtcgctggcggtgaagtgtatcaacggcacgttcgtcggcaagaagcaggagaacatcattacctacaggggcattccgtatgtaggaaagcaacctgtgggagagctgcgatggaaagcacccgtagacatcagtccgagggatggcgtctatgaggcgtattacaatgcgaagagcgccttcggcaacggacaactggagacggggtccctctactatatggacgaagactgcctgtatctgaacatctttaaggcggaagagacaaacgggcagccgacgaagaagcccgtcatggtgtggattcacggcggagctttcgaggctggaggcaccatcgacccgatgttcgactgtgtcaatctcgtgaaagagcacccggaggtcatcgtcgtcaccatcgcctacaggctcggcgtgatgggattcctgcacctgtcccacctgcctgacggcaaggactaccccgacgcgcagaacctgggactgctggatcaggtaaaggcgctgaaatgggtacatgaaaacatcgcaggcttcggcggagaccccgacaacgtaaccctctttggcgagtcggcaggtgccgcaagctgtaccttgcttccgctcgtcaaaggctcacaacagtatttcaagcgcctcattgccgaaagcggctccatcaaccagacaaggacacccgaagaggctgccgggtgtaccgacaaactgatggaaacactcggctgcaagaacgttgccgacctgctgaaggtcgatggagagaagttcctggaagccgcgtcgggactctttgccaagcaggttccggaaagagacggcaggattctgcccacagacacgtatgaagcatacgccaacggcgctgccaaggatatagaaatcctcgtgggctgcaacaaggacgaaatggacttcttcgtctacagcttcggactggaaggctgggacacgtgggttaccggccgcaagaaggagaagtttgcccagctgccgcctgaagagaaggcgctggcagagagctacatgagcgaagtggtaggcgacagctaccaacccgacagccggctgttcagccagagctggttcattgcgccgatcatcaggatttcggaggaacagaccaagggcggcggcaaatgtttcacctactacttcacgcccgagtcgcccgacccgatcatgaaatgcggacatgccatagagctttccatcgtgttcaaccacccggagttcaccgccgacacgggacgggcgttcgatgaaaccttctgcaagaccatgcgccagatgtgggtacagtttgccaagaccggcaacccgtcgctcacggcagacatctcacccgacggcaaggcgaaggagtggccgctctacgacctggaggacaagaaggtgatggtgctcgacgagttcgacatccatccggcaaaggaagccgacgtaaagattgtagactgggagagaacctatcccctgacgaagtattatatgttatagcatttccgggaggttatcgcggctctttacgcgataacttcccttataaaaatctgacaacgatgaaaacaaaaatcatgacattcaggaagaaatgacaacttcccgccagccaaagccatatccctcaacgcccatccacaacatcgtcctggaattccatggacggaataccacctgcacaattaatataagtactgcctttcgcaagaggtaatcgtaaaaaaacttaccaaggaagaagcccttcatcaactaatcttaaaaagaaaggacgagtcgccccgcccatttgttttcacaacggaataatccttattgtgattagctaaatttcgtgctgcaaagaaacaaaaaatccttcaaacatgcaaatgttttaaagaaaaagtttacctttgtcgcaaattaactaaaatctaagcaatatgaaaagaatattaggtctcgatttaggtacgaacagtataggatgggcattagtagatggaaacaataatgctattataaaggctggtagtagaattatcccgatggatgcaagggcgatgagtgaatatgaaactggtaacctacaatctgcagcagctgcaagaacaggctttagaggtactcgtcgtctatatgaacgagcaatcttacgaagagaaagactgctcagggttttaaatgtacttggttttctgcctgaacactttaaacaacaaatagatttcgataaacatccaggtcgttttattgaccactgcgaacctttattaccctataaaaaaactgaggaaaacaagaatgaatttatttttatggattcattcaacgagatgattacagaatttgctcagaagcatccacaactaacagagaacggtaaacggattccatacgactggactattttctatcttcgcaaaaaagctttatatcagcctattaagaaagaggaattagcatggttgattctgaattttaacacaaagcgtggctattaccaattacgtggaatggaagatgaaaccaagaccaccgatggtgaagaatacaagatacttcaggtcacaagtgttgaaaagacaaatgaagataagaaaaggaaaggaatattctggtatgaaataacttacgagaatggtgcaaagcaaagaaaatccggacctgttgctccaaggaaagttggcgatatggttgaggttattgttacaacatcttatgacaaggatggtaaaatcaaaactgataaagatggtaaccccaaaataagcataagcaccccaccagccgacgaatggaaactcttgaaaaagagatctgaaaaagccatcaaggaaagcggtaaaactgttggcgaatatatctatgaagaattgcttgctaacccagaaataaaaatcaagggaaaactgataagagtaatagacagacctttctataaagatgagtttgagagaattcttaatagacaaacagaattcatcccagaactgcaagaccgaattctttatgagaagtgtgtccgtgaattgtaccatcagaatgaagcgcatgtacaatccatcatggacaaatcatttaccaaactctttgttgatgatattatcttctatcagcgacccttgaagagtaagaagtctgaaattgccaactgcccatttgaacactaccactatatcgataaagaaacaggagagattgttaacaaacctatcaaatgtattcctaagtcacatcccctgttccaagaattccgacttcgccaattcttacaaaacttaaagatattcaaacgggagaaagtcgtcaatggaatgctgaagaccgatgttgacgttacgtctgactatctgagcacacaagaagactataatgctcttttcgattggttgtatgagaaagaagaaatcaacgaaaaggaactacttcgaaacccgttattcaatattgggaagaatgcttcagaatacagatggaattatgtcgaagacaagtcttatccatgtaatgagactcactatactattaacaaacagctcgcagacattggatacaagcagttaactctcgaacaagaaattgcattgtggcatattttatattctatagatgacatcatcgtactaagaaaagcactaacatcatttgcaaagaagaacagtattgacacggaaccttttgtgaaagcctttgagcatattgagccattcgacaataactatggggcgtattcagagaaagcgatcaagaaacttttaccttatatgcgaaaaggcataagacttcatgatgcttgttacgaagtatatggcagattttcggaagctgccaatactgacagatggactaaaccagaggatattgaccgttatcttgaatatgaattcaagcagcactccttacgtaatcctgtcgtcgaatctgtcttaggagaaacgatgagggtggttcgtgacatatggaaaacttatggtgagatagccgaagttcatgtcgagatgggacgcgacttaaagaaaagtaatcaggagcgtaaagatagcacagacagaattcgtaagaacgaacaaactaacttacgcatccgtttattacttcaggaatttttaaatccagaatataaaatagaaggtgtacaccccaactctccttcccaacaggaaatcttcaagatatatgaagagaatgccctcgccaatatgggtaatgatgatgattcggaagacattcaaatgattgccgacaatctcggcaatcccaccaagcatgtcagccagtcggaaatcatgcgttatcggctatggcttgaacaaaaatacaagtctccttatacagggcagcctataccgctatcaaaactcttcacatctgcttacgaaatagaacatgtcattcctcagtcacgctattttgatgactctcttagtaacaaagtaatttgcgaaagtgaagtaaacaaactaaaagaccgcatgctcggttatgagtttatcactaaacatggtggggaaatcatacaaggtaatttaggaacacaaattaagcttttagataaagtccaatatgaggattttgtcaaacaacattactccggcaataaggggaaaatgaaaaaattactgatggaggatattcctgatagcttcattgaacgacaactaaatgatagcagatatatagcacgcaagacaattgctattctatccagactcgtccgtgaagaaaatgaagccgaggcaacatcgaaaaatgtcatcgtcactactggaaaaattacagaccgtctgaaaaaagaatggggagtaaattctgtatggaacgacatcattgcgcctcgtttccaaagactcaactcacttacaggaacaaataattatggtaaattcgtaagtcggaatggcaaacaatacttccaaatcgatgttcctctggaaatatcacgtggtttcagcaaaaaaaggattgaccaccgccaccacgcaatggatgctattgtaatagcatgtactactcgtaaccatgtaaactaccttaacaacaaggctgcactatcctcagaaaaagatctgcgctatgacttacagcacaagctctgcacaaaagtaaagactgacgatcggggtaactacatctggcaattcaacaaaccttgggaaacatttgtacaagacgttagaagcgaattgtcctctattatcgtcagtttcaaacagaacctgcgcgtcatcaacaaaatgaccaatttctattggcattatgagaacgggaagaaggttcttgcacggcagacgaagggcgatggatgggcaattaggaaatcgttacacaaagcgggcttatctggagctgtaagactacagacaaagaagaccgtaaaactggtcgatgctcttgactgtatcaatatgattgttgacaaagaaatacgcaaagaaataaaagcagttgtttccaactatggaaaactttacgagaagaaaactatcttaaagtacttcaaagacagaaaatataaagtaggtaaaaaagatattagccgtatagaaatatactatacaccagatgtagcagacttgtctgcaaagcgagttatgctcgacacctcgtttgacgaaaaaactattaaatccataacagatactggaatacaaaaaatccttctgcaacaccttgccaacaacggcaacgaccccaagatagctttcacacctgagggcattgcctatatgaatgcacatattaaggagttgaataacggcaaagaccataagcctattctaaaagtacgaaagacggaatcgtttggattaaaattccctgtaggagatacaggaaataaaactaagaaattcgtagaagcagacaaaggtactaaccttttctttgcaatatatgaagatgaggaagggaaccgcagctatgaaagtattccttttaacgttgctgttgaaagactaaaaacaggtgaacaagttgcaccaacaataaacgaagatggaaataaattactattcgtcctgtcacctggtgatttagtctatgtccctgatgaaggagaacatgtagatgagataagaaatattgataatatatggaagttcgtatcgtgctcaactaatagaagtttttatatcccagtaagcatagccaatactatatcaaatggaaaagaatacggatctttaaataaagtcgaacttactgataataaaataagcataaaaggttcatgtcttaaacttcaagtcaatcgtcttggcataataacaaagatttttgcgtaagagttatccaaataattaactattatgagcaacatcaaactttttcaagataaaaagatacgttctgtttggaacgatgaggaagaacaatggtatttctctgtagttgacgtagttggggcattaacagactccgcaaatccaacggactatttaaagaaaatgcgtaaacgcgaccaagcattaggagccttcctggggacaaattgtccccaggtaaatatgtacacagatacaggaaaaaaaagaaaaacgttagctgctaacgtcaaagacctatttcgcattatccagtctatcccatcaccaaaagctgaaccgtttaagttatggttggcacaggtaggatatgagcgtgtgcaggaaatagagaatccggaactggcacaggaaaggatgaaacttatttatgaacaaaaaggatatccgaaagactggattgacaagcgactacgtggaattgccatacgacagaatctgactgatgaatggaaaaaacgaggaatcacagaagaaaaggattacgccattcttactgctgaaatatcaaaagcaacgtttggcatgaccccttctcaatataaagagtttaaagggttgactaagaaaagccaaaacttacgcgaccacatggatgatcttgaactcatcttcacgatgcttggcgaaagagtgacaactgagatttctgaaaaagaacaacctgaaacattcaaggagagcaagaaagtagctcaaagaggaggtaacgttgcaggcatagcacgcaaggaaactgagaaagaattgggaagaagtgtatctaatcctaacaactttcttccacctccgaaacagaagaaacaattagaatagcctatgatcaagaagaccttgtatttcggcaatcctgcctacctgtcattgaaaaacaagcaactggtagtaaaattgcctgaagtggagaagaacgacctgcctgacgtcatcaagaaggagagcgtcaggacaattccgattgaggatatcggagtgatggtgctcgacaaccaacagataacgattacacagggactgatggcggctctacttgacaacactacggctgtcatcacctgtgatgcaaagcgcatgcctacaggattgctgctgccacttgaaggacatacgctctataacgaacgttttcgcaatcagatagaagcctccctaccccttcgcaagcaactgtggcagcagacagtgaaagcaaagatagagaaccaagcgttctgcttgcagaaaaacaccccgaagtcttatgccccactccaagtaatggcacgggatgtaaaaagtggagatcctgacaattacgaagcacaagcagcggtctactattggaagaacatcttcaaggacagacctggattcattcgtgcacaagagggtgaagcaccaaacaacttgctcaactatggctatgccattctgcgtggcgttgttgctcgatctcttgttgccagtgggctactacctatatatggaattcaccatcacaaccgctacaatgccttttgtcttgccgatgacatcatggaaccataccgtccttttgtagatgatttggtcatcaacgttagagagcggatggagattggggaaacgctgacgactgaactaaaacgagaaatgctcagcatacccgtacttgatgttcgtataagcggcaaaagaagtcctctcatggtggctgtgggacagacaacagccagccttgccaaatgcttcaacggagaaatccgcaagattgcctatcctgagttcgtatgatagaacgtttaaacgaatatagagttatgtgggtgcttgtgatgtacgacttgccaacagacaccaagaaggaacgaaaagcagcagccaagttccgtaaggacatcatgggggatggcttcacgatgttccagttctctatgtacattcgtcattgcgccagtatggagaacgctcaggtacatataaaaagagttaaatctttacttcctgaactcggacacgtcggaattctgtgtattaccgacaaacaattcggagatattcaaatcttctcatgtaaaaaagagaagaagccaaacgctccataccagcaacttgaacttttctaacagcgagagcaaaatgatgcttgcatcaggtttgccgagtcgtgacgaaaagtcatcaaaagactaacttttctaacagcgagagcaaagcgatacatgtatcagctttgccgagtcgtgacgaaaagtcatcaaagataattgttttagaaaagaggattccgactttttaatcgaaatcctctttctttttgcacttgttttttcttttctggtttacaacttatcctgttgatttccaataagatacctacttcgagttgtttataccagtgcaaagatacgaaatttttagctaatcacaacgtcagcttatttctccgataggttgaaaagttgtttataccagtgcaaagatacgaaatttttagctaatcacaacaattcagatagtagaaggtgggcagttcacgttgtttataccagtgcaaagatacgaaatttttagctaatcacaacagattgaagtaaatggattatcagttatcgttgtttataccagtgcaaagatacgaaatttttagctaatcacaactcctggttgcttttcactattattctgtagttgtttataccagtgcaaagatacgaaatttttagctaatcacaacagattaggttaatatggattatcagttatcgttgtttataccagtgcaaagatacgaaatttttagctaatcacaacgcagctttaatgatgttatatttctctttgttgtttataccagtgcaaagatacgaaatttttagctaatcacaacaacgtgttttctattgttactaaacgaacgttgtttataccagtgcaaagatacgaaatttttagctaatcacaacaaagtgaaacatttaaagcaaaaacaaaatgttgtttataccagtgcaaagatacgaaatttttagctaatcacaactctgtctttctgcctttttagctgcctttgttgtttataccagtgcaaagatacgaaatttttagctaatcacaactctccatcatattatgatggtcaaaattcagttgtttataccagtgcaaagatacgaaatttttagctaatcacaacaggaaacgtccgaacgtgaacagctcccttgttgtttataccagtgcaaagatacgaaatttttagctaatcacaaccacgctcggcagtgctcaaacacgtttggcgttgtttataccagtgcaaagatacgaaatttttagctaatcacaacagccacaacccaagtgggctggatttcatcgttgtttataccagtgcaaagatacgaaatttttagctaatcacaactctacactgtaggtagttacatttcgtttcgttgtttataccagtgcaaagatacgaaatttttagctaatcacaaccgccaacttccgcgaccgtgtagtacatcagttgtttataccagtgcaaagatacgaaatttttagctaatcacaacccatttcaaagcatgactgcttgcacgattgttgtttataccagtgcaaagatacgaaatttttagctaatcacaacccgcagatgccacactttttagattgtttgttgtttataccagtgcaaagatacgaaatttttagctaatcacaacaaacgatgctacatttaccttcaacaaccgttgtttataccagtgcaaagatacgaaatttttagctaatcacaacgacattcctactaatcactacctcttcaatgttgtttataccagtgcaaagatacgaaatttttagctaatcacaactgttctatcgattcttttatttctgattggttgtttataccagtgcaaagatacgaaatttttagctaatcacaacagcggaataggaggccccgaagtcgcagcggttgtttataccagtgcaaagatacgaaatttttagctaatcacaacagcagacggctgcggaagccaacaccttccgttgtttataccagtgcaaagatacgaattttttagctaatcacaactggtggtaatcttgttcagcctgctggtgcgttgtttataccagtgcaaagatacgaaatttttagctaatcacaacggccacgatgtttcgatgtcaatactgtcggttgtttataccagtgcaaagatacgaaatttttagctaatcacaacatgcggcggtgtgcggctgcgccaccttccgttgtttataccagtgcaaagatacgaaatttttagctaatcacaacgtccttctttgtctttccgttttcgtccttgttgtttataccagtgcaaagatacgaaatttttagctaatcacaacgatggtcacgaagaagctcaagacggttagttgtttataccagtgcaaagatacgaaatttttagctaatcacaactctcctatcgctacaatgagcagctctttagttgtttataccagtgcaaagatacgaaaaatccggaacttttgcagttccggcacgctaattgtctgtcatgtcgtcaaacaataaaactatacaacagttatcagttgctgccctatcctatggataccatccacgatacgctgacgttgctgcggacgaggatttttgatgccattggcatagtgcgacagttggtgctggttgatgccggtggcacggctgagagcagcaatggatatcagaggctcacagatgcgaatcagcgcagccacgttaacataatgatattcaaactcatagtcaccgtcaacaagccactgaggtacctcgtcaccgtcttcgagcataccttgtacgtggaattccaaagtttccttcgcctccttataaagttcatcaggagtattggcagtaaagaccactgctcctggcacgttatctccgagctgagcggagaaattcttgttgcaccatgcaacatctaccctaatcttttccatatagctattattttaggttatatcattttcaaggctgggtagttatttccaaccagcctgtttccagatgctgttcagcaggaactgactcatttcgtcgttcatgtgtcctcttaccgttaccttccccggcttgttcagattcttgtactggcggtggtcaccttttgttgctgagagataccagccgtctgcttcaagcaacttaattacttctttgactttatatactttcatatccagtcttaatgtttgacggcacaaaggtaataaaaataatactctttgcaaagattttggaaagaagagtattattattattactctttaacaaaaaaacatccttattcgttaaacgaagcgtcataagcttgaagttcttttttgaactcacgccttacggcggcttctaattctttgtccttagtacgttctgctaagtccataaaagaacgggcgcgttctaaggggttttctttgactaactccaagtattcagctttaggaaattctgttatttccttaagcacggcggcatcattacagatgtcgaagaccgtcttacttcttaggtttttgtacttcatattgcatcgttatttaattcttcgacagaaagcggctcaccttctacgtgtgactttttataccaatgcaaatataccgccatatttgaccttacgaaaatacgttttctaaaagtctcttgttgtcttcaaaaacaacatgtatctccttcaagagctcttcttccgtcttagcctcaatccatgtgctatggtcaatctcttctgagtctatgacctactgcttgcccttcaacacgggatggttgcgccatttggcactctttccttgcgccatctcgtcaatgccgccggggaaaaggttcttaaagcagagggctatccatgcaggaatgttgttgttgctgtttacctctatcatccttcgaatcaactgcttctggctctcctccatcctgctgcgtatctgccgttcctgggcgcgtgcctgtgcccaggcttccttgtcctgagagaagacgtcgatatggaagttgccgggaccttccctgttaatcatgtccagcgtcatcttcagctccgacgacaagggtgagccttcgatggttcccgtcggctggttgacggtgatgtgcttgctgtcgggaatgaggacgaagaaggcgcgttccggccatttcttgttttcgtacagacggataaacgagttacggtctaccttgacggtgacggagaacttgccgtccttgatggggacgaactgtgcattagcggtgtcttcatcgatgatgagatacagcttgctgatatatgaactgagggtgccgtcgatggtcaccttgacagtcttggcactgatggtcagtgcagccagcaggagtgctgacatgaggattgttattcgtttcatatcacttgaggatttagtgttttacagttatggggagtaggctattcctcactcagaaacttctcgctgacgaaggttccgtcataagtgaagactttttctacagagtagcggccaccttcgggatggtagcggtaggctgagaggtggagctggcgacgctcggcatcgatgctaaggagcccttccgtagcttgcagctgcttggcggtgcgcttcttcaggtcgacgatgtaagtccagatgttgcgggcatcgggacatccttcgatgatgaccagatggtcggcacctgggatgaaggctgctttgtcggcagcggcaatgttgctgagcttgacgggggcgcagccgttcgtcatcttttcccacaccggttcggcattggcactggtcgagaagagcagacaaaccttgccggtgcgcttatccttgtaccagacgctgacgactcctgccaactcgtcttcggaaggtggtactagctggtcgaaatagatggcttggtcagcggtctcggcggctaacgtagcggtttcgggcagtcgtgcgatggcttggtcagcaaaggctggcattgcaacaaacaagatactgagtatcatgagcaggatttttttctttttcatcatcttaataggttgctttatggttaataactattctgcaaagtaaatcatttttcgcgaatctaccaagcatttagccgaaaaacaatactcttttacgctccgacacacagtttgtagagtcaaccagcaagtgca

SEQ ID NO: 1268 - DNA, 21518 bp, synthetic construct
  source 1..21518: mol_type = other DNA
  misc_feature 1..21518: note = Synthetic
gaactgcggcaaaagaagccaggcacattcccgagaataaaattaaaaatagtttttttgttaccataacttttaaaaattaattggattaaaaaatatatgttaattaatgtcttattctattgcaaccgtgttaggaaccgattcccaatacggattttggtaaatcggagatgtcgaaacatctttcggatcggaagcggtcaattgcatatccagataattgatcgggctcaaataatgcgctaatctccaggttaaaccattatatgcaaggtttgtattgagaatttggtaaggcctcaaatatgggcttttggagggagccgatacattggcaacggtgagacttccgtcttcactgtatttcaacagagttgaaccgggacggcttccggcataccaatattgcataggtccccaaagtttgaaaccctcgatttggtaaggattatttactaattgatctaatgaacgccagcgttttaaatcattcctacgaaggccttccgccattaattcgcagcgtctttctctacggatattatataataccttatcagtcagtacggctccctgcgagtaagctccccaatcgtttagcgcttcctgagccatatccgtattactgatagttttgttataatcgggatctacttttgctctggtgcgtatggctttccaatattggtctactttacctccgatattgccatatctttcataataggcttccatataattcagatatgcttcggcagcgcgaaattcaatacaacctaccgaacctttgccactgacatactgcaaaccatcgggattccaacctttgcggcaagcatatccggtattgtaaccgacttctccgctcagagttataatatcgggatgcggctcgatgctgtttccatgatctcccaaattttggttcagatatttattgacctgatagggttccttgataaacaggacagctcttccatctctgtttatcctgatatatgagatagaatcatcacctgcataacccgaccccggagcatatatcggcaaaccgttactcatcaggaaattatcgaccattcctcgtgtcagtcctgtcaggtttcctcccgcagctgcatacacagctacattattcgttaatcccaaagatatgctgtattgtctccaaagcataatttcgggataggccgacatatctacagcgccatacatttccaaatacggattttgttcacctacagattgaggtacgattcccgtattgtcagttaaaggaattgcagaagctaccacgtcagcggcttctatcgctatttctaaaaaataattgctttcattgtcaatactgcctgatgggtattgataatttgcgttgtaatctttggtcgctcccggccagcccggtccattgggaacaaatggagtgcccttgaagtatttcaaccaggtgccttcatataaagcaactcttgatttcaacagttgggcaaccggaacgcttattctattattttgtccatctattgatttgggacttaaaaaactaatagcttcatccaagtcggacaagataaaacggactacttcatttcgaggcattctcttgcttgcatcagtcagcacatcgattttatccggtaatatgtgagtgataatagggaaatcacccactttcataactctttcggaatacaaataagctctgaaaaagtaggcttctcctatcgcttgtttgatatgtgcttcatctcctgttatttggccggcttcccaaagcggcaaaacggtttcaataaaataattcacgcgatagattgcatcaaaataccagtcccctttttcggcaggcacctttaattgaccggttacgaaagaatcatcacaggaagaaccggccatattgtcggaatttccatctgtttggtaaataccatacgtccagtcgctatttcccggcaggaaatccgaataaaaaggtatcacatacgactgcaattgttgatctgtacgaaagtaattctcagggcttgccagcgactttggcggtatacccaagaagtcgttacaagatactaatccgaataaaacaagggcggcaagcagtatattaattgattttattttttgagtattcattttttcaatgtttttagaatgaaagattaagaccacatgatacgactttcgacaaaggataaacgcttccgccccaacctccgcctattgtttccggatcaaatatttttgtcaattttgttcccgtccatatattttcgcaggaaacataaaccctcaagttagagattttcacgtcttgagtccattttttagggaatgtatatcctaattgcaggtttttcaaccggatgtaagatgcgtccagcaaatagcctgtttgagtttgctgatttttactatctccgaataaggggcggggataataggaatccaaattaagtcccaatctatcatcgggattatcccggaagtaatctaaatgttcggcataacaggtagaccaccattgcccccattctcctgcaccccagaaataataagacttggtcacccaatcccgtttaagaactccctggaaaaatgcacgaatatcaaaacctttataatcggccgacaaatcaattccaaataaataatggggatcgctgtttcctattactctcaggtcgccatgatcttccagcgtgcctgcgcccggatccactttcccgtctccgtttaagtcgcggtacatgatatcgcctgctgtccattgctggccgagagcttgctgcccgccgttaggcaagcttgccaaatgggcgttcatttcatctgctgtttttgcaataccaatcgtttcatatccccaaatttcgcctaatacttgtcctgtataataacgacgatcaccgctcaaatccaaatccaacgttttgatagcattgggataacgggtaacaacagttttcgcgtccgacaaattaactctcactgaatatcccaatccgttcatcaagcggtcttgccatctgaaatccaattcccagccatttgttcttaaatccgtattgttcattagaggaggatctgttccaaaattagaaggcatttgtggcgccggccctaacatatccaatgtgtaacgaacataataatctcccgaaaaagaaaaacggttattcagcaaatacatatccaagccggcattaacggtttttattctttcccatgtcaaactctctgttatcaaattcggggcataagacgtgttttgacgtattccattgagtaaccatgtggagtttgctgcgcttacaggtacagataaataagtcgggtaccaattatttgtgttttgattacctaaggctccataagacgctcttaatttcaacatatttatatgctctttcagtgattccataaaactttcattggcgatattccatcctaaagagaaagaagggtaccaattccaacgttgattttgcctataacgtgaagttccgtcataccgcaagttgccttccactaaatatctttctttataatcataattaagccggccgtaatatcctgctgtagcccaatcattcaggcttccgttcatccatggattcgtaagatttcctgaattatccgttccgcttgtcaaatcaatcacattcaggccgggaacaataattccatcccgctgagcccccaaattcatttcttcgttgcgaatatactgtactcccatcatcactttgaaattatgacctccttggaattgtttgtaatattcggcatataagttaggattatagtaattagtcatttgttgtgactcggatactgtgctttccccgctcggagtaatgaggtaaggtttgccgtttacatcgtgattatatctgtcttgcgtatcccagtgatgatgccaggaattcaatctgaaattaaattctccgaagattgtcaggccggtaagaggtgttacaaccagttgtatctgttgataaagattatctgtccggttagtatcgcgtccgccgtcacgtaatccgagagccggagaaggagaactgtaaagaaatccgttaggatcatataaaggcaaagtcggccagcattgacgaccggaagcattatcatatcctcctgccaaataagaaggacggccgtagtcgacacggttaaagcggctattaaaattaaggttcacatatttgtttaattgagacgttaatttagcatcaatggagtaacggttatatatgtcttgattgaactgcatcaatccattcatatttaagtaattggcagatatataatattgtatattatctccgcctccattcatagaaagattatgttcctgtgataatacccaatttctgtaaatagctttattccagtttgtattagcattcccatagtcatatccgtctgcccattttgtcgggtctgccgaattcggaataattgtttgattagccggtattttaccttccagataatcctgaatcctttgcaggtggtctgcgctaaaaacagcgccggagccggagttggtggctgcggcattgaaataagtcgcaaaatcgagtgagtttacggtattaggaagcaagatagggtcattccaacggaaggaattagtgtatgtaaaagtgtttttccctttgacgcctttctttgtagttactaatattacgccataaggcgccttggagccatatatcgacgaggcggccgcatcttttaacaccgatatgttttcaatatcctgtggattgattgtattgatgtctccttccatcccatcaatcagaataaggggagcattggaaaccctatcgtcgatggtgcctatcccgcggatattaattgaaggattgttatccatcaaaccttccgattgggtgattctcaatccgggggaaacaccctgcaatgcttgtgtggcactttgaaccggccgggattgaaaattttctccggaaattgtactgactgctccggtaagattgactcttttctggacgccaaaccctaccacaaccaaatcatttaaaactttggaatcctcaataagggtgatgtttaactccgttttttcatctgctttgacttctttcggcttgtatcctatgtaactaattctcagtatgtcatctttcgaagcttgcagagtgaatctaccgtctaaatccgtaatagttccggtagttgttcctttaacgactatgctggcgccaatcaaaggctctcccttttcgtcggttattgcacctgcaatcttccttttagattcggaagaaggatcttgtgttttttgtttatcaacaacagttaatacaatttgcttatcattttcaattctatatttgatattggtattctggaaaactctatccagtaccgtttcaataccttcgttgctgacatttatgctgattgttttattcaggtcaaggaaatcgtcgctatagaaaaagctatattcactgtttttttctatttgcagaatcacttgtttgatattttgcttgttagcggagattgtgatttgggcaaatgcggccgaatgatagctcattatcattaacaagcaagtagtggcaaatgtttttactttcatggtgttatattttttagttatattttttgtataaatgtttttctttgagattttccctgattacaattacagaatctttaaatgaatactgtatgggcgatacgaaagaaaccaattgcaacacgctttctaaattgctgtttttaacttttcccgagaagtgaatcttttttaaatcttccgaagcaaaaattatttttgtattgtacattctttccaatactttagcaatctcttccagattttcctggtcgaaagccaattcgttattcctccatgaaccgcttttttcggcatccatcaatgtggtttttgtaaatgaatgtaattgtttgttgaatactattttttcattgggataaagagcgtaagattctttgtcgttacttacttttatcttcccttctatcaatgtagttgaaatcctgttgtcttcggggtagccttttacgtcgaaagaagtacccaatgcttcgacggttatttcattaactataaccttaaaaggtcgctttttatctttgctgacttcaaaaaacgcttctccttgcaaatgaactgtgcggtcttttttattgtaggaattgtcgtatgataaggaacctgccgaattaagccagacttgtgttccgtcgggtaaagtcatgttggctttttgccccatttccacgtggacacgcatagctttggaatcgtcttgcaaacgggaccccatgtaataatatgttaatccggccataagcgccggaataagaatagctgcagcaatgcgggaatattttttccaccaaggtttgacgacaggtatcggttttgcttgtatttcgttattcaaacgcgaccatatccgtttttcaacttcagaatcagtgtgaaattcggcattatcccatttttccctgtataattcggaaaaaatgcgcaaaattcccggttgattgaaaagttctatcaaacgttcggtttcctctgtgccggcttgtttttggagaaatttttccaataatgtaataaattcgttcttcatactataatgaatatacgtgaaggttaagtttcccttacagcgagtaaggaaattaacaccaattaacaaatctaagaaagattggcttttttaagtgaatagggaaacagaagttgggagtagttttacaagtaaaggaaatacatcattgtaatatgggtttttaattttttccggagatattccagagagcggcgaatttgagtttctactgttttctccgatatagaaagttgttcggcgatttctttgttgctcaactctttctttaaactcaggagaaatattttccgtctggcatcaggaagtttattgattagttccatgatgaaatcttccaaagagttggcttccaggttttcttccatagaagaatcctctcccgaaacattcattttaacatattcttcgtaacggtaagccaatagcattttttccgtttgacgatacaccatgttacgtgatattttaaagagataggattcaaattttttttgagaatctatattttccctgtgctcccaaatggaaagaaaaatggcttgtgttatatcttcggcaaggtttttatcgtacaatgtggccaatacaaaattatatacttttgcattatattttttgaaaatcgtttcgaaagcttttgcttcaccctgttttaaccgatttaatgtaagtatgtcaatatctgtaaagctcatcagtaatagattttttgaataagaatacaaatatgatgattttttctgactaatgtattatttattattccgtcggaagtaaaccaccgaatcaaagaacaattttaccggctttcactccgctttcggatattgctttcacaataacgatatttcctcgtgggattgattggagaaacacaggattatttccggtgtaaaacactttatcaagaagttttcctgttatggaataaatagctatcacacccgtttcgttcggatgattcgtgttgatatacaattggcgtgattctggcaaataaataatgtcattttcctttttttgtaatgatatgttatttgtcgtatcagatacatacctgaccaaaggttctatcgctaaagatgtagacattggagcatccggatgttgagtagcagggaaccaatttccatcggcatcacgaagccaggctgtgtttgcttttggagttccgaaagtaacattatatactgaaaaattccgggttgaaggataggtgacttcgtatgaaacatagaactttttcccggccgggacttcgggagaaaatttcacaaaagtttcagtaggcagtgtcatcgttacaggtttttgcacaaaattaaccgaagcggtgtcaaaatccaaaaaagtcggatagaatattttagaagcaatgatattatcttccgaaaggctgtctttataaacttttatattgatgggagaagatacatagttaaactgaacccccggaactattaaaaaagcgcctgcaatttcagcgttttgattggttgtatactcttccgcaaattcttgtgtgcctatggaattatgcccaaaaacaaaacctgatagcggactgctcaatgtcgaattagtaatagtatccgtaccattataatctgtattcttcaaccggataaccggattgtatttgtaaggatcatttcctacccattgtaattctcctgtattcgcagggtctaagcaatctttcaatggtatccctatatccggcacatattcccatgacttatagagcgcaaaaaagtaatcggataaactatttgagcaagtagacaggcctccgcttaatcctccgataactaatccttggttatcgaaaggtggagatccggaagatcccggagccgtagctcccacatcccaacttgaaacctgccagtgtgattgcgaattaaaaaaaggagcgttaggaaaagtcacaatagttagttttgcagttgtagttccgtacttagcaaccgaagcttccggataatgaatatttataaacggattattatttccggcatcaggattaacattccatcccgcataataaggattataataatcaggtggaatttctttaagcctcaataaagccatatcattttttattgcgatagaaagcggtgttgcgccggccagcgacatttgcgccgaacctttcattcttaatgaacaaacaggctttctataattaaaaaaacaaacaatagtgccggctacttttatataatcggcatccgggttattaaaactgctattcaaacaatgaactgccgtaagtaaaacaggctccccatcgttatttgtcgtattcagcaggctgccggaacatgcgtatattccatctaacgtgagcagaacagcgctcctcatgttatcattatcaggatcttcacaaagaatgtcgggcatacacgcatgggttgacccggcaggatctgcttgaggttcgtaattcaacaagtctctatagtcgtgattgacttccgaaattttcaattccccttcaaatgccacatttgcaggttctatgtattctacaataatttcatcgccggcaacaggttgtatcggcaatatttgatcttcggagttattttcgtttgtgaaagaaccgataatatggcttttaccggagttataaagaaaaagacgcccgccttccggcacgttatatttagaaaaaaacacattgatggaataggctcctttcgaacgaatccctatttgccaaactttggttccatcgggtaaaacaacattccttccggtcttacccttttcaatatttacaaagaatttattggcaaaacggaaagaggttcgcatattcgacttgttaagttcatcttccttcaataaagaatcaacattgaaagccggcatttctataaaaagattgtcatcagccgaacttttcaacgcagaaggcgtataaaaaagagggaggccgccatgactaatttgcccataaacaagattatgcccattaaaaaacaggcaaactaaaaccaaaagaggaaatattccggaatataatcttgttttcatattcagatttaaatcattaaacgaggaaaagttagcatatacattgatatgctccacaaagttaagaatctttggataaataaatctcaagaatgataattattttacctgtgtaagaaaggcgaggttttatccccgccttaaatgttttcacaacggaataatccttattgtgaattgcttcaaattagtgatgcaaacatacaaataaaataatcattagcaaaactttgttaatgattattttgtttttaactttatggcgttaaaaataaagtaaatatatcatgaaaaagatattgggattggatttaggtaccaacagcattgggtgggcgttggtagagcaagattttgatgctaaagctggtaaaattttaggtatgggcagtcggattattccgatgagtcaagaggttttaggtaactttgatgttggcaactcagtctctcaaacagcagaacgtacaggctttcgggctacaagacgattgcatgaacgacatttactacgccgagaacgtctgcatcgcgtactaaacatattaggatttttgcctgaacattatgtcaatcaaattgattttgaaaaacgattaggacaatttcttgatgataaagaaccgaaaattgcttggaaagaagtatggaatgaacaaaaaaataagaatgaatttgtttttatcttccaaaattcattcaatgagatgcttaatgattttaaagtaaatagtcttgaaataaaaattccttacgattggacaatttattatctgcgtaaaaaagcgctttctcaaaaaattacaaaggaagaattagcatggacaattttgaatttcaatcaaaaacgtggatattatcaacttcgcggagaagaggaagaagaaaatccaaacaaattagtagaatttcattctttaaaaattattgatgttgtggctgatgaaaaacccaacagcaaaggcgatatttggtattcgttgtatttggaaaatggttgggtttatcggcggtcgagcaaaacgcctttgtttgattggaaggataaagtacgcgatttcattgtaacgactgatttgaatgatgacggtacggtaaaaacggataaagaaggtagcgaaaaacgtttctttcgtgcgccgagcgaagacgattggactttgctgaaaaagaaaacggaaaatgatattgaaaaatatattcaaaaatacaaaacaataaatggagttgatggaactgttgggacgtatatttatgaagcattattgcaaaatccggcacaaaaaattcgcgggaaattggtgcgaactattgagcgaaaattttataaagaggagttgattgctattttgaaaaaacaaatagaattacaacctgaactttttaccgaagatttatacaacgattgcatacgggaattatatcgcagcaacaaggaacatcaaactgttttgagcaagcgtaattgttttgtgcatttgtttgtgaatgatattattttttatcagcgaccgttacgcagtcagaagtcctcaattggaaattgtagtttggaatatcgaaaacataagaataaagacagaaacgaagttacggaatatttaaaagttgtttcaaaatctaatcctttgtatcaggaatttcgtttgtggcagtggcttttcaatctgaaaattttcagaagagatgatgataccgatgtaacagagcaatttattacgaatgtattcgataaagaaaagttgtttgattttttgaacaatcgaaaagaaattgaccaaaaagccttactcaagtacttcaaattgacagaaaaaacgcaccgatggaattatgtggaagataaaatctatccttgtaatgaaacaggaactcaaatcaaaacacggttatcaaaagtcgaaaatatacctgctgattttttaacgcccgaaattgaacaaaaactttggcatatcatttattctgttacagataaaaatgaatttgaaaaagcattaaaaacttttgccaatagacatcatttagatgaagtttcttttgtggagaatttcaaaaagttcccaccgttcaaacgcgaatacggctcattttccgaaaaagcaatcaaaaaattgttaccgtttatgcgtgtgggaaaatattggaattgggaaataattgacgcaaaaactaaagatcgaatcagcaaaattcttacaggcgaatatgatgaaacaataaaaaatagagttcgagaaaaagcaatctatttgggttcagaaaatgattttcaaggattacaattgtggctcgcacaatatattgtttatgatcgccattcggaagcaaatattacggacaaatggaatacggttgccgatttggaaaaatatttggaggaatttaaacaacattctttgcgcaatccaattgttgaacaagtaattacggagactctgcgtgttgtgcgcgatatttggaaaaaacatggcgatttttcagaaattcatattgaactcggtcgtgaaatgaaaaataccgcagacgaacgcaagcgattaactaatattgtaacagagaatgaaaacacaaatcttcgcattaaagcgttgattatggaattgaaagaatatcccgatgtggaaaatgttcgtccatattcgcctattcaacaggagattttaaaaatctatgaagaatatgctgtaaataatattgaagaaaatgatacggaaagagaatttattcagaaaatcagtaaaactgcgcagccttcaaagtccgaacttcaacgatacaaactgtggctcgaacaaaaataccgctcgccttatactggacaaatgattccgcttggaaaactttttacagatgaataccaaattgaacacattattcctcaatcccgttatttcgatgatagcttgaacaacaaagtgatttgtgaagcggctgtgaatcaactaaaagataaatgtcttggcttggaatttatcaaaaggtttcatggacaaatagtagatttaggtttaggtaaatctgtaaaaatatttgaagaagttgcttatcaagattttgtgaaacaacattatgccaaaaattataaaaagcggaacaaccttttgttggaagatgttcccgaaaaaatgattgaacggcaattgaacgatacacgctatattagcaagtttgtttcgcaacttttgtcaaatattgtacgtgccgacaaagacgatgacggcgtaaactctaaaaacatattgcccggaaatggaaaaataaccaccacgttaaagcaggattggggtttgaacgatatttggaatgatttgatattgcagcgttttgagcgaatgaatatgctgacaaactcaacagcatttacagcatggaatgaacaatatcaaaaattcttgccaaccattccattagaattctcgaaaggatttcaaaagaaacgcattgaccatcgccatcatgcaatggacgccttagtaatagcttgtgctactcgtgaccatattaatttactaaacaatcaatctgcaaaatcagaagtttcgagatatgatttgcaaaataaattacgaaacaaagaaagaaacgaaaccataggaaaagatgttttcacagaatttaaaaagccttggaataattttactgttgatgcacgcaacgaattagaaaaaactgtagttagtttcaaacagaatttacgtgtaatcaataaaactgccaataaatatcaggcttataaaaatggtaaaaaagtatttaatccgcagacaaaaggcgatagttgggctatacgcaaacctttgcataaagacactgtgtttgctaaaattttgcttcgaaaaattaaaacagtgcggttgagtgaagcattgaaaaattgggaaatgattatagataaggaactaaagaaagaaataaaacgacttatcaatacgtatggcggtgcgtttaagattgatgttatcaataaatattttaaagatagaaaatatttgttcaacgaagtggatatatcaaaagtagaaatttactattttgaaaccgagaatgcggcagtcagaaaattattagatacttcatttacggaaaaaataatcaaagaatctgttacggatagcggcatacaaaaaattcttttaaatcatttatgggcaaaagaaaataaacctgaattagccttttcacccgaaggaattgaagaaatgaataaaaacattgttcaattaaatgatggaaagttccatcagtctataaataaagtgcgtgtttatgagccgattggaaataaatttcaagttgggactactgggaataagaaagataaatatgttgaagcagcaaaaggcacaaatttgttttttgccatttatgaggatgaaaacggcaatcgttcgtatgaaactattcctctaaatattgtcatagaacgattgaaacaagggttaaatgctgttcctgaaagaaatgaaaaagaacatcatttgttgtttcagctttcgccaaatgatttggtgtatgtgccgacggaagacgaaaaagaaaatatttgtgcaatagattgggagagtttggataaagagcagttgaaaaggatttataaaatcgttagttttacaaattcaagactttatgctatttctgctaatgtggcgactactatagtaaataaagttgaatttacccaactcaataaaatagaatttattgatgagaaaaagcattgtgtcaaacttaacattgaccgtttaggaaatatatcactataaaactatgtctaaagcaaaattaaaaaaagaacttcaaaaactaaccaaagaacaattggtcgaacaggtcttggatttgtacgataaaaataaatcggtaaaagaattttatgatttctatctgaatccaagaaacgaaaaagaattggcagaaaaatacaagaaacttattcgcaaggaatttaatgtggaaagtccaatgcgggcaggattgaaattttcagttgcaaagcgtgctatttccgactttaaagatttgcaaacttcgtccgatactttagccgatgttatgttgtatttgcccgaatgtgcttgtgaatttacatatcactatggcgatatggaggaacaattttacaatggagcctataataattttgtcgccgcattaaaatatattgccaaacacgatttattggaagtttatagccgtcgtgtcgaacaatgtgtcaaatgggcttctccttgcggttatggttttgccgatgcaatttccgatgcgtattgcgaatattatcaagaagattagtgatgattaagaaaacgctttatttcggcaatccaacatacctcagtatgcgtaatgaccaattagtcatcaaattacctgagatagagaaaaatgattcacttccggaaaagtttaaaaaggaaagcgaagccacgtttccaatcgaagatttgggagttgttattctcgatcacaaacaaattactatcacacacggacttatagaaaaattattagacaataataccgcagttataacctgcgatagcaacagaatgccggtcggtttgttacttcctctatgcggaaacacaacgcaaagcgaacgatacaataaacaaatagaggcctctgagccattaaaaaaacagttatggcaacaaaccatccaatctaaaattaccaatcaagctcaagtattgaaaaatttgagaaactgcaatattcgcaacatgaaatattgggcggatgaagtaaaaagcggagaccctgataattttgaaggacgcgctgctgcctattactggaaagaggctttccctgaaatcaacagttttacgagagacagagaaggcattccaccgaacaacttgctcaattatgggtatgccatattgcgagctgtagttgcccgcgctttagttggcagcggattattgcctactttcgggatacatcatcacaaccgctataatgcctattgcctggcagacgatattatggagccatatcgtccattcgtcgattatttggttatgacaattacggattcgggagaagatattaccgaattaactactcctatcaaaaaacaacttttacaaattccgacgattgacgttaaaattgataggaaacgaagtccattaatggtagcagtcgggcaaacgacagcttcattgtatcaatgttttgaaaaaagttcaaggaaaataaaatatccggaattcacataagatgcaatgcttatgcacaattcttcacgtctaaatcaatatcgcattatgtgggttttagtattgtttgatttacccacagagacaaaaaaggagagaaaagtctattccgatttcaggaaaaaattagttaaagatggttttaccatgtttcaattttccatttatctccgtcattgtccaagtgtggaaaacgccaatgttcacatcaagcgggtaaaaaatttccttcccgaaaaaggacatataggcatattatgtattaccgacaaacaattcggaatgatggaactattttatggaaaaagtcctgaagccaagcaaacaggatggcaacaattagaactcttttaaaaaccaaaaatcccgactctcatcgggattttatgttgaaaaacaactattttcttcaatcctatttccagttgtaaatatttgatacgcaacaagtttagtaaccctatgctgtttttcaaatatcaaagatactaatttgaaagcaattcacaaccttttccacaacatatcaatcgacggtgatgctgtttttcaaatatcaaagatactaatttgaaagcaattcacaacgatgaagcgcaacaatatctcgatagcaaagctgtttttcaaatatcaaagatactaatttgaaagcaattcacaacttatcgcttccacggcggcaataaatcattgctgtttttcaaatatcaaagatactaatttgaaagcaattcacaaccgtgcagcagaagcaataaaacgtaagcaggctgtttttcaaatatcaaagatactaatttgaaagcaattcacaacagtgatgattggggtacagattcagattgcgctgtttttcaaatatcaaagatactaatttgaaagcaattcacaaccgaccgcaatgagtactgatttagaaagtggctgtttttcaaatatcaaagatactaatttgaaagcaattcacaacagctggggcggaacttaaaaaaacattgacgctgtttttcaaatatcaaagatactaatttgaaagcaattcacaacatagtagcggttacaatagcttcacgctttgctgtttttcaaatatcaaagatactaatttgaaagcaattcacaacaaaaagaaggaaggatagaactatgcgatagctgtttttcaaatatcaaagatactaatttgaaagcaattcacaacgaaaaagcgatattgaaaaaatgatttggggctgtttttcaaatatcaaagatactaatttgaaagcaattcacaactgatttcctgtgctgttttttcatcaatcggctgtttttcaaatatcaaagatactaatttgaaagcaattcacaacaattcgaggattggaaacaaagaaaggacagctgtttttcaaatatcaaagatactaatttgaaagcaattcacaacacgtgtgctccgcttgaaatacattcattagctgtttttcaaatatcaaagatactaatttgaaagcaattcacaacgttatttgtaattgatatcgaaatttcccagctgtttttcaaatatcaaagatactaatttgaaagcaattcacaacattaccggtacgattttcttcaggcgcagcgctgtttttcaaatatcaaagatactaatttgaaagcaattcacaacgaaaaggtctatagagtacttgatgaaactgctgtttttcaaatatcaaagatactaatttgaaagcaattcacaacacttcacgcctaagctgataatcattttcagctgtttttcaaatatcaaagatactaatttgaaagcaattcacaacatagacatgattacagtcatggaagaattggctgtttttcaaatatcaaagatactaatttgaaagcaattcacaacaggcatacgatgaacaaaatcaattggtagctgtttttcaaatatcaaagatactaatttgaaagcaattcacaaccgtgatgctgttgcttctctttgttttgctgctgtttttcaaatatcaaagatactaatttgaaagcaattcacaacactccgtacaatgcagctacatcactgtctgctgtttttcaaatatcaaagatactaatttgaaagcaattcacaacacaacagctattatacgcgctccgttcaagctgtttttcaaatatcaaagatactaatttgaaagcaattcacaacataatgatactccgattgcaggcatgacatgctgtttttcaaatatcaaagatactaatttgaaagcaattcacaactaaaccagatgcaataaatgcacataaagagctgtttttcaaatatcaaagatactaatttgaaagcaattcacaacaaaactgacttaacacaaactgaaacaatggctgtttttcaaatatcaaagatactaatttgaaagcaattcacaacgggacaaagataatataaaatatttatatgctgtttttcaaatatcaaagatactaatttgaaagcaattcacaacaccttagcatcttgcaattctttgaatgcgctgtttttcaaatatcaaagatactaatttgaaagcaattcacaaccctgaaacagcagaaagcaaatgtatttcgctgtttttcaaatatcaaagatactaatttgaaagcaattcacaactacaggcgtaaggatgaaagtagataaaatgctgtttttcaaatatcaaagatactaatttgaaagcaattcacaactcacatcttgccgaatcttcacaccatgaggctgtttttcaaatatcaaagatactaatttgaaagcaattcacaacattcatagaagaatacaagaaagaaagcgggctgtttttcaaatatcaaagatactaatttgaaagcaattcacaacgtccggatattggagccggtaaaatattagctgtttttcaaatatcaaagatactaatttgaaagcaattcacaacatattggctcatggcatttcttcgggttcgctgtttttcaaatatcaaagatactaatttgaaagcaattcacaacggtatggtagtagacatcaacaatgatgagctgtttttcaaatatcaaagatactaatttgaaagcaattcacaacatgtcctaagttattaaatgttttcctttgctgtttttcaaatatcaaagatactaatttgaaagcaattcacaaccgtttatacaaagcgtttaatagattttgagctgtttttcaaatatcaaagatactaatttgaaagcaattcacaacaacggccacaacgttgtaaccgctgcaaatgctgtttttcaaatatcaaagatactaatttgaaagcaattcacaacgacaatagaaaacattcctacggatcagagctgtttttcaaatatcaaagatactaatttgaaagcaattcacaacgaagaaagccggatgaaatgttcggttgaagctgtttttcaaatatcaaagatactaatttgaaagcaattcacaacggcatagaatctacagccactaacatatagctgtttttcaaatatcaaagatactaatttgaaagcaattcacaacgctcttcaagctgcttgactttcttatcagctgtttttcaaatatcaaagatactaatttgaaagcaattcacaacaaactcagactctttcgctttcaaatcaagctgtttttcaaatatcaaagatactaatttgaaagcaattcacaactgtcggaggtggtgtaacggcattatttagctgtttttcaaatatcaaagatactaatttgaaagcaattcacaactccggagcaattattttgaataaacgttctgctgtttttcaaatatcaaagatactaatttgaaagcaattcacaaccgttgtatatttcagatactcgatggtcaagctgtttttcaaatatcaaagatactaatttgaaagcaattcacaacaaaataaccaatttgcctataacagtaagagctgtttttcaaatatcaaagatactaatttgaaagcaattcacaacatgaagatagtaatttaccgtaccatcgtgctgtttttcaaatatcaaagatactaatttgaaagcaattcacaacgtaactgccaatgcagttgctataccggccgctgtttttcaaatatcaaagatactaatttgaaagcaattcacaacgagatggtcaaatgcctctttgtataatttgctgtttttcaaatatcaaagatactaatttgaaagcaattcacaactttcttctttgcagaccttgctgaaaaatagctgtttttcaaatatcaaagatactaatttgaaagcaattcacaacaaatcaagatataactcatttaaagtttcagctgtttttcaaatatcaaagatactaatttgaaagcaattcacaaccgtagtgattttatagagttgcaggaattcgctgtttttcaaatatcaaagatactaatttgaaagcaattcacaacgagcaattaaaggcaataattacattatcgctgtttttcaaatatcaaagatactaatttgaaagcaattcacaacaatatttacatatccctggtcggcttgtaagctgtttttcaaatatcaaagatactaatttgaaagcaattcacaacggcagcttcccggttctactcgaatctttgctgtttttcaaatatcaaagatactaatttgaaagcaattcacaacagtggcaaaccctttatgttccaaaatatcgctgtttttcaaatatcaaagatactaatttgaaagcaattcacaaccttgtacaatatcattttgcgataaattagctgtttttcaaatatcaaagatactaatttgaaagcaattcacaaccgctgcgctatcggggttactcctactgcgctgtttttcaaatatcaaagatactaatttgaaagcaattcacaacgctgaggaaaacgctaaaaggttgcaggatgctgtttttcaaatatcaaagatactaatttgaaagcaattcacaacagggtattgaaaagaaaaaacagtaaggtagctgtttttcaaatatcaaagatactaatttgaaagcaattcacaacacttccctaagaacacacgaatgtattcgtgctgtttttcaaatatcaaagatactaatttgaaagcaattcacaacaaaacagacttaggtatagagctttctttagctgtttttcaaatatcaaagatactaatttgaaagcaattcacaactgccaaatggtcaagttgtattagctccatgctgtttttcaaatatcaaagatactaatttgaaagcaattcacaacgcaaattgggcggttaaaagaggttttgtcgctgtttttcaaatatcaaagatactaatttgaaagcaattcacaacataagcaaccgatagcattttgagtgtatgctgtttttcaaatatcaaagatactaatttgaaagcaattcacaactcaaagagtgattggaaacagtgtatttcagctgtttttcaaatatcaaagatactaatttgaaagcaattcacaa

SEQ ID NO: 1269 - DNA, 21218 bp, synthetic construct
  variation 16650..17835: note = n is a, c, g, or t
  variation 19252..20760: note = n is a, c, g, or t
  source 1..21218: mol_type = other DNA
  misc_feature 1..21218: note = Synthetic
ttgccggagttctggtgattcaaggagttgatgctagggtagacaccttctgggctgtcataggaattatctcagcgatattctcaggcttggcttataatgtgattcgcaagttgaagaacacggaacaccccttggtgattatcttttattttccgctggtgacattgccttttgccttaatcgtctctgcttttggttgggtcaatcctgtaggttgggattgggcgatcttgcttttcatcggtgtatgcacgcagacagctcagtatttcttgactattgcctatcaaaatgccaatgtgtctaaggtggcaagtcttacctacataggtatagtatacgctttgatattcggctttttcttcttcaatgagacctttagtgccttagcttatgtgggaatggggcttgttttgctggggatattgctaaacatgcgtgtgaagcaagtttcctaaatgaattggacaggaagggaaagcaggttatttttgaattaagctaaactcgaataatgaaaatcaccaaagacctataccaaggctccctagcgcttctgacagatttttatcagcttaccatggcatatgcttattggaagtctggtaaggccgagcaggaagctgttttcaatctattcttccgaaagcatccttttcagggtggatttaccattgctgctggactggactatgttgtggattactgcaaaaatttcaagtttagccaagaagacctgagttacctggccactatgaaaggcaaggatggaaaggttttgtttgaaacgggctttctggaatacctcaaaaacatgaagttcagctgcgatatagatgctgtggaagaagggactgtggtatttccgaacactcctttagtgagggtgaaaggcccattgattcaatgccaattacttgaaacgccactactgaatattatcaactttcaaagtttgatcgctaccaaggccgcacgaattaatttggcagcacaaggtgaaccagtgttggaattcggtttacgtcgagctcaggggattgatggagggttggcagcttctagagcagcttatattggtggatgtacttctaccagtaatgtgatggcaggtaaactttttgggatccctgtctcgggtacgcatgcgcatagctggattatgtcttttgagacagaaatggaggcttttgaagcctatgcagatgcttttccagatcaatctattttcctggtcgatacctacgacaccgtgaatggaatcaagaatgccattaaagtagggaatgctttgcgaagcaatggaaaggaaatggtcggtatccgtatagactccggagacttggcctatttcagtaatgtagcgagagagatgctcgatgaggcaggttttcctgatgctaaaatcgtcgcttccaatgatctggatgagaatatcataacttctctaaaagggcaggaggcttctattaatgtttggggagttgggaccaagctggtgacggcctttgatcagccagcgcttggcggagtatataagctatcggctattcgcgatgaagagggtcgttggattcccaaaatcaaactttctcagcaatccttgaaaataaatattccgggagttcatacggtcaaacgcttcttttctaaaggaaaagcggttgcggatatgatttaccttgaatcacaggaactgaatccacaggcagcattgatcatagatccaaatgatcctacgagaagaaaacgaatgatgccggcattctatcaggaagaaattttattgaaaccaatcttcgccaaaggcaaactgatttatactttgccgactatcgctcagatcagagatagagtccaagatcaattgggctcaatagataagacgcataagagattggtgaatccgcatttgtatccgatcggtttggaagaaaacctgcaccagttaagaatggagttggtgctgaaagctaaacaagtagataatggcaatgatgctgagcaataattctctcttagacgggagtgaagacacttccttgggctgttctaaacaagtagaaaatggcaatgaatctgaaaaatagtgcattacttatagtagatgtgcaaaatgattttctcccgggcggagctttggcggtcagtcagggcgatgaagtcattcctgtcatcaatgctttgcaggagaaattcaattttatagtggctacgcaagattttcaccctgaagatcatggaagctttgctgcaaatcataaggggaaaagccccggtgagatgattgaattggcgggattgtcgcagattctatggccagttcactgtgtacagggatcggaaggagcggaatttcatgaagaattaaatccaatcaaatggaaggcgattttccaaaaaggcaaaaatcctgaagttgattcctactcaggtttctttgacaatgccagaagagaaatgactggtttgggtgattttcttcataacgaaggaataatgaatgtcttcgtgacaggacttgcgcaggattactgtgtgaaattcaccgcattggatgctgtgagtttaggcttcaaaacctatctaattagcgatgcgacacgggcagtgaacctaaatccagaggatggtgacaaagctctacaagaaatgaaaaacggaggagtaaaccttattgatagttcagctatactaaattaatcatgtttgaatataactcagaaaagcattacccaatcgaaacagaaagcagagttctgatcagatttcaggattgtgatccacttcgacacctaaacaacgcaaagtatttcgattactttttcaacgcgcgggaagaccaagtacctaagctttatggcgtagaaatgatggatttcatcaaaaagtatcaggcggcttgggtgatttataatcataatatttcctatgtcaagccagcgatggtaggggaatgggttcgcattaagagtcgcatcatctggcataatcataacacaatcgttctggagtattatatgacggatgattctgagacccagttgaagacgctgctttggtccaccatgcgctatgtgacgcttgcagaagggaagtccactgatcattctggggctgtcaatgatttcttgacagcgacctctatgaatcttgatatctctgggattcaggtgaaagatcgggtaaaaacacttgctcaggcaatgaaaaacatttgatataaatcaaatttctgtatctcagcgaacaagacctgtacacctgcgtacaggttttgtttttttaaaatatttgaattcaagcacttacaaatattttgaaaattaatttttactaatatttataataaagtgtaacccgctttttttaagatttagtcctaaactgttcgggttcaatacaaattcaggctaaaccgatcagtttcaaaacagttcttattacaaaattgagtgggtaaccaaattatattttgcctgaatgttaatttttgcaaaatagaaaagctctcaaataagctctaaaagccctttctggcacagttggtacgcgcttcgcaacaggatgaagcataactctaaaccaacaatattatgaaagctttattaacactagcactatcaggacttttagctaccagtacttttgcagctaatgggccagaggatttgaaagaaaactcaaccgttcacacgaactacaagaaaatctccgtacatctaaatgaaggtgtgggaaaagcaaaaattgccattttggatatgaatgggaagaagcttcatcagcgatctgtcaaagcaaaggatgaggtacatgtgccttacgatttgaacggtctgccatgtgcagagtatcaggtgatgattaccacagaagatgagcaagtgacctacactgtggagactgtagagaaagaagagccaactccagttgtctatcctctaatggcttatggtaaaaaagttaatgactataccattaacctcgttgtaataggactagaagaagctggtgtagatgtcaaaatcaaaacagtagctggtgatagattggtacacgaagaattggtggatcagcctgaaggattccgtaaaaactacaagttaaacggagttgatgctgaggatgtctatttcgaagtaactgacgcaaaaggaagaactcgtaccatatatatttgaattctaaaccaacctcttgtgtcaaagccctgaatctaacgatttggggttttttcgtttctttttaccacgcaggacagaaaggtttacattgaggacacaattttgtgtatgtactttgaaatcttaatgcattatcttcctcactttcctaccatatgcgccgtcagctcatttgcggtttgctctaggtctatgccaagtagctctttgtttacagaaagtattttttctctttcgagttgagggagcttatcaaagccgtaatatgcccctaagatcccgccagctatagcagctgtggtgtcattgtctctaccataattcaccagaaacatcatcgttcccatgaaatcaaagtcggagtaaatcatagctgtaagtgtctgaagccatacttctcctgcatggaatggcatatcttgcaatctctgatcaagctccgcaaatgcaaattgtaaggctttactatctgcgatgagttgatttcccagagtgtctagtttagcagcttctgcagaaatcattagcgcattttttaggatgttatgagctgtacgacccaccagtctgctttcgaaataattggcaggatctatacggagagaagcgagtaaatcttcttttgttgcccctggtttcattcctgccgatgtcattgctgcggcaagtgccgagatatctttagcgtagccaatatcataaatggatagcttgtatgcctcagcgtaggctttttcaggattcccagggaaaaaagaacccaaggtaggagagtaaagtaagcctgcacagaccatctcgccaccatagaatttgcccaaggaatctgcataagctaccagattgtcctcaatgaagggctgactaacctttgcccattcctgtagccaacccattttgagcgttactgcttcaaagggttctggatctataccctttatttctttaaattccttggtataagattcgtaagtcctaagtatttgcttcgcaaaatcctttgtgttcagttcatcttgcttttgagtaagcaggtaatcggaagtaaggactttccatctcgtatcgtctgtagtcccacctgctgggagatttgcaatccaaattccttctggagaaacttccctgaccatagaatccaaactttcgacaaatccatattctaacttgatgtcctctcttgaccacatttctgtaggagcgcccatcgcatcaccgatggctgatcccaccagcatgcccaagattttgttatgcaattgtttctccgtcagccctatttcagggacttcttggtcagaaaactggataggaactttggactctctgttgccgcaggaggatactatagcaagaacaataatagctagacttaaatatttcattaagtcaaaattagcattctagctttatcaagtaagcttttcttctgggttaaatctaaagagactgggacttgggcgataccaatcagtcgtctcataatttcaacaccctgataagcattcaaaagctccatggaaaaaggatgctgataaagttgcaagaaatctttgaacacactttcttcttgttgagccaagtcgagatgagctgcgaatactcccaagtcaaactctcgttcacccataaagccaaattcgggatcaatcactttcaatccatctgttgttttgagccaagatcctgggtaaaaatccccttgtaataaacagtctccatctgccaaataccgctttgatagctttgaaatggcatttttgaggagatgatcagttttataagttaagctcagttcttgtaaacccggctgaattgaatccaagtcaaaaccattttcttctaaaaacggaaaatgaaaaatgtgctcatgattcaattttttcatggccgaattatctgggaaattaggcagcttcaattggtgaagagcattcagatatttactcaaactttctaaatcatcgtaagctaactgtgaagctggcttatataggaaggtgaaatcaatcccatttcccaggtcttcgataagcaaaatatgctcctcaggatagtaaagtaaaattcgcgggctgtattgctttaatatttcatctccttgaagcaattggaaataagtatgctcaatctctattctctcaataggtgctgggatctgtgggaatttccgtacgtaagctttagattgctttaggatgacagatcgtaagttggtattgatacgcaatactaggttcatattgctttcccctgcggactctctcgacagtagctgttcattttccttccagagagggagtgcctgtagcatttctagacttgaatgctcatttaaatcaatcatggtactgagtttggcttataagtttcgaaactataataaagtttacgcagaagcgcacattttaaataaagttgaaaaatcagttgcaaaaggtctttttgcagacaaactgaaagtgtaccttttagaaatccctatttttgatctgaattaaacccttaactacagacagcatgtttggactaccccgaaatcttttcactgaagagcatgatcttttcagagttagcgtcagagattttattgcgcagcatattactccctataattcacagtgggaagaggataaaatggtttccagagaaagttggctcaaacttggtgaaaatggttttttgggaatacaagctccggagaatctcggggggatgaatattcaggatttcaggtacaatgctattttgatcgaggaacttggtttgagtggatgctcaggtccagcgattggatacccacttcacagcgatattgtgatgccatacatcttacattatgctacagaggcagctttagaaaaatacattccaaagatgatttctggtgaatatataggagctgtggccatgactgaaccaggggcaggaagtgatttgcagggcataagtaccagcgccaaagatcaaggagaatattatttggtcaatggaagcaaaactttcattacaaatggttatctatctgatgtagtagtagttgcagtaaagacagatccgaagaaaggagctaagggaattagcttgcttctgctagataatagtatgaagggttataccaaagggcttccatttgaaaaagtgggtttacatgcacaggatacctgcgagatattttttgaagatgtaaaagtcccaaaagagaatctgttaggcaaggagggagaaggctttaagtatttgatgacagagcttgcacaggagcgcttagtggtagcgctggcagctgtagccctgggggaatatatgctggaagagactatccaatatgtaaagcagcgtaaggctttcaatcaagcaatttcagagtttcaaaacactcgattcaaacttgccgagatgtgcgcagcattagaacagggaagaatatactgtgattacctggtgcagcttcacaacgatgggcaactggattctgccatggcatcagcggccaaatacaacatgaccgagttgcaatgcaaagtggctgatgaatgtgtacagctacatggcggatacggatatatgtgggattatggcgtggcacgagcttatgcagatgcgcgagttcagcgtatatatgccggaaccaatgagattatgaaagagctgattgcaagaaaaattttgaaataggcaagaaatcttttgacctaagccaagattttaattaattcaacaaaaatagatacacccaaaatattaacgtataccatgaaggattttccctggctaaagcattacccggaatctgtaccaaaagaagtagattatactgcttatactagtgttgcagagctttttgaagaaagtgtaaggaacttcggagatgctattgcatacgagtgcatggggaaaaccatgtcatttaatgagttgaacaagctcagtgaggattttgcttgctatttgactcaggttctgcgcttgaaaaagggctctagagtggccatacagatgcctaatacgcttcaatatcccgtggctatgtttggggcgattcgagcagggatgatcgtggtgaacactaatcccctctacacatcttcagaaatgaagcatcagttcaaagattccggggcagatttgatcatcattgttgccaatttcgctagcaatctagagaaaatcatggctgatattccagcaaagcatgtgattgtgactggtttaggggatttgcttggaggagccaagggaaccatcgtcaatctggtagtgaagtacatcaagaagatggtgccagcttattctattccaaaggccgtatcattcaaatctgcattggctcagggggctcaccataagttcaaacccgtagaactcagtttggaggataccgcttttctccaatatactggaggtaccactggggtgtccaaaggcgcagagttatcccatggaaatattgttgctaacatgcagcagatttcagcttggatgaggccaaagttgaaggagagagaggagatcgttattacggctttgccattgtatcatatttttgccttgacggtaaactgtctcgcgatgctcaaaatcggagcacacaatctgttgattactaatccgcgcgatatgccagctttttgtaaagacctgtccaaaaagcaattcacggttttcacaggagtcaatacattgtttaatggtctacttaatcaagaagcatttaagtccctagattttagtaagttgaaaatagcagtaggtggaggaatggctgtgcaaaaagctactgctgaaaagtggatggctgtgactggaacccctttggccgaaggctatggacttacagaaacttctcctgtagcttcctgcaatccaatagatggcacggaaagaaatggtactatcggtatcccgctgcccaacacagaaatgatgatcatcgatgatgagggaaatattttgcctacaggtgagcgtggtgaaatctgcatcaaagggccgcaggtgatgaaaggctactggaatagaccaaaagaaacagctgaagtgatgatgggtgactggttcaaatctggtgatatcggtgttatggacaaagacggcttcaccaaaatcgtagatcgcaaaaaggagatgatccttgtttccggtttcaatgtatatcctaatgaggtggaagatgtgattgcgtcttttccaggcgtgttggaagtaggagtgataggaattccagatcccaaatcaacagagcgagtggtcgcctacgtggtagtgaaagatcagtcaatcactcaggagcagatcatcactcattgccatgaatccctgaccaactacaagtgtccaaaagaagtgcacttcatcgacgaactcccaaaatccaatgtgggtaagattctaagaagaaagatcaaggaagcgcacctagagaagatcaaaagttgacggttggagtcaattgcttaaaatgatataaaaataccctgcacagggtatttttttttgtgtgggagtcagtattttgccaatacctaggttgttaactccaattaagtatatggattttctatgaagttaatcattgttgaatattttaatactatttatttgatgagaataatatggcttcaacctacctcttaaggttgggtaaatattagcaaatgatagaaattctatggatggaggtagaaaatggagttaaaaaaaggcgagttgccccgccttggatgttttcacaacggaataatccttattgtgaattgctttcaaaatgttgcttaaatataggtttaaactttaatttttaaaacgatatgaaaagaattttaggattggatttaggaactaactcgataggttgggcgctgattaatcaggattttgacaataaggaaggtgagattttgggtatgggaagtagaattataccaatgtcccaagatattttgggtgaatttggaagaggtaactccatttctcaaactgctgaacgtactagattaagaggagtcagacgtattaaggagagacatttgctaagaagagaacgtttacatcgggttttaaatgtattggattttttacctgctcattatgcctcacaaatagattttgataggcgattaggaaagtttaaatacgaaactgaacctaaattggcttatcgtccaattcacaatgaagagctgaataagacaaaatttgattttctttttaaagaatcatttaatgaaatgttagaggatttccgtcaaagccagcctcaactattgattaataagaacggtgaaccggcacttgtaccttatgattggactatttattacctacgcaagaaggcattgatcaataaaatctccaaacaggagttggcttggatcattctgaatttcaaccaaaaacggggatactatcaattaagaggcgaggaagaagaagacaatccaaataagaaagtagaattccattcacttaaaatagtggatgtaatagcagatgaagcccaaaagggtaaagcagaaatttggtattctttgatgctggagaatggatgggtatataggaggtcgagtaaaacacctttgtttgattggaaagataaggttcgagattttattgtaactactgatcttaatattgatggaagtttaaaaactgataaggaaggcaatgagaaaagaagtttcagagcgcctggggagaatgattggactttggttaagaagaaaactgaacaggaaattgatcagtcacaaaaaaccgttggtgcatatatctatgatttccttttactgaaacccaaacagaagatcaaaggaaagttagttagtactatcgaacgaaagttttataaagatgagtttaagcagattttaacaaagcaaattgagtttcattctgaattgaaaagtgaagatttttataatgcttgtattcgagagctgtatagaaacaatgaagctcatcaaattattttggggaaaaaggattttgtccatttgtttttagaagatattattttttatcagcgtccattgaaaagtcagaaatcatcaattggtaattgttccttggaatttagaccaatgaaagataaaaatgggaaactgctcaaagatgaaaatggaaagcagatgctaaagccattgaaagctattcccaaatcaaatccttattatcaggaatttagaatatggcaatggatctataatctatctatttatagaaaggaggatgatggtgataatctgacgaacgaatttttgagtagcatagaagattgggagggattatttacttttttaaatagcagaaaagaaatagagcagaaacctttgatgaaatatttgcttgaacgaaaaggatttaaaggaaaattgcttaatgccgaggctgagaaatatcgttggagatatgtagaggataaaaaatacccatgtaacgaaactaaaactctaattacaaccagattggatagagtagaaggtgttgaagatggttttttgacaagagaactagaacaacagctttggcatatcatatattcagtgacagacaaaatagattttgaaaaggcattaaaatcttttgcagtcaaaaatcagctggatgaaaggtcttttgtagagtcctttataaaatttcccccttttaaaagtgaatatggggctttttctgaaaaagcaataaagaagcttttaccactcatgaggataggagaatcttgggattgggaggcagtagatccaaaaacacaggaaagaattgataagatcctaactggagaatttgatgtgaccattaaaaatcgcgtaagagaaaaagcatttaacctcacacaagaaagtcattttcaaggtttacagctctggttggctcaatatattgtctatggtcgtcatgctgaagctgctgaaataggaaaatggagttctgttgatgatctggagaaataccttcaagatttcagacagcactcacttcgaaaccctattgtagagcaggtgatcacagaaactatgcgtgtggtgaaagatatttggtcaaaatatggaaatggagtaaaagatttcttcagtgaaattcatgttgaattaggaagggagatgaaaaatactgccgatgaccggaaacgaattactaatcaggtgactgaaaatgaaaacaccaacttgcgaataaaagccctattggcagaaatgttacatgatgctagtgtggaaaatgtacgtccctattccccgatgcaacatgagattttaaaaatctatgaagaaggagttctcaattcagatattgaaatagaagatgatatccttaaaatcagtaagactccacagccttcgagttctgatttgaggaggtataaattatggttagaacaaaggtattgttcgccatatacaggacaaaccataccattaaataagctttttacgccatcgtatgagatagagcacattattccccaaagtcgctattttgatgatagctttaataataaggttatttgcgaatctgcaattaataaggtgaaagacaaccaaattggaatggaatttataaaaaaccatcatggagaaatcgttgatttggggctgggtaaaaccgctcgaatttttgaagtagaagcttatgaggagtttgtaaaacaacactatgccaaaaacaggtcaaaacgttttaaacttttgatggaagaaattccagagaaaatgattgaacgacagttaaatgacactcgttatattagcaagttcatcacgtctctattgtccaatattgtaaggtcggatagtaatgatgatggagtcaattcgaaaaacatcatttcagtaaatggtagaatcaccaatgaactcaaacacgattgggggttgaatgatgtatggaacgaattggttctgcctcgttttgagcggatgaataccttgactaactctacgcaatttactagttggaataaaaaacaccagaaattccttccaaccgtgccattggagctatccaagggcttttcaaagaaacggcttgatcatcgtcatcatgcaatggatgctttggtcattgcctgtgccacgagagatcatgttaatttattgaataacaagcatgctaattcgtccaaacgttttgatctcaacagaaagctcagaaggtatgaaagaataatttattcgcatcctaagacgggtaaaagaattgaacgagatgtgccaaaggaatttattaagccgtggggaagtctaactatagatgccaaatatgcattatctagaatcattgtgagctttaaacaaaatttgagggtaattaataaagcaacaaataaatatgaaaaatgggtattagttgatggtcaaaaaacaaaacaaaaggtagaacaaaaaggggtgaattgggctatcagaaaaccgatgcataaggatacagtttcaggcctagtgcgattaaggaagaaaaaaagggtctctttaaatcaggcacttaatactattcaagatatagttgataaaccgttaagaatagaattagaaagattgaagtctattggacttgataaaaagaaaatttcaaaacacttccgagaaatcaataatgaatttcaggaacaatctattactagagttgaaattttctattgggaaaatgataatgtagcatctagagtttcaatagataatacttttgatgaaaaaaagatagaatcaataactgatactggaattcagaaaatccttcttaagcatttagacgggtataaaggggatttggataagaaaggagagaatacaccagcttcattgttagctttttcgccagagggaattgaagaaatgaataagaatatacttcttttgaaccgaggaaaacctcaccagccaattctgaaagtacgaacctacgaaacgaaaggtaataagtttgcagtgggtcaaaaaggcaataaatcctataaattcgttgaggccgcaaaaggaactaatctttatttcgctgtttatcaagatgaaaatggaaatagagcatatgaaaccgtccctttaaatattgtgattgagaggcagaaacaaggcttaacatcagtacctgagaggaatgaaaatgacgatttacttttgttttatttatcaccaaatgatttgatctatttatctacaccagaaaagaaaggtttgagtgtgggaatcaacaagtcattttcagaaaatatattgccaagtgaaatatatagagtggttagttttacagggaaaaggctctatgctataccattttcggtatcaaaagccattgttgataaagtagaatttactcaattgaacaagatggaatcaactttagatggaaaatcaataaaggaaaactgtattaagatatcagcagacagaataggttttattatacgatagttgaagtcattttaattttccaggttagaatggctgattgaagtgtgaaattaaaattcaaacaatggtgctcagaaaatactttcagggagaaggggaattatagattttttcttcagccatatggtaagtatttaggggaagtggcggacacctatgcttattgcttgatgcctaaacatttccatttgctggtgaaagtgaaggatgatgttcagttaacgaaatcttttccaaagtttgatactttggaaaagttggtgtccaagcaattttctaattgttttagttcatacacccaatcattcaataaagtttatcaaagaaaaggaatcttattcgtcaaaaatttcaaacgaaaagctattataactgagagacactggcaggacacctttttatatattcatctaaaatcaattatgcatggttttaccaaggatttgagagattggaactggtctagctggaaggcgtatcagacattggggcaagtgtctttattaaatagagtgtattattagaacttctttgataactagaatcatttcaatcaattgaagggatctaagaaggatgagctaatcaataaagattttgaataagaaaaaggctagacctgcctataagcagctgcggaccagcaggtctttttatattaacgagattatcgatgatcaaacgaacgcttttttttggtaacccagcctatctgagtacaaagaacgaacagttggtgattagatttccagacgataaacctgtgcgaacaatagcaattgaggatctgggtatggtggtgctagaggatcagcaaattacgataacaaatggcttgctgggcaaattgaccgatcgaaaggttgcgatagtgacttgcaatgcccaacaccttcccgatgggctattacttcccatgcatgggcatacggagcagactgagcgaattgggtaccaaatgaatgctagcctgccactgaagaaaaacttatggcaacaaactatcactgccaaaattcataatcagcatgctttattaaatgagaaaggtaagacaagcaagcgcatagagtatttggccaaaaatgttaaatctggtgacacagggaattacgaggctcaagctgctgcaatttattggcaaagtctttttgatatcccagatttcagtagggctcaagcaggtattcctccaaacaatttactcaactatgggtatgcgattttgagggctgtaatagctagggctttggtttcctcaggcttgcttcctaatctgggaatatggcatcacaataagtacaatgcttattgtctggcagatgatattatggagccatatcgaccatttgtggatctggtggtttctcatattgtagaaacagaagataactatgaggaattgaccattgttctcaaaaaggagcttttgaccattccagcgctggatgtgacaattgacggacaaaagagtccgctgatggttgcggccagtcgtactactaactcattgtatgagtgttttaggggcataagcagaaagattatttatccagagtatgcatgaaaattattattccaggcttaatcaatatcgaagtttgtgggttttagtgttttttgacctgccaacggaaactaaaaaagatcgaaagattgcatcttcttttcgaaagaaattgctgaatgatggatttgctatgtttcaattttcgatatacatgcgtttttgcgccagtagggaaaatgccgaagttcacacgcgaagagtaaaggtaaatctaccgccaaaggggaaggtggggattatgcagattactgatcgacagtttggaatgatggaattatttcatggaaaatcaattgcagaaaaagaacaaccagttcagcagttagaattgttctagatattgataactctttcagtctaaaatttcccaaaagtttaaaactttggaaaattaatctcaccaaataacaaaattgtcaacctgaaatccctagttttttataattctaaaaatggacataaaaaacagcataccagacannnnnnnnnnnnnnnnnnnnnnnnnnnnnnnnnnnnnnnnnnnnnnnnnnnnnnnnnnnnnnnnnnnnnnnnnnnnnnnnnnnnnnnnnnnnnnnnnnnnnnnnnnnnnnnnnnnnnnnnnnnnnnnnnnnnnnnnnnnnnnnnnnnnnnnnnnnnnnnnnnnnnnnnnnnnnnnnnnnnnnnnnnnnnnnnnnnnnnnnnnnnnnnnnnnnnnnnnnnnnnnnnnnnnnnnnnnnnnnnnnnnnnnnnnnnnnnnnnnnnnnnnnnnnnnnnnnnnnnnnnnnnnnnnnnnnnnnnnnnnnnnnnnnnnnnnnnnnnnnnnnnnnnnnnnnnnnnnnnnnnnnnnnnnnnnnnnnnnnnnnnnnnnnnnnnnnnnnnnnnnnnnnnnnnnnnnnnnnnnnnnnnnnnnnnnnnnnnnnnnnnnnnnnnnnnnnnnnnnnnnnnnnnnnnnnnnnnnnnnnnnnnnnnnnnnnnnnnnnnnnnnnnnnnnnnnnnnnnnnnnnnnnnnnnnnnnnnnnnnnnnnnnnnnnnnnnnnnnnnnnnnnnnnnnnnnnnnnnnnnnnnnnnnnnnnnnnnnnnnnnnnnnnnnnnnnnnnnnnnnnnnnnnnnnnnnnnnnnnnnnnnnnnnnnnnnnnnnnnnnnnnnnnnnnnnnnnnnnnnnnnnnnnnnnnnnnnnnnnnnnnnnnnnnnnnnnnnnnnnnnnnnnnnnnnnnnnnnnnnnnnnnnnnnnnnnnnnnnnnnnnnnnnnnnnnnnnnnnnnnnnnnnnnnnnnnnnnnnnnnnnnnnnnnnnnnnnnnnnnnnnnnnnnnnnnnnnnnnnnnnnnnnnnnnnnnnnnnnnnnnnnnnnnnnnnnnnnnnnnnnnnnnnnnnnnnnnnnnnnnnnnnnnnnnnnnnnnnnnnnnnnnnnnnnnnnnnnnnnnnnnnnnnnnnnnnnnnnnnnnnnnnnnnnnnnnnnnnnnnnnnnnnnnnnnnnnnnnnnnnnnnnnnnnnnnnnnnnnnnnnnnnnnnnnnnnnnnnnnnnnnnnnnnnnnnnnnnnnnnnnnnnnnnnnnnnnnnnnnnnnnnnnnnnnnnnnnnnnnnnnnnnnnnnnnnnnnnnnnnnnnnnnnnnnnnnnnnnnnnnnnnnnnnnnnnnnnnnnnnnnnnnnnnnnnnnnnnnnnnnnnnnnnnnnnnnnnnnnnnnnnnnnttaaaatagattctgaagcactagtgtccggtaaagatatttaaaccgggctgctccttttggaaccagcccggagtggctactttagagttacgacacaaaaaagcaagccatgggtaaaagtacaaactttagcggacagccgatattcaaccaattgttaagttttatcgataagaatgaggtgaaaaacatagcaaagaggaacggcgcagaacgatatgtgaagaaattttccacctataaccatttggtggtgatgctattcgctgctttagaaggctatagttcgctacgggaggtcattttgggcctattggccaatgctcacaaactatctcatctgggcttaagctacctggttaagcgcagtacgttatcagaggccaacctacgccgaaccagtaaagtcttcgaggagatctatctgtcagtttacagacaacatgcgccctctttagcggacagccagctaagcgattcggatttgaagcgcctctacatcatggattcttctaccttgtcgctatttaaagacatcctcaaaggggttggccgtaacccaaagcagggcaagaaaaaaggagggataaaagcccatacgctcatcaaagcaagcgaaaatgttccctgtctggttcgttacagtgcggcggcaagacatgatcacctgtttttgaaagaggccatgaatctagctgcaggctccatcatcaccttcgacaaggggtatgtggattatgagcaatacgagcaatttacacaacagtccatctggtatgtgacccgcctgaaagacaatgccctctacaaagcccaggtggagtacgatattcctgatgaagcagacaccggtgtgctcaaggatgaagaaattacggtcagctatggggaaaataaggctaaagagcaccgagcccgtcggatcgcctactgggatagcaaaaacgaacgtttgtttgaatttattaccaacaacttcgagcttcccgccgagaagatcgccttgatctacaagaaaaggtggcagattgaactcctcttcaagcaactgaaacagaacttccctttgaaatatttcctcggagacaacgaaaatgcaatagaactacagatctgggccgccttgcttgccaatctgctgatcaccttggtaagaagtaaagtgaaacggagctgggctttctcaaacctggtatccctgatcagcaaacagttgatgaactatatcaatgtctacagttttctggaagaccccgaaaaaagctggctgaaaatcatcgaagaaaacaacgacacctaccaaaactccctcttcccagaaatgaagggggctagcttttgagaaattcgattaaaagtacttctcccgataactggacatgaaaaatcagcctctttttagtttaccggacannnnnnnnnnnnnnnnnnnnnnnnnnnnnnnnnnnnnnnnnnnnnnnnnnnnnnnnnnnnnnnnnnnnnnnnnnnnnnnnnnnnnnnnnnnnnnnnnnnnnnnnnnnnnnnnnnnnnnnnnnnnnnnnnnnnnnnnnnnnnnnnnnnnnnnnnnnnnnnnnnnnnnnnnnnnnnnnnnnnnnnnnnnnnnnnnnnnnnnnnnnnnnnnnnnnnnnnnnnnnnnnnnnnnnnnnnnnnnnnnnnnnnnnnnnnnnnnnnnnnnnnnnnnnnnnnnnnnnnnnnnnnnnnnnnnnnnnnnnnnnnnnnnnnnnnnnnnnnnnnnnnnnnnnnnnnnnnnnnnnnnnnnnnnnnnnnnnnnnnnnnnnnnnnnnnnnnnnnnnnnnnnnnnnnnnnnnnnnnnnnnnnnnnnnnnnnnnnnnnnnnnnnnnnnnnnnnnnnnnnnnnnnnnnnnnnnnnnnnnnnnnnnnnnnnnnnnnnnnnnnnnnnnnnnnnnnnnnnnnnnnnnnnnnnnnnnnnnnnnnnnnnnnnnnnnnnnnnnnnnnnnnnnnnnnnnnnnnnnnnnnnnnnnnnnnnnnnnnnnnnnnnnnnnnnnnnnnnnnnnnnnnnnnnnnnnnnnnnnnnnnnnnnnnnnnnnnnnnnnnnnnnnnnnnnnnnnnnnnnnnnnnnnnnnnnnnnnnnnnnnnnnnnnnnnnnnnnnnnnnnnnnnnnnnnnnnnnnnnnnnnnnnnnnnnnnnnnnnnnnnnnnnnnnnnnnnnnnnnnnnnnnnnnnnnnnnnnnnnnnnnnnnnnnnnnnnnnnnnnnnnnnnnnnnnnnnnnnnnnnnnnnnnnnnnnnnnnnnnnnnnnnnnnnnnnnnnnnnnnnnnnnnnnnnnnnnnnnnnnnnnnnnnnnnnnnnnnnnnnnnnnnnnnnnnnnnnnnnnnnnnnnnnnnnnnnnnnnnnnnnnnnnnnnnnnnnnnnnnnnnnnnnnnnnnnnnnnnnnnnnnnnnnnnnnnnnnnnnnnnnnnnnnnnnnnnnnnnnnnnnnnnnnnnnnnnnnnnnnnnnnnnnnnnnnnnnnnnnnnnnnnnnnnnnnnnnnnnnnnnnnnnnnnnnnnnnnnnnnnnnnnnnnnnnnnnnnnnnnnnnnnnnnnnnnnnnnnnnnnnnnnnnnnnnnnnnnnnnnnnnnnnnnnnnnnnnnnnnnnnnnnnnnnnnnnnnnnnnnnnnnnnnnnnnnnnnnnnnnnnnnnnnnnnnnnnnnnnnnnnnnnnnnnnnnnnnnnnnnnnnnnnnnnnnnnnnnnnnnnnnnnnnnnnnnnnnnnnnnnnnnnnnnnnnnnnnnnnnnnnnnnnnnnnnnnnnnnnnnnnnnnnnnnnnnnnnnnnnnnnnnnnnnnnnnnnnnnnnnnnnnnnnnnnnnnnnnnnnnnnnnnnnnnnnnnnnnnnnnnnnnnnnnnnnnnnnnnnnnnnnnnnnnnnnnnnnnnnnnnnnnnnnnnnnnnnnnnnnnnnnnnnnnnnnnnnnnnnnnnnnnnnnnnngctgtgatttccctaggaaagtaacattttgaaagcaattcacaactagagtggtcatattattactcttggatattccggagcatgctgacccctccaatccggaatgttttcaagtagtgaaagtgcctttacaggctggattcgactgacattccggcgcatgttgacccctttaagatagattttcggtgatattccggagcatattgaccccctaaggttgatattccggaggatgttgacccctctgatcgatggttttggttttttagcggacattttcgataaccgctaactataatccaatggctggaaaacctaaacctatgagtcagataaaacaaatgatcatacttaacaggcagggaaagggagtcaagacaatcgcccgtatgctggatatcagtaagaataccgtcaagacttacctctttaagctcgacaaactgctaaca

SEQ ID NO: 1270 - DNA, 20957 bp, synthetic construct
  misc_feature 1..20957: note = Synthetic
  source 1..20957: mol_type = other DNA
aagtcaatctgcaaggcttctacaagaaatgtcctcaccccaacatggcagcgtacgaacgcacgtccgacaaccggttcatctatacccagcgcaaccagaaagagattgacgccctgcaggccatggtttatgcaagctactggctaatgccggaaaagctctccgtcacggcctacggaggactgttccgctgcttcaatttcggccacgactacacccactgctacacgtcttactttgtcacaggagccctcaacgcttacttaggtaatttatccctccatgcctacgccgacaatggttttcgtttcctggaaggggaaaccaaaggctacagcggaggcgacatcgccctaaaagccgcctatagctacaaggactggcagtttgctcttatctggcaacaacccttccagcataaatacaaaatgtttgaatcggaagtcctgaaccggaacctccagaagaccacagccctctacagtcgtgatgcctgcaacctcgttaacctgaccgtgacgtggcgtctgaccaaaggacgtaagttccgtgccgtcaaccggtccatccaactgaaagacagtgatgcggggattatccgataaagaagagaatattcttattcggaatattcggaagctagagtaagtacgatagtgattggattgtatgtgctattattcctccattactatcttcacctcctgaatattccggatttcgtcactgaagttgactccgattttatagacagtacggttgtctttggcaaagggttctacataaccttttgcctgaatctgtgccagtgcctcttccgcgctcccgtttagcttaaattccatgatatagacgtagtcctttgtctggagcaccaagtcaatccgtccccggttcgtacggtattccacctgcacatagaaacccatcaatttgaaaatgatgtaaagaatgttctgatagtgcacttcccgatcgcgtgccagttcgtaaggaatatcggcaaacatcgttttcagccgttcaaagaaatcgtccacttttcctgccatgacttcctctacgaagcactgaatctggtagggtgacttgctcacgcttacagaggcataattgggtaggagaaacttgaagaatccttgctccacttcccggtttgggaagcccagcgtgtagttttcgaacatcttgttataacctttgatagtcaggtagccactctgataaatgacgggaataggatcagtagaagcagtatcaatactgtccagtaccggctggctggtaacgatgtgttccagctcctcgattggataatggtgcagtttaagtagttcaaccaggtaagtcggagtccctgtttcaaaccagtagctaccgaatcttttttttgcaaaggtattcagcaggctgaacggattgtacattccgattgcgttttccgtaaaatgatagccgtcgtaattggttttcagctctttgcaagtttcttcgtaactcatctttgtagctatagccagttcatggatgtcttcttcaaaacaggtatgaatttccttttcactgataccgcaaatctcagcatatcggtcgtccatagatatgtccatcaggttgttcaaatcgctgaaaacactcactttaccgaacttggtgacacctgtcagcagggcaaatcggatgcatccgtccatagatttcaaggctccgtagaaagccttcagggtgctgcggtactcgttttgcaaggcttcgttcccaatagcctgcagcatgggtttgtcgtattcatcaatgagaattaccaccctgtggccggtctgttcgcaggcacggcggataatgccttggaaacggagagagaggctagtttcactttcacgcgtgccatatctgctttcccaagtgcataaattatcgttcagaatgctggtcagcgattctggagtatcatatttctgtgtattcaaatccagatgcagtaccggatacaccgtccagtttttttccagtttctccagtgccagtcctttgaaaagttctttctttcccagtgcgtaggcttcgattgtcgacagaagcagactcttgccgaaacgtcgcggacggctcaggaaatagtaacttcctgtattgaacagctggtagattaaagcggttttatctatatattcataaccgccggaaatcactttctcaaaattctgtactcctaccggatataacttgctcataacaactggattttgattctactgcgaatgtagcaattaaaaccgaacattcaaacatccagtgaatccgaaagaaaaaataaggtatgaaaaatcaacttctctggataacggacctaaataatgtaaaatatacatgcttttatgtaaagtatacttgtctttatggaaaatatcattaactttgcaatatcctagcaagcaaaaaaacttctatacactaactttaaattttacaattatgaaaaagagttttttgttacctcacagttgtatgagagtaggacttattctgctagtccctttctttatcatgttttgtctggaaatggcgggagcagctcccgaaatcaccattaccatgcctagcctggcaaacaatgagttgcttgacggaacggtctggtttaccttgcttcagggagaggacatctttatggaaatttggatcctcggtcttctgatttccctgcttttcattgctctgagcaaagaaaaagtggaagatgagatgattctgcaaatacggctccagtccatgctgcatgccctttggattacttcactgtgctttgtgctggaaaccctctttctttttggtttagcctatgcctacagtctttgggctatcctatatatctttttgctgttctttatcctgaaattccgttacgaactttatcaacttaaaaaggctgaaaaatgaaaaatacaatcaaagtagaacgggccatcaaggatatgacccagcaggatctggctgtagctatcagagtaagccggcagacaatcaattccattgaatcgggaaaatatgttccttctacggtcttggctctgaagattgcagcatacttcggcaagaccgtagatgaaatattccagctggaggagggcgactgagcctgttgtaagttatttttccttttcgattttgatgtcctgaatgttccggatttcgtcactgaagttgacaccgatcctgtagaccgtacgtttgtctttggcaaagggttctgcatagccttttgccttgatttgtgccagcgcctcttctgcactcccgttaagtttaaattccatgatatacacatagtcctttgtttggagcaccaagtcaatccgtccccggttcgtacggtattccacctgcacatagaaacccatcaatttgaaaatgatgtaaagaatgttctgatagtgcacttcccgatcgcgtgccagttcgtaaggaatatcggcaaacatcgttttcagccgttcaaagaaatcgtccacttttcctgccatgacttcctctacgaagcactgaatctggtagggtgacttgctcacgcttacagaggcataattgggtaggagaaacttgaagaatccttgctccacttcccggtttgggaagcccagcgtgtagttttcgaacatcttgttataacctttgatagtcaggtagccactctgataaatgacgggaataggatcagtagaagcagtatcaatgctgtccagtaccggctggctggtaacgatgtgttccagctcctcgattggataatggtgcagtttgagcagttcaaccaggtaagtcggagtccctgtttcaaaccagtagctaccgaagcgccggttggcaaaggtattcagtaaactgaaaggattgtacatcccgattgcgttttccgtgaaatgatagccgtcgtaattggttttcagctctttgcaagtttcttcgtaactcatcttcgtagctgtagccagttcatggatatcttccttaaaataggtatagatttctttttcactgattccacagatttctgcatattggtcaatcatggaaatatccctaaggttgttcaggtcgctgaaaacactaaccttgccgaacttggtgacacctgtcagcagggcaaatcggatgcatccgtccatggatttcaaggctccatagaaagctttcagggtgctgcggtactcgttttgcaagacttcgttcccaatagcctggagcatgggtttgtcgtattcatcaatgagaattaccaccctgcggccggtctgttcgcaggcacggcggataatgccttggaaacggagagagagacttgtttcactttcacgcgtgccatatctgctttcccaagtgcataaattatcattcagaatgctggtcagcgattcgggagtatcatatttctgtgtattcaaatccagatgcagcaccggatacaccgtccagtctttctccagtttctccagtgtaagtcctttgaaaagttctttctttcccagtgcataggcttcgattgtcgacagaagcaggcttttgccgaaacgtcgcggacggcttagaaaataatatttgtttgtattaaacaactcgtgcacgagtgcagttttgtctacatatacataaccatcgcgtatcaaaccttcaaaattctgtactcctaccggatatagcttgctcataacaactggattttgattctattgcgaatgtagcaatttaaaatgaacattcatacaaacgtttgtcaatttgtagatgcggctgtctaaaatattttcgaaatggtacttttagttatttcatttacagaccttccgtatagccttctgtaccagcttttccattaccttatatccttccagattcggatgaacaccgtcttccgagtaaattttaggcagtccgccttcctggtcgcacattgcactgtggtagtccacataaactatcttgtttgctttggcatacgcttttactttacggttcagctctctgatagtttcagccggtttaacttctggtctccatgaaaagctgtttgccggcatggtagaacataaaatcactttaatattatttgcctgggcaagttctaccatcgaaatgatatttcccaaagtcttttccagactgacagcataatcgtttaaggcaatgtcattggttccggccaatataaccacagcttttggtttgagattgattacatccgggcggaaacgcatcagcatctgtgccgatacctgtccgctgatacctctgcctacgtaattgtttttagtgaaaaactcggggtctgcatcgggccagccatcggtaatggagtttcccatgaaaactactttcgggttctttacttctttgttggcagcctcatagcggccaaaatctgcccagtcttttatttcctgagcttgtatgcataagcttcccatacaaagcagggcgatgagatacaattttttcatttgattagtaaatttagttgttttctttttcgaatgattggattaattcatccatttctttcgaatccagtgtatttacatagatgttttctccgcttgtggtgctgatgtgcaagaccggcagattgttgctcgtcagtataaagtgcacgatctttccatctacggtacgaaagaagcctttacggatacatcccagtccgaatccgttggttcgaaggtttacttgcggaatggcatccacttttgttatcgattttatttcgtcttttttcaattctgcaccatataaccccgagatgtgcaatgtgttgttttcgtacgatacgtttcctccttgtaaagacggaatgagtaatcctcctaatacgactgatgagattaccagaaaaaagccagcataaatcagactttttcggtgtattcgtttggaaaccttggcttggcagtaaaacagtgaggctggtaaacctatacacatcagtaggattgaaatgataaaaaagatttccgaatcggtcagcatgcttaggaattgacctgcaacgatgataactgctgtcccaatcatgatattgcggacgcgttttaagtacgttttaaatgccggagatgctttttcttcttcggtaaacgaattataattggacagcatacttggtctttttacgacagatgttccacatactaccaataagatagcagtgaataaagtaatgcccagtgtaaggatgtgttccataatattattaaaaaataaaaagaaagcgaccttttgcaagaccgctttagatgttttcacaacggaataatccttattgtgatttgcttcattttaatatgttacaaatataatcatttattttaaatattttctaattaatagatgtttttttatctttgaaagcaataataaaaataaaactatgaaaaagatattaggtctggatttagggacaaacagtatagggtgggctgttattaattctaagctcaatacaaatggtaaagaggaattggtgggtatatcgtcttcgggtagtagaataatacctatggatgcagctacattaagtgattttgataagggaaattcaaagtcacaaactgcagaacgtactcgtttgcgaggtatacgtagattattggagcgcaaccttcttcgtcgtgaacgtttacttcgtgttttagcttgtataaattttttgccagatcattttgctgcatgtatagatcgaaatggaaagtttatagcagatacagaacctaaattggcatggaaaaatgatttagaatcaggctatacatttctatttcaggaatcgtttcaagagatgcttgatgactttcgcatgaatcaaccaaattggctgacagaaggtaaaaagataccttatgattggactttatattatttacgtaagaaagctctgtcgcaaaagatttctaaagaagagttagcatggattcttttgaattttaatcaaaagcgtggttattatcagctcagaggagaagaggaggaagaagatgttagaaagatagtaaaatattatgctttaaaagttatttctgtagaagattccggtgaacacaaaggtaaagatgtatggtataatgtacatttggagaatggttggatatatcgtagggctagtaatactcctttagattgggtaggacaaatcaaagagtttgttgttactacagaattggatgatgccggaaatccgaaggtaaataaagatggtgagataaaacgttcgtttcgtgctccaaaagatgatgattggggattgcttaaagccaagactcaggagtctatagatgaaagtggaaaaactgttggggcttatatttatgactccctgcttcaaaatccgtttcaaaagataaaaggaaagttagttcgtactattgaaagaaaatattataaggaagaagtttatgcgatattggaagcacaaaaacattttcatcccgagttgaatgataaatctttgcttgttgcttgtgtggaagaattatatcctaataatgaacctcaccggaatattcttttagctcatgatcttacatatcttttggttgaagatgtattgttttatcagagaccactaaaaagtaaaaaagctttaatagataactgtccttatgaagagcgtatttttagaaaaaaagacggaacactttgtcatgagcctgtaaaatgtgcagctaagtctcatcctcgttttcaggaatttcgtttgtggcaattcattaccaatctccgtatttatcaacgtgaaaaagaagtgaatggctctttaaaaactgatgtagatgttacagctgcatttttacctgacgaacagagctatgaacaactttatgagtggttaaatacccgaaaagaaatagatcaaaaatctttgctggcttataaaccgtttaaattaggtaaaaaagaacaggtagcctaccgctggaactatgtagaggataaaacttatccttgtaatgagactagaagcgctctggtgagcagattgaaaaaggctggaatagatgaaggttttctctctcgtgaaaatgaggaatggctgtggcacatactttattctatatcggataaacaagaactaaaatcagctttgaatacttttgctcaaaaaaatgctttaaacgaacaatttattgaggttttctcaaagatgcctccattcgaaagtagttatgctgcatattcattaaaagcaatcaataaacttcttccattaatgcgaatgggtaaatattggaaagaagaggaaattgctttggaaactcgtgctcgtatagagaaaattcttaccggagagtatgatgaaacgattcgtaatcgtgttcgggagaaaactatccatttgtctacactatcttcttttagagctttgcctctgtggttggcttgttatattgtttatgaccgtcattctgaaataaaagaaatagaaaaatggacaactccgcaggatattgataattatttgaaaagtttcagacaacactctcttcgtaatcctatagttgaacaagttctaacagagactcttcgtgtggtacgagatatctggaaacaagaaggaaagatagacgaaattcatgtggagttaggtagggaaatgaagaaaacttccaaagaacgtgcgaaacttacagctcaaactattgaaaacgaatatacaaacttaagaattaaggctttgttgacagagtttataaatccagattttgaaattgaaaatgtaagaccatattcacccagtcaacaagaaatattacgtatttacgaggagggtgcattatcatctgtatccgaaaaagaaatccccgaagatatagttgccatactgaaaaagtttagagaaggagatgtacgtaaacgtccgtcacattcggaagttctacgttacaaactttggcttgaacaacgttatcgttcgccgtacactggtcaggttatacctttggctaaactgtttacttctgcttatgaaatagaacatatcattccgcagtctcgttattttgatgactcgtatacaaataaagtaatatgtgagtcagctgtcaataaattgaaggacaatcttcttggctatgaatttatcaaaaagcatcacggggagaaagtacccttgggaaatggtaaatcagttcaaattttcagcgtaggagagtatgagcaatttgtaaaagatttctataatagtaactctcagaaaatgaagaaactgttgctggaggatattcccgacagttttattgagcgtcagttgaatgatagccgttatatcagtaaattgattaaaggtcttttgtccaatatagtacgtactgaggatgaacaagaagcgatatcaaaaaatgtaattgtttgtactggtggagtaacagaccgtttgaagaaagactggggagtacaagatgtgtggaatcgtattattctgccacgtttcatacgtcttaatcagttggaggatacagaaatatttacttctgtcagtgcttcaggacatgttattccttctatgccgttgcatatgcagcgtgggtttaacaaaaaacgtattgaccatcgtcatcatgcaatggatgctattgtgatagcttgtgctagtcgtaatattgtaaattatttgaataattcttctgctcgtagaggggcggaattatcgcgttatgatcttcgttgtttattgtgtgataaggtaaaaacagatgaaaatagtaattataaatggatgattcgaaaaccatgggagtcgtttacacgagatgtatacacaacattagctgatatggtagtcagtttcaagcaaaatcttagggtagtaaatcgtactactaattattttacgcattacgatttagaaggaaagaaacggagcgtgccgcagactaaaggcgatagatgggctattcgtaaaccgatgcataaagatactgtttttggtgaagtaaatctgcgcaaagaaaaaacggtttcattgaaagaggcactgaataatcctgtgaggattattgataagcgtttaaagcggaagatattggaattgcttcaggctgaaaatgatttgaaagctatcaataaatattttgaagctaatgcaacagaatggcctggtttgaacttgaaaaaaataaaggtctattattttacgaaggaaacgaatgaccatttctttgcaactcgtaaaccgctggatacttcatttaatcagaaaaaaattgaagaggaggtaacagatactggcatacagaagatactgttgaatcatttgctgaagaatggtaataatccggaaattgctttttcgccagaaggaatagagcggatgaatcagaagattactgatttgaatgatggaagggagcatcagcctatttacaaagtaagagtgtatgaaaaagctgaaaagtttgctgtgggtgagacggggaataaacgattcaagtttgtggaagctgcaaaaggaaccaatttattttttgctgtatatgaagctacacaacaggatatcacgtcaggaagagctatgcgaaaacgcagtttttcgtcaatacctttaaataatgtgataagtcgtcagaagaaagggcttcctcctgctccagaagacagaaatggagataaactgttatttgtgttgtcacctaatgatttggtatacttacctacagatgaagaaatacgtgatggtcatattattgcgcctataaataaagagcgtatctataagatggtaagttgtactggtaatagagcattttttgttccatttgcagtagcttctgtcatagttgataaattagaatttacctcacaaaacaagattgaactttttaatgataaaatttcaataaaagaaatttgtataccgttaatggtagacagattaggaaatgtaaaatataataacctaataatctgatgtaatgataaagaagacattgtattttggaaatcctgcgtacctgtccttacagaattctcaattggttattaaattaccggaggtggagcataatgctctgcttccggatagctttaaaagtcagtctgttgtaacaaaacctatagaggatatagctttggtaatattagataatcgccggataaccattacctcgggagtactggaagctcttttagaaaacaatgtcagtgtagtgacctgtgatggaaaggggatgccgattgggttaatgttacctttatatggaaatacagtacagaatgagcggtttagaaaacaaattgatgcatcacttcctttaaaaaagcagttgtggcagcagaccatcaaggtaaagatacagaatcagaatgaagtgctcaatcgctgtttaggagaaaagtttaactgtatgcaggtttgggctgatgatgttagaagtggagatccggataatttagaagccagggctgctgctttttattggaaaatattgtttgcacatatagatggatttacacgcgatagagatggtatttaccccaataatctgttgaattatggttatgctatattgcgtgcaattgtagctcgtgctttggtctctagtgggctgctacctacattgggaattcatcatcataaccgttataatgcctactgtttggctgatgatattatggaaccttatcggccttatgtcgatgaattggtttttaaaatagtgaaaaattatggaagtgctgaggaacttacgaaagaaatcaaagcaattcttttgaccattccaactcttgaggttgtaataaatggaaaaagaagtccgcttatgattgctgtttcacagactacagcatcgctttacagatgttttagtggtgaggttcgaaaaatacaatatccggagaagatttaattggcatggatcgttttagtgaataccgtattatgtggattttggtgttttttgatttaccgactgatacgaagaaagacagaaaggcgcatgctttattccgtaaaaatcttcagaaagatgggtttacaatgtttcagttttccatctatatacgacattgtgctagtactgaaaatgcttcagtacatattaaaagagtaaaatcatttttacctgattatggtcaggtgggaattttgtgtattactgacaagcagtttgggcagattgaaatgttttatggaaaaaagattcagacccctaatgctgcaagtcaacagttagagttgttttagaaataaaaaatctcacaaatctgtgagattttttatttgtagaaacagattttttattttctaaactttgttgcaactatctgaaaatcagtgataaatacctattctgctgtttcttgtagttgcaaagttattaaaatgaaagcaaatcacaacagtacttctaatacttcttccggtggtacgctgtttcttgtagttgcaaagttattaaaatgaaagcaaatcacaacttaccttcggcaaaagcgaatgcagttacgctgtttcttgtagttgcaaagttattaaaatgaaagcaaatcacaacaagctgtccgctttcgaatgacacagaaagctgtttcttgtagttgcaaagttattaaaatgaaagcaaatcacaactgagtagtacttgccctcaaacagttccatgctgtttcttgtagttgcaaagttattaaaatgaaagcaaatcacaactgaaaacggcaagcatgttataatgttgtgtgctgtttcttgtagttgcaaagttattaaaatgaaagcaaatcacaacgcattactgcctcggcctcgtctgtgttcagctgtttcttgtagttgcaaagttattaaaatgaaagcaaatcacaacaaatcttcatctcagcgtttgtacacttatgctgtttcttgtagttgcaaagttattaaaatgaaagcaaatcacaactaaaagaagtgtcgaactcaatggtactagctgtttcttgtagttgcaaagttattaaaatgaaagcaaatcacaactcgtaacgataagggagttattttaggtaagctgtttcttgtagttgcaaagttattaaaatgaaagcaaatcacaacaaacgctctgccgataaacttgtttacaaggctgtttcttgtagttgcaaagttattaaaatgaaagcaaatcacaacccatggcacgcgcttccttacgtatgcggtgctgtttcttgtagttgcaaagttattaaaatgaaaataaatcgcaaatattatcaaccagcatcaaccaagcacacttccctgtgatggttctctatttttgcgtcagtctattcgaagtttatcattttaaagccgaatgtttaggatagcaatgaggcactttgttcgcagtagagcgatacatacgtcatattaatgataaagtagaaaactaccgagtatgactgcagagagtattaaaaaaattacaaacttaaaaaagtaagaaaatggcaatcaaatttgatatttttgaaagcccggttgttgacaaggaggcaacacaccttcctcatcccaaagtattgacaaacggagtggtggacaccaagaaattgagtgaacgaatcagttgtaaatgcacggcttcgccggccgatgtaaatgcggtaattacggctttggccgaagagatggcagttgctttaaaaaacagttgctcggtacatatcggtgggctgggattttttcgcctgatactgaagtatgtgcctggaagtaattccaagcgtgttgccgctaccgacatccggttgaaggcggtaaaatttatgcccgataaggagtttaaggaacgttttcagacactcgaagtaaagcgtgtaaaggcttctgcccggcattcgtctaaattgtcacagccggaagtgctggctgtggtagccggttttttcaaaaagaacagttttatgcggcgcacggatatggaggcaattacagggtttaataccgtaaaggcattgcgaaccatccgtcggttactggacgagggcaggctaaagaatttgggaagccgctatcaaccgctttatgtgaaaggagaggcatggtgataaattgataagggcaaaagaaaaacagcggaccgtccccgatgagggggcgatccgctgtggtataaatagctatctgttattatagacagcaattaattgcatgccgagatcctgagcttgaagcttacaggcatcaaaggaatcttgtaggtctgcagggtttcaggcccgcagctggcattacctaagccgcgaatctgtgcatccagatgtaagatgatgcaaggacgttcctgcaattcccacatatgtttggcattcatcaggtcggcatcggtatagcgcagtgtagagaaggatacgttgccttctgtttcgatgcggataccttcaccttgcttgttggtaagtttcagttcgcgcagaccttcacggttacccatagactgaggtttgacgtagcgttctaccatatctttgacagtagtgtgatagcgtcctaccatacatccatctttacggtcgatatagttttcccacggaccgtatgcgtagtagtctacattgtccagtccggcattaaccgagcaaaccagtccggtgcggcgcaggttggcagttttgggcaggaacttcacatccatatccattacaccattcggaaggaatgtgtaattgatttctgttccgcacaagcttccgtcgcgggtggttttaacaatcactttaccgtctgctgtttcggtagcttcgcaagtacctgtagcattcagtccgttttctgtctgcttgaatccgtcgttttctatccagcggtggttatcgtagatgaaaccttccttgccgtagattacatccatgccgtttactttcagtgcagtcatctgtccggttgccaggcagaatgtaccttcgatgaagctgtttttcaccgtcaggcttttttcgtctttagcaatttccagtttacccacacgactgtttacacgcagttcgggcaggttgccgcgcttgctcagctcaaactgctgctgggcaatcagatgtccggctgctgcccaggttctttcctgcatatcttttacatagagattcagcataacctcttcgccggcagcggcagcatctttcagctgtacgcctttcaaatccagtgtaacgagttggtcggtttcgggggcaatggcatctagtctcatctggctggtacctgctatgtttccgttcttcactacttcccaaaccagttcgaatccttcggttgagataaagtcgtaggtattctgcaacttcacggtagctgtgttcttgtcagcatctgttccttccagctggaatttgatgtactggtatacagctttcacttctttcagtttcggtgattcgtggcgggtagccggaatgataccgtttgagcagaagttaccctgatgcgggccggggaagtcgtaacctgtatgcagacggccttcgtaagtaccgttcttgatgtctgtcggttcgtagatagcctggtctacccagtcccagatagcgccaccgatggtagctgaactgctttcgatactgttccagtattcacgcaggttaccaatggcattacccatggcatgtgcatactcgcagatgaacataggtttgtccagtgagctggtatactgctccatccagtccatgcccgggtacatcttcgaataaaggtcggagaagcggtttcctccatactcttttccgtcgcgtgtactttcgtggtgaacaggacgcgggtccagacgtttggctgcatcgtagcaagcctggaagttgtttccacctccacactcattacccaagctccagaaaataaccgacggatggttgcggtcgcgcaacaccatgcggtcaatgcggtctacaaaagcaggaatccacgacggcatgtcgctgatagattggttagcatggtcttccagatcggcctcgtccatagtatacagtccgtagtagtcgaacatggcatacatcttggctgcattaggatagtgcgatgtacggatggtattgatgttgttgcgtttcatcagcagcacatcttccagcattgattcagttgttacggcacgtccgtacagcgggtgagagtcgtggcggtttactcctttgaagaaaacacgctgtccgttgatatagacgatggtgccgcgcagtgtaacatcgcggaaaccgtacttggtagagaaagccatttcatcctttccgttttctcgctggatgacgcttacggtatacagattaggtgtttcggcagtccaagcctgcaggttctttacattgaactgaactttcagcttcgtttctgctttgccgacagagaatgttgctttttgtttcttctcggcaaccagacggccttctgggtcggtcagcttgataaccaactctttgctgcctttcagtttatcacggttgtccagtgtcagctctacttgcatcgtgccgctcttatactggtcgcgtgcattcagtctggatgtgatgtaatggtcgcgcacacttactttcggggtgttatacagatatacatcgcggaagataccactcatgcggaacatgtcctgacattccagatacgaaccgtcgctccagcggaatacctgtacggccagtttgttgcgtccctcacgcagatacttggtcaggtcgaactcggctacgttgttggctccctgtgtatagcctacgtattgtccgttcaagtaaacaaaggctgcactgtagataccgccaaactgaatgaaagtacgctgtttgctccaaccttcgggcaggtcgaaatagcgtacatacgagcctacggggttgataccgtaattctttccaccgtcgttgaaacctttgcgggcatcaatataaggaggtgtgttagaatgcgggtactctacgttacaatagataggacggtcgtatccctgcatttcccagttggatggaaccggaatggtagcccagctgctcacgtcgaagtcttccttgtagaagtcgatcgggcgtttcgaaggctcaggcacaaagtcgaaataccagtcgccgttcagtagcatggtagctttactttgcgtataaacccacggggtagtatagaattctttgtcggccagcatttcggcttcactgaagtaaggagtataggtagcatgtcctttttccttgttttcttcgaatcgggtttcgtcttcccagtataccttttcgcgaagggcgctgttgtcaccttcgggagcagctacactgctggctgtgatgctgaacaaggtttccttgctttcgcctgccttggctgcatccaccagtgcaatagtaccgtctttttgggcggcagctacccatttagcctggttggaaggaataaactgcacataatcgcctacgggcttgataagccataactgcatttcatcggacccgtttgtttcggcaacctgaacaaaacggcttgcggcagcctggacagcttgattttcgtaaggattaatcagacggaaactgcctgagaggtcggcaatgctccagagctgagacttgttgctttcgtttttggaagtgagctgtattttaggactgttggcagaaaaactccatgctttgtcgggttgtccggcaggagttaccatatacagttttttcctgtcaaagcgtgcctgagctgttgctgctccggtgacgagaagcagcaacaggcatgacagtataaatgttaaatgttttttcatggataatactgttattgtttggaattagggatttactacggttacacccagttcgttcagttcaacagtagcctttcctccgtcaggagtagtggctgccagtttgataaagcggccggtttcttctttcttgaactgaactgtctgtggaatcgggttgttcacaatgttactgaactcaccggtagtaggtatttctttccactgtttgccatcgttactgatgtaaagtgtataatggaaagccatagacggtttggcttgctggcctgcaggtgcgtaggtaaaggctttcagcgtaactttcttgcctaagtcgactaccagtggctgtgcagaaacctttttccagttttctctggacaggttgttccactcgtttacctgtgccatatcctgaataggagctgcgtagaaagcacctacattcaggatgtttgcattggagcgggatgccttgatggttactttcagctgttcagcttttaaatcgtctacacggagcagtctcttatagccgatggttgttcctttggcaatttctttccaagtattgtcggcaaaagcttctacggtaaattcttctactcgctgtccttttgctatgtcttcctgaagcatgatggtattgaatacagcatccggttgcaggtcgtaagtcttgctttcaccattaccttttgcagtccagtactggttgccttctttcagcagattattgctgaaggtctggttgatataggctgcaaattcctttaagcgtgtttcgtcagcctgactgatacgtccttcacagtcgggtggaatgttaagaagcaataccgagttgcatcctacagacttgtagtagatgtcgaccatgtgtttcaggctttttactttgctgtcttctgcttcgtgatagaaccatcccggacggattgaaacgtctacttctgatggataccagtgtacgctctttgctttagcaagcatgtcgcggctaccaaggtctttactcatggcattaacttccagtgctttattgccagcttcggcagaaggcaggcctcccggattcagcacagtagcactccattctgtgtcacgtcccaatccgctttcgttaccaacccagcgtacgtcgtcacccataatggctgtaacggccttgggctgcagttcgtgtatggttttataaataagtgtccagtcgtattcctgtttcttgccgttaggaccttctccgttggcaccgtcaaaccatacttcgtgcacttctccatagtttgtaagcagttcggtgagctgttcaacaaagaactgattgtatttcggtgagtcaccgtagcattctgcgttacggtcccatggtgaaaggtatacaccaaatttcatatcatacttggtacaggcatcacgtaattctttaactacatcgccttttccgtctttccatttggaggatgctacagagtgttttgtggtagctgtaggccacagacagaaaccgtcgtgatgcttggctgtgaggataaccattttgaagccgcattctttcagtgtgcgtacccactggtcggcatccaggttagtcggattgaaaacggccgggtcttctgttccgtctccccattctctaccagtaaaggtatttacgccaaaatgaagaaatgcagtcagctccattttttgccattccaactgctgaggggtaggaaccaggtgagctgcaatttctactttttgttccaatgtcgcattttctgggaaaatagcttgctttacgtaatactgttcttgctgtgaacatgctcccagacaagtggctatacataaagccatcattgattttgaaaggtaattcataaagtttgttctttgggtttatagtattcttaaaataattttcttggtaaagatacgatgaataattttattattcaatgaatatttccgattgatttttacgtaaaatggttttcggtatatattataggtgaaaaattcatttttctgcaattttttgagtagtggtaacataggttacagtttatatgttttgttttgctcaattttgcaacagaataataaataactggaatatgaaaaatttaagtgtaggtaagattgttgctgataactttgcaacagctgctgttttttcgaaatatggaattgatttttgttgtcatggtgatgttttgttgagtcaggcttgtaaggatgccggtgtaaatcctgatgaagttgaacaagctttgcagcaaatacatttagagcagcagcatggtttttcttcttggccactggacttgctgattgattatgtactgaaaattcatcatcgggggattcgacggaacggaccggaaattttggtgctgatgaataaggttctggcagcgcacggtgaagcgcatccggaattgctggagttgcatggcttgtttgtggaatcgttgaaagaccttgaatcgcatttacaaaaggaagagaatgtactgtttccgtatctgctggaactctttgcagcttcagaggaagggcgcacgttggagcagatgcattgtggtacggtaaagaatcctatccgggtgatgcgtatggagcatgaaggtgaaggtgaccgttatcatcgtatcaatgaactgacgcacggttttagtactcctgctgacggctgtggcagttaccgcttgctgatggagcgtttgaagaaatttgtgaatgacttatacgagcatattcatctggaaaataatgtcatttttcctcaggctgtagcattggaggagaaatgggtgtgctgagttggtgagtaggaaaaagacgtgaatagagatacattcatggtaggtctgttcacgtcttttttataggaaaattatattagtttgaagcgaatcctgaaaataccttctttgtaatcgtaactgataattttgaaggttccaatttcggctgtattggttacgtgctgaccgatgcagaggcattcatcataatctccgactttaacgatgcgcacggtttctgttgcattttcaggtaaacgtttcaggtcgaatcggccgactgcttctgcctgtgtaatgaattcggtggtaacaggcaggttttgccgaattacttggttcacagtttcttctatttcctgaatttgctctgccgacggacatgtgggtaatgagaaatcaagtttactttttt

SEQ ID NO: 1271 - DNA, 20789 bp, synthetic construct
  misc_feature 1..20789: note = Synthetic
  source 1..20789: mol_type = other DNA
ttataatatatgatgccgatgacgtccgctataaaccatccgataggaatagaccaccagattccgatgaccccgatggcaggaatgccggcaagccaataggaaagggctacacgggttcccaacgataccactgtgagcactacggacattcccggcatacggatggcacgataatatccgtataacaggaacaaaatcccgattccgcaataaaacgctccctcgatgcgtaaataactgataccgatgttcagaatttccgtttcgtgggggcggacaaaaatcagcatcaatggtttggcgaataaaaagaccagaatggaaatgaccagagagaagagaacggtggtaatcaaggcacttttcactcctttgcggatccgttcctcttttctcgctccgaagttctgggcaataaaggtggaaaaggcatttccgaattcctgtaccggcatataggcgaacgagtctatttttattgctgccgcaaaggcggccatgactacagtgccaaaactgttgaccaatccttgtaccatgagaatgcccagattcattaccgattgttgtacacaggtcagtgcggagaacgaagtgatctctttcaggcagtgacggtcgaaatgcaggtcgttgcggtgtaatctcagttcggggtatttcacgtaggcatatcccataattcccaaagcggatactccctgtgcggctaccgtggcgatggctgctcccttgattccccaatccaactgcaagataaagaacaaatccagcccgatgttcagtacaacggaaaccgccagaaaccaaagaggagtgacggcatctcctatggcacgcagcaatgccgcatagaaattatagataaaggtaaagccgattccccaaaagataatccacaagtaatcatacatcatgccataaatatctttgggaatctgcaatatcctgaggatgggatgaatccagacgaaaaccgctatatttagaatcaatgttactgtgccgatcagcaggacggatacatagatgctacggcgtagggaatccgtccgtccggctccatattgcaaggaaaaaacggttccgcttcccatggacaatcccagcaggatggaaataaggaaaaccatcagcgtgtaggcggaaccgacggcggccaatgcgccggaacctatacattgtcctacaatcagcgtgtcggctatgttgtaacactgttgtagcagtgagcctataatcataggtaaggtaaaacgtagcagagtgccggtgatgcctccctgcgtcaagtctattttagataacatgatgtgcgtctgttcgattcaatttcttatttattttgaaatttattgcgaaggtagggaataaaatatcaaacaacaatagagattgtctatttaatacccggaatgttctttctccttaaaaagagttaacttgataatattttccataggaaactttttattataagaaatatcatgtatgtttgcataaagtttccattggaaaatattaaatcaaataaaatagttcgattatgaagtatatagtaataggaggcgtagcaggaggtgcaactgctgccgcacgtatcagaagaaacacggaacaggcggaaatcattttgttcgagaagggagaatacatttcgtatgccaattgtggtctgccttattatataggaggtgtgattgcggagcgggaaaaattgtttgtacagactccggaggctttcgggaaacgttttaacatagatgtgcgtacccggtccgaggtaatagccatccattctgccgataagacagtggatattcgtacttccgacgggaaaacttatacggagagttatgacaaattattgctttctccgggtgcgtcgcctgttcgtcctcccttgccgggcattgacaatgaaggaatttttaccctacgtaatgtgaatgataccgatgctatcaagagttacttgcagcagcataaggtgaaacgggcggtaatcatcggggccggattcatcgggttggagatggcggagaatctgcaggaagccggtgcggaagtggcggttgtagagatggcaaatcaagtcatggctcctattgatttctctatggcttctttggtgcacgagcatttgttgcagaaaggagtgcatctctacctggaaaaggcggtggcttctttcgagcgcacggtcaacggactggaggttatttttaaatcgggcgaaaggctgcctgccgatatggtgttgttatccatcggggtacgtcccaatacctcattggtgacagaggccggactggagataggggagatgcgcggcattaaggtgaacgattacttgcagacttccgacgagcatatttatgcggtgggcgacgctatcgagttccgtcatccgctgactgatagaccgtggttgaattatctggctggtccggccaaccgtcaggcgcgtattgtggcagataacatggtttttggaaataaggttacatacgaaggggctgtcggtacttccattgccaaaatttttgatatgactgtcgctgcttcaggccttccggcaaagcggttgaaacaggcaggcattgattatttgtcggcaaccatccattccggttcccatgcgggatattatcccgatgctttacagatgtccattaaaataaccttctctcctgtgaacgggaaattacttggagcgcagattgtggggtataacggagtggacaaacgtattgacgaattctcgcaagtgattaagcataacggaactgtttatgacttgatggctttggagcaggcatacgctcctcctttctcttcggctaaagatcctgtagcagtagccggatatgtagccggaaatatactgagcggaaagatgaagcctctttattggcgcgagttgcaggctgccgatttgagtaaagttacgttggttgatgtccgtactcccgatgaatttgcactcggtgctttgaagggggctgtcaatattcctttggatgatatgcgcgaaaggatgaaagagattcctcaggataagccggtctatttgtattgtggagtggggttgagagggtatctggcttctaatatattgttacagaatggctttggggaagtaaggaatttaataggaggtttgaaactgtataaagcggcaacgactcctctgcccaagccgaaggagttctcaaattccggatcttcaagttctgattcttcaaaagttgatcattctgaacacagtaaagattctgctgaagcttatactattgcctcttccgtcattccttctatgaaagcaataaaagtggatgcttgtggcatatcttgtcccggtcctatcatgaagctgaagaagagtatggaagaactggcggacggcgaacgtctggagattgtcgctacggatgccggtttcccccgcgatgccgaagcatggtgccagactaccgggaaccgttttgtctcagtaaagtcaggagcaggaaagtatgaggtaattgttgagaaaagtactccgcaatcttcttcctcggaggtttgccgggaggataaagggaaaacttttattctgttcagtgacgacctggacaaagttttagctacttttgtactcgcaaacggtgcggcggctacgggaaagaaggtgaccatcttctttactttctgggggctgaatgctatcaaaagattggacaagcctgcggtgaagaaagatatctgggggaagatgttcggcatgatgctgccttccagttctttaaagttgagattgtctaaaatgaatatgggtggaatgggagccaggatgatgcgatatatcatgaataagaaaaatatcgactcactggaatctctgcgtactcaagccattcagaacggagtggaatttattgcttgccagatgtcaatggatgtaatgggtgtgaaacgtgaggaattgctggatcatgtgactattggcggagtggcaacctatatgaaccgtgccgaacaggcgaatgtaaacttgtttatttaaatttgcatggagaaaataaaatcaatatgtgtcatgagagagctgttcaaggctctctctgaacttgaaacccgcttgatggaacaatatggagtgtcattgaatgaggcaatggcactttgttgcattggcggagatacgctgacagccagtgtgatatcggaaaacacaggtctgtctgcttcgcatacctctaaagtcatccgttccattgaagagaaagaattaatcgtccgtaatttgggggataaggataaacggcagatgcattttactttatccgataaagggcgtgaatgtttggaagcgctgaaagcaaatgaaatagaaataccggaactattaaagccattgtttaaataaacccttctcttttccatttgtttattccggatatgaaactggagaaatggaaaaacaagtggaaggagtggagcaatctgcgcaaatggcaaatatggaaactgaagctgattgatgcccgtctgtatttcgtgagcatattcgtggggctgcttacgggactggttgctgtgccttatcactatcttctctggtatttctttgatgtgcggaaaacttttttcacggcgcattatccgtggtattggcatgtattgttgttttttatcttatgggggattctgatctttgtcgcttctttggtaaaacgtatgccattgatagccggaggcggtattcctcagacacgtgcggccaataacggtcgtatccgttatgagcatccttttaaggaactggtggccaaattctgcggaggtgtgttggctctcagtgcggggctgtccttgggacgcgaggggccgtctgttcagatagggtcttatataggaacacttatctcccgttggggacatatcctgaaaggggaacggaaacaattgctggctgccggagccggtgcgggcttgtctgccgcttttgccgctccgttgtcttcttctttgctggtaatagaatccatcgagcgttttgatgcgcctaaaaccgccattactaccttgttggccggcgtggtagccggaggagtggctagttggatgttccccacgactccttatcatctgattagtgcggtcgttcccggtttatcttttatccgtcaggcagagctttatattatctttgccgcccttatggctgtcattgcaaagttttattcgctcatcgttcctttctttcaagaaaggatacctgccatgaaactctccattcctgtcaagatgttgtatttattgatcatagcttatgccatatcgttaacagagacgaatctgacaggtggcggagagcagtttttgatgatgcagggaatgaatggaactcatgatatccggtggcttactatcatgatgcttattcattttgtttttacgctgttttctctttcttcgggtttgccgggaggaagtttcattcctaccttggttacgggaggattattgggacaaatcttcgggttggtattggtacagcgcggatggatagggtatgagaatgtgagttatatgatgctgatcgggatggtggcttttttggtggctgtggtgcgtacccctttgactgccattgttctgataacggagattaccggtcatttcgaggtgttctatccttccatcgtggtaggtgggttgacttattatttcaccgaattgttacagataaaaccttacaatgtattgctgtatgacaggatgttccgtagccataatccggagtcttccgaaggggatggtgcccgctatcatctttttgtcgagataatggatgggtcttattttgacggaaaggaagtggatacattggctttacctaatcattgtatcattcgtagtatacaccggaatcgtaaaaacttacttcctcaggggcaaaccctggttcccggtgatcaagtggagatagaaatagatgcacaggatatagaaaaattatacgaaccgttggtcagtatggcaaatatctattaaaagatgagtctaaaaaagcccccgttaaaggacgagggcaacctaaatgttttcacaacggaataatccttattgtgacttgcttcaaattagtattgcaaaactatgaaataaatatgtaaaggacaagtgattattagaataatttgataactttgaaaagttttgataaaatagttgtcttatgaaaaatatagtgggtcttgatttgggtaccaatagcataggttgggcagtagtaaatggaagtgtcaatgacgatggaagtgaacaattggttaagatacaagcttctggaagtcgcatcatacctatggatgcagctatgataggagattttaataaaggtaattccatatctcaaactgctgaaagaaccagattgcgtggagttcgtcgtttaagcgaacgatatctgcttcgcagagaacggttgcatagaattcttgatattttaggatttttgccttttcattttgctcaagatttagataggcatggtaagatagttaagggcaaggaacctaaactggcttggcgtaagaatgaagctggtcagtttgaatttatattccaagattcatttaaggaaatgctggaggattttaagctaaatcatccgaatctgataacagatgataaaaaagtaccttatgattggactatctactatctccgtaaaaagggattgacttctaaaatttcaaaagaagaattggcgtggatattattgaattttaatcaaaagcgtggatattatcaattacgtggtgaggaagaggaggaaaataagaataaattggttgaattctatgctcttaaagtagttgcagtagaggattccggagaaaaaaagggaaaggatatttggtataatgtgcatttggaaaatggatgggtgtatcgaagaacaagtaatatgcctcttgattgggttggaaaaactaaagaattcattgtaactacggatttagagaaggacggaactccgaaaaaagataaggaagggaatgtaaaacgctcttttcgtgctcctaaggaagatgattggtcattggtcaagaagaaaacagaagcggatattgatcaaactcataagacagtaggtgcctatatttatgatacgcttttaggaaatcctagtcagaaaattcgtggaagactggtgagaaccattgaacgcaaatattataaggaggagctgaaacagattttggagaagcagaaggagtttcacctggaattgcaagacagagcattgtatgctgcttgtattgaagaactatatccaataaatgaagcacatcggaataatgttggtaatcgggattttacttatttgtttttagaggatatactcttttatcagcgtcctcttaaaagcaaaaaatcattaatagacaattgtccttatgaggagaatcagggtcttgataaggaaacgggagagataaaatcttttcctgtaaaatgtattgctaaatcacatccgttgtttcaagaattccgcttgtggcaatttataataaatctgcgtatttataggaaagacctggcacaagatgtggatgttacaaatgagttattgaagacagaagaagattatctgtctcttatacacatctccgagcccattgctttatttgactggttgaatggtaaaaaagaaattgatcaaaaggcttttctgaaatatccgctttttggactgaaaaaagagatagagaattatcgttggaattatgtgcaagacaaaccttatccatgtaatgaaacccgttcattgatgttggcgaggctggagaaatgtgatatttctattgaattcctgacaaaagagaatgaggaagctttatggcatatattatattcggttgaagacaagaatgaaatagtaaaagctttgcagaaatttgcggataaacatgacctgaatgcttcttttgttgatgtgtttcagaaattcccaccttttaagaaagaatatggttcctattcggcaaaagcaattaaaaaattattgcctttaatgcgtatgggaaaatattggagtgagaattcaatagataaaggaacgcgtgaacggattgataagataataacaggagaatatgatgagaaaatagaaaatagagtgagggagaaagcaattcatcttgctgatgtttctgatttcaaaggtttgcctctttggttagtgtgttacattgtttatggtcgtcactctgaagcaaaagaaataacccagtggaaatctcctgctgatattgattcgtatttaagatcttttaagcaacattcattgcgtaatccaattgttgagcagattattattgaaacactacgtgttgttcgtgatatttggaaacaagtgggaaatattgatgagatacatgtggagttggggcgtgagatgaagaatccggctgacaagcggaagaaaatgacacagcaaatgtctgaaaatgagaataccaacttgcgtatcaaatatttgctcacggaatttttgaatcctgaatatgaggttgaaaatgttcgtccttattcgccaagtcagcaggatattttgcgtatttatgaagagggtgttttaaatagtgtttccgatttaccggaggaaatatcggatatattgaaaaagtttacagaaacagacttgaagaagcgtccttcaaggtcagaaattttgcgttacaagctttggctggaacagaagtatcgttctccttataccggtgaagtgattccattaggtaagttgtttacgcctgcatacgaaatagagcatgttattccccaatcatgttattttgatgattcttttagtaacaaggtgatttgtgaagcggaagtcaataagcttaaaagcaatttattgggacatgagtttatagtgaagcatcatggggagatagtggaacttccttttggaaaaaaagtaaggatcttcactgtggatgaatatgagcaatttgtgaaagataactattcgcgtactcgtagtaaaatgaaaaaacttttgatggatgatattccggaggagtttgttactcgtcagctgaatgatagtaggtacatcagcaaagttgtaaagtcccttctttccaacatcgttagagaaaaaggagaggaagaagcaatttcaaagaatgtaattccttgtaccggaggagttacggatcgtttgaagaaagattggggaataaatgaggtttggaataaaattatacttcctcgttttcaacgactcaatgagttgaccggcacaaataaatttacaactaaaaatgttgggattcaagaaattccgacaatgcctttggaattgcaaaaaggttttaataagaaaagaatagatcatcgtcatcatgcaatggatgccataataatagcgtgtgcaaataggaatattattaattatttaaataatgagtcggcaacagctaaggctgaattatcccgatatgatttgcagaaaatgctgtgtgataaagctaagactgataataacggtaactataaatgggtgatcagaaaaccgtgggcatcgtttacacaggatacatatttggctttggaaaatataatagtcagttttaagcaaaatttgcgtgttataaataaagctaccaatcgcttcttgcattataatgaagaaggcaaaaagatctttgtgaaacagggaaaaggggacaactgggctatacgtaaatccatgcataaagatacggtatttggagaagttaatttgcgtaggataaagactgtagctttaaatgaagcgatgaaaaatcctcaaagcatcgttgtgaaagacttcaagagaaaattattggaactttggaatttaggatttgacgcgaagagaataaagaagtactttgaagataatagagaaacttggagtgatataaatctgtctaaaatagaggtttactattttagtaaagatactaaagatcgattctttgctactagaaaaccgctggatactagttttgatagaaagaaaatagaaaataatattactgatacgggtatccaaaaaatattgttacgtcatttggaactgaaagataataatccggatattgctttttcgccggatggcattgatgaaatgaatcgtaatattattcagctgaataatggaaagtatcatcagcctatcattaaaattcgttggtatgaacaggctgataagtttgcagtaggtcaaacaggtaataaattttctaaatttgtagaggctgcgaaaggaacaaatttattttttgctgtatacgagtcgaatattctagataaaaagacgaatactataataaagaaaagaaattatgctaccattccactgaatgttgcaattgaacggcaaaaacaaggtttacctgttgcaccggaagatgagaatggtaatgaccctatttttgtattgtcacctaatgatttggtttatcttcctactgatgatgaattagctaatggtattattgcccagcctttggataggggaaggatttataagatggtaagttgtacgggaaatgaaggacattttatacctgcgagaatagcgaatcctattttacaaacaatagaattaggtagtaataataaggcgcaaaaggcatggacagatgaaatgataaaagaaatatgtatgcctataaaagtatgtatacctataaaagttgatcgtttaggaaatgtcttagaatcaagtagttcatataaaaaataatatattcttattttatggaagaaaacaaaggacaaattcttttatatcaaacggtagatggtgagtcaagaattgaagtaacactatgcaatgatacagtttggctgacattagatcaaatggcagaattatttcaacggaacaaatcaacgatttcacgccatataaagaatgtttttgagagtggggaattacaggaaaattcagttgttgcattttttgcaacaactgcttctgatggtaaaatatatcaagtggcttattataatttggatatgattataagcataggctatcgggttaaatcttaccgtggtgtgcagtttcgaatatgggcaacacaaatactaaaagagtatttagtaaagggatttgtaatgaacgatgaactgttgaagcgtgcaggtggtggaaattattttgatgagttattatcacgcatacgtgatattcgttcctcagaaaagatattctatcgtaaaattcttgaaatttatgctttgagcatagattatgacccaagtactgagtctactcgattgttttttgccacggttcaaaataaaatgcatttttcagtacatggacatacggctgctgaggttatttacggtcgtgcagatgcagggaaagattttatgggattaactaattggacaggagcagtgccaaagcggaatgatatagaatatgctaagaattatttgacagatgatgagttggatacattaaatcgtattgtaagtttgtatcttgactttgcagaattgcaggctaaaagtcatactcctatgtatatgaaagactggattcaaaaattggatgattttcttagactgtcaggaaaagaattgttacaacatgctggtactatttcggctgaattagcaaagaaaaaagcaaatcttgaatatgatgaatttaagaaacgcattagtaatcagttatctcctgtagaaatagatttcattgaaaatttcgaaaaagagcagaagaaattgcgaggtaagtaatatattaacctttaaaatatgatactatgataaagaaaacactttattttggtaatccggcttatttgtcattacgaaataaccaattagtcataaaacttccggaagttgagaaaagtgattcattgccggatatctttaaagaacaatcggaagtaacgaagccgattgaagatataggtgtcgtagtactagatcataagcaaattactattacttccggtgtattagaatctctattagagaataattgtgccgttatcacttgtgatagtaaaagtatgccagtgggtttaatgctccctttgtatggaaatacaactcagaatgagcgtttccgtcaacagttggatgcatcattgccattgaaaaagcaactttggcagcaaacaattaaggcaaaaatagataatcaagcatctgtattgagagtttgtgtaggtgaagaaatgaaatgtatgcgaatttgggcgaatgaagtgaagagtggtgatccagagaatttggaagcacgtgcggctgcttttttttggaaaaatttatttgcagatattattggctttactcgtgacagagaagggatttctcctaataatttattgaattatggttatgctatacttcgtgctatcgttgctcgtgctttagtggcaagtgggttgcttcctaccttagggatccatcatcataatcgttataatgcatattgtttagctgacgatgtgatggagccatatcgaccttatgttgatgaattagtatttaatttagtgaaattgtatggtgcaaatttggaattaacaaaagaaataaaatcacgtttgcttgttattcccacattggatgtacgtattaatggtaaacgtagtccgttgatggtggctgtcgctcagactacagcttctctatataaatgtttttgtggagaaattcgtcgtattagttatcccgaacgataatggaccgttttagtgaatatcggattatgtgggtactagtattatttgatttgccaacggaaactaagaaggacaagaaagcttatactgattttagaaaaaatctacaaaaggatggctttacaatgtttcagttttcaatttacgtccgtcattgtgctagtagcgagaatgcaactgttcatataaatagagttaaatcttttttgcctgaatatggacaagtgggaataatgtgtatcactgataaacaatttgctgctattgaacttttttatggaaagaaactacaaggtgtaactactccaggacagcaattggaattattttaaaaataagaaatcccgtctgaaacgggatttcttattagataacaactttgtttttaattcctgaatatatgtgtaactaattggtaattagtttgtaacatatattccgttgtttccaatggttcaaagatactaatttgaaagcaaatcacaacgaactatgttgacgttcagaattacattaagttgtttccaatggttcaaagatactaatttgaaagcaaatcacaacatttgagttcgaaaaaattatttactgctagttgtttccaatggttcaaagatactaatttgaaagcaaatcacaacgcttctgtttagaactccacttataataggttgtttccaatggttcaaagatactaatttgaaagcaaatcacaacacctgagttcgaaaaaactgtttactgctgttgtttccaatggttcaaagatactaatttgaaagcaaatcacaacaatactcaatacctttaacaatattcgtgtgttgtttccaatggttcaaagatactaatttgaaagcaaatcacaactggacgagaatttagagaattcgagaggatgttgtttccaatggttcaaagatactaatttgaaagcaaatcacaacgtgacagacgagatacatatccgggaagcagttgtttccaatggttcaaagatactaatttgaaagcaaatcacaactaaacaaatcagcctgttgttgctcatcgagttgtttccaatggttcaaagatactaatttgaaagcaaatcacaactccagtaggagttacaattattattaaccgttgtttccaatggttcaaagatactaatttgaaagcaaatcacaactcccttctgcatagtcgaacccaaaaaagggttgtttccaatggttcaaagatactaatttgaaagcaaatcacaactaaatccttacgctccttatcagtcatgatgttgtttccaatggttcaaagatactaatttgaaagcaaatcacaacccgagtcagcgtcaatcactttcttgtcagttgtttccaatggttcaaagatactaatttgaaagcaaatcacaacaggctgctggatttgtacagtaacatttcgttgtttccaatggttcaaagatactaatttgaaagcaaatcacaacgtcattgttattcttaatatagaagagtcgttgtttccaatggttcaaagatactaatttgaaagcaaatcacaacgcttctgtttagaactccacttataataggttgtttccaatggttcaaagatactaatttgaaagcaaatcacaacacctgagttcgaaaaaactgtttactgctgttgtttccaatggttcaaagatactaatttgaaagcaaatcacaactttgccctctatcgatatttctgaatggagttgtttccaatggttcaaagatactaatttgaaagcaaatcacaacttctttccataatgttacgtttttaattggttgtttccaatggttcaaagatactaatttgaaagcaaatcacaacggcgcgttctctgatatggtaagcgtttcagttgtttccaatggttcaaagatactaatttgaaagcaaatcacaacttattgtatgatttttaattgttaattttgttgtttccaatggttcaaagatactaatttgaaagcaaatcacaactgatatggaatcaatctttttactgtcacgttgtttccaatggttcaaagatactaatttgaaagcaaatcacaaccggacagaacatagatggtcacagtaatagttgtttccaatggttcaaagatactaatttgaaagcaaatcacaacgcttaatcatactacgacagaatgttgaagttgtttccaatggttcaaagatactaatttgaaagcaaatcacaacttatgaccagttgttgtgtaatgttaatttgttgtttccaatggttcaaagatactaatttgaaagcaaatcacaacgattgcgtcacgtaatttgcggagaggtgagttgtttccaatggttcaaagatactaatttgaaagcaaatcacaactaagcgggaaggatgaggactacaagacgtgttgtttccaatggttcaaagatactaatttgaaagcaaatcataacatattagctgaaaatccctagtcgagtaagaaatcaaaaatttcatctgggttctcatctaggttttctgggtcatcataataagaatctaggttatcaagatagaaatcatattctgatgattgattaccaaatctctgatcatactgttgttgtgatagcttagtaactttatcaggattcctatcggcataagcagatgcctcttctattgacatttgtttggtagaagtaaataccaagtaatataattgtggcttggtataatgagtatctaaagttacttgttgataaccagatttccttgcagtaactattacgttttctggtgtgatagtagttttcaagatataggtatagattctttgatttctaagtgaatcccttagtaatttaattgaatctactttagcaaagaatatagaatctcttctaagttcttctttatatcgttttacccttttgatagaatcctctctgctctcctttatataaggaggagttaccctcctaggttcattgtttaatagaacaagacccagaagagaaactccaaatatagaaaatggaagtaaaagatgattcgtttttgagttcatacccactagttttgtattgatctttaatatgagaatttaagtacctacctcttagattcactttttaataatcttttgagttgctctttagaactttatcatatcggtatactttgttatttttaaaagatacccatagatgatgtttctttacgttgtaaccaataccttctatattagtagattctactgatgttatttctattccagtatttattttaactaattcaagatattcttctctgtccatcctattaaaattttagaagtcttaacaccggatgtaatacgttggtatatttttgaataattgcccatgctctcagatgttatccattcttctttcattttttataggatatgagagcaaacatataactgatactttgtaagagttttattatgttatctaatacccctcttatttctccctcttcaatctgaagaagttttttaaaaagataggatctgtatcctctcaattatgttgtttttattgattcaaatatactaatttagatatgaattatccttaattattaattcttattatattaaagagtttaaagtgggttggaggtaaaactttgcagcatataatgtgtatatagaaaaattatacgaaccgttggtcagtatggcaaatatctattaaatttgccgtatgaaaaagaaattccagcttgaagttccgggaggagccgacaaagtgttgcttcatacttgttgtgctccttgttcatcagccatcatagagtgcttgatgcagcatggtgtcactccggttatctattattgtaatcccaatatttatccgttggaggaatacattatccgcaaggacgaatgtacgcggtatgcccagtccttgggattggaaattatagatgccgattatgatcatgatgcctggcgttgtcgaatggcaggaatggagcaagagcctgaaagaggaggccgttgcttgcgttgtttcaagatgcgactgcaggaaaccgcacgttatgcccacgaacatggattcccggttatcactactacgcttgcttccagccgttggaaaagtttggaacagatagaggaagcgggccgatatgctacggctccttatccggatgttacttattgggaacagaactggcgtaaaggtggattgagcgagcgtcgcattgctatcattaaggaatataatttttataatcagcaatattgtggctgtgagttcagtatgcggaaagaagaaaagggaggatgacgagaatgaagatgttcaaactgtggatggttgtaatgttattgggactcttgcccgttgtttcagaggcgcaagaagaaataaataatgccattaatgtacagttggagtatctgaaaaagtatcctaaagacaaagaagcgcttcggaaagttagttttctctatctgaataaagcagattatgatcaggctatcttttatggtcgacaattgtttgagttgggttataatgaacgggattacaatggcgctgtaatttattctcatatttgtctggggcaggcccatatgatgaagggaaatgtaaaggaggcttatagtcatttagggcaggccaggctgataggtgaaagtaataaaaatgattccgccttatgttccgtatataatgggctgggactttatgcatcgaatgtccaaaaagactattatcgttcacttacttatttcttcaaaggagttgaagctgcaagacgttgtcattatgacagactctattccattttgctttctaatattgccggtatttattatttgaaaaatgatagcacaggattgaaatatgcccttgaatgttatgaactgggacatgaacggaaagatccttatctgatttatagtggttcaaccaataccgcttatatgtattatttgaagagtgactataatacagcattgaaatatattcaggaggcggagttcaccatggtgcagaatgacttttatgatcaatcaaacgtttacaatctttatggatatattctgcataaattgaataaagatgatgaagcgctgggttttttccggaaggctttggatttgaaagaacagggaaatatttcttcagtgatgaattcttatttgggctatgccgaaattttaatggagcatcaccagtatgaccgggctgtccggatgctgaaagccggaatagaactgtcttaccaacaggctaatgccatctatcgaagtgacctgttgaaggctttatcccgatgttatgaagaagatggtatgctggtagaggcgttgaagtatcataagctctatcagctggaaacagatagcttatataatgcggaaaaggaacgtgccgtgggggagatacgtgcaaaatacgatatggaacggcaggaaaacgagataaaacaaaaccgtctggaattattggaaaaggaaaataagatgcaattgcttatagccggatttatctgtatcttcatagctgcctctttactatattacttatattacagaaaaaataagctgtaccttaccattgtgaagcaaaatcaggacgctatccggcgtgaacagcaattgcagaacaaaatagacgagcagtttgcagagataggccgccagtccgctcttttacaagaatatcttacggactcgacgaaaacttctttgccgcaacctgagaaatatgcttcatcctcgttgacagatgaaaagaagcaggatttatttctgcgtttggaaacgctgttgtgggaggagaaggtatttacagacaatttgctgaccaaagagaaagtagcggaaatgttgggaactaatcgtacttatctctctcaaattattaatgagcagaccaagcagacttttactcaatttgtaaatggtttccgcacaaaagaggcagtccgtttactttccgatcctgataaccaaactccgctaaaggcgatttcagctgaattgggctttaattccatgactactttttatagccagtttcaggcggctactggtatgactcccgctcagtatagaaacaaagtgcaggaattgcataaaaatagataatctattaatttgctatcataaatttatccaaatgcggcaattgctgtatttggataacctatttttgctataatttaaaattttatgcattaatttgctatcgacgcaatataagctgcaaaactgttttaacaataaaacggaacttaaaaagtgattataaacagtattaatattaaatctatgaagagtatgaaacattcagattaccacggaaagctacttcgactggcgatggttttcgttgcattgtttttgtgtggaacaatggcatatgcacaaacagaccggatgatcagcggtatagttgtagatgagaatggagatcccctgcctgccgctcacatccgtcaggtgagccagacgaaaggggaggaactagctgctgtcataaccgatatgaacgggcacttccggctgaccctgctccgcacagcgaaagagatagaaatctcttacttgggctatgaatcaaagaaagtaagattgacaagtgcgaacagttacagaattgtcttggagccggcctccgaactgctggacgaggtggtggtaaccggatatcagactatctccagggaacgggctaccggttcatttgcgaaagtagattcgaaaaagttggaaactcaacggttaagtagtgtcagctcattgatggagggaagaatagcaggttatagtgacggtaagatacgtggtgtgacttcgatgaacggacttactactcctctgtatgtgattgatgggtttccggtagagaaaactatttctgacggactgggcaactgggtcgaaaatgtgcctgatttgaatatagaggatatagagaatattacggtattaaaagatgccgcggctacgtctatctatggtgctcgtgctgctaatggtgtagtagtcatcactactaaaaaagccggaaagaatcagctgaatgtatcattttcagcgacattgacagtacgcccttataatttttataccggtcacttggccgatacggctgacatgatagagatggaaaaggagtgggcggccatgaatcctaatcttcaaggagagggagcatcccaatatgcacagaatttgttggacaatgcatccatgtattcctgtttgggggtacaggctattttaaaacatcatacaggtgcgatcagcgaagcacaaatggagcagacgctacatgaactggcttcacagggattccgttattatgatgatgtgaagaaatatggtaaacgaaatccgttttcgcaacaatataacttgaatatcgggcgtggaacggaaaaaaatacatttaatgcttcgctgtcttacaggaataaccgggaagaagataaatatactgacagcgagagtttcggattgaatttgcagaacactacccggcttacttcatggctgagtctggatttgggaacgtatctgaattatggagatggtacaacgcagagttataatctgacctcacccggatataattatgttccttatagttcgttgttgaatggcgatggaagctactatactaacacggctgcggaccggtacagtaagtcacaacaggaaattatttcttcttacggattgtatagtatggatattacccctttggacgaattgggaagaaacttgtcgaagagtaagaattttagtaatcgtacttttgcgagacttaattttaaattcacagactggttgagatacactgcttcgttccaatatgaagtaggggaatataagacaagccaattgcaagataaggaaagctatgctgtacgtaataaagtaaatacatttgctactgatgcaagtgggagtggccaggctacttataatcttccttatggcaatatttatacaacggggactaata

SEQ ID NO: 1272 - DNA, 20704 bp, synthetic construct
  misc_feature 1..20704: note = Synthetic
  source 1..20704: mol_type = other DNA
tgctgcggctgtggcaagggctgggctactacagccgtgcccgcaacctgcacaaggcggcgcagcagatcgtggcgatgggtggtttccccaagaccttggagggtatcaagagcctgaagggtgtgggcgactacacagcggcagccatcggctcgattgccttcggtctgcctgcggcggtggtcgatggcaatgtctatcgtgtgctggcccgccatttcggcatcgatacccccatcaacaccactgagggcaagaaactattcgcggccttggcgcaagagctgctgcctcacgaccggccggccgacttcaatcaggccatgatggactttggcgccatccagtgtacgccgtcgtcgccacgttgcctgctctgtccgctcatggagggttgcgaggccctgcgcacaggacgaattcaggatttgcccgtgaaggagaaaaccctgaaaatccagacccgccaccttacttatttatatataaggtgtaagggccataccgccatccatcgccgcccggcaggcgacatctggcaggggttgtgggagccttatttcatggagcattcagaaaacgatcctgttcaataccctgtgtcccctgttcaatgtctgaagagaaacgtgcgccatgtgctgacccatcggatcatcctggcagacttctatttctctgagaccgacgagcgacccgccttgcccgacgactacatctggattcctgagtcagccatcgaccagtacggtgtgcctcggttggtggaaaaactgctcacggaagtggccgctttggggtgaatcttgtgtcatgaaatgaaaaaagtgtctgttttgttgcgtatttgtttgtggttttgtacttttgcagcataaaaaaccgataaaactacagttgtatgaaaaaaattaccctttttttgttgatggtggccttcagcatctcgatgatggcccaaaacaaactgacgccccaggctcagctgatggtggaacgtcagaaagcgaaaatcgaacggcaggcgactcgcgccaaaggtcaagatgccacagtcaatgaacccaagcgcctgacgctggtggtgagtgtttccgacgccacggctgagacgttctctcgcatcaaggccgcaggcggtgaaatccgttcgcgactgggccgccaggtggtggtcggcatccccatcgacagcctggatgccctgcagcaaatcgagggcgttcagcgcatcgacaaaggccataagggccatctgaagaccgacgtgacgcgccagcagacgggtgtcagtctgctcaacggtccttcggttccagaagaggccatcccctacacaggtaagggtgtgaccatctgcctgatcgacataggtttcgactaccagcaccctgccttcaaggatgctgaggggaactcacgcatcaagtgcgtctatatgatggacgactatagcgggcatcctttcaaggtagacgatcctgaggctggcgaaatcaccttccccggctctgtcttcgacacacccgaactcattgcctcgctgaccaccgacaacgctgatgagtcccacggcacccatacggcaggcattgcggcaggcagcctttctccattgggttttggcggtatggcacctgaggctgacattgtgctcgtgcctgtgagtgataccgcttcaggggaaatggcgtttgaagatgagaacgaatgcttggagttggcgattgcctttgtagctgcctatgccaagcagtgtgaagggcctgtggtgctgagcgccagcctgaacagccatacgggcccccacaatggcacaggcactgtggtcgaggctatcgagaaagcctccgattgcctgatacccgtgttttccgcaggcaacgaaggagactatcccgttcacctctacgaggagttcaccgcttcccatccgtcggtcaagacattgctcctcgatctggaagaggatgagacgggcgagtatgaatacagctactcgccggatgtggtgggctacaccacggaaggcagcgaagtgagcatccagctgaagctgaactctctccatccgttgacaggccgactcaacaaggtttggagctcagaggtatgtacggccacgcccggctgcgacgatgtcctcgtcatggtgtcgagcgacgacgacgccgtcctggccaagtatttcgacggtgatatagatatttacgccattgacatgggcgatggccggctgagcttcggcgtcagagccagtggaggaatgaccaaactcaatctgtttgaactcgtcgtcaacggagctcccggcacaaaagtacacatgtgggacgacggcctcggatttggcggtgtggacttactcggcctgtctggctacgtcgacggcgacagcgagatgtcggctggcgactggaccacgacagagcgggtggtcagcgtgggcgcctattgcacgaacgtgatgctgcgcgactacgacggcaaagtgaccgacaactctgtggcggaggaagaggacgacgacgtggatgtgatgaacgacataggctggttctccagctacggcacgtcggtcaacggtgtgagccagcccacaatctgcgcccctggtgtgaacgtcgtgtcggcttacaaccattattacctcagcggcaagaccatagccgacaacatgcagtggatgggctatccttatacggctgagagcggcacgtcgatgtcttgtcctgtggtggctggcatcgtggccctctggttgcaagccaactccgaaatgacactcgacgacatcaaggaggtgatgctcaacagttccgtcaacgactctttcacagtcagtcagcctgaccgctggggctgcggcaagatcaatgccgttcgtggcatcaactacatcaccacaggcgacacaggcatccgaacctccgactatgccgcctcgcgcaccactgcgacctacgacctgcagggacgtcgcgtcagccatcgtcccactgccggcatctacatccgcgatggcaggaaaatcgtagtcagataaggacgattcaagcacattggccataaaatgattgcacagaatatagtgttctgtgcaattattgtggccaaaaagtgcgtttttcattacttttctttgtcgtacaataaaaatattgtacttttgcacacgattttgcaaaatacctttttttgaaggataatacattattaatatatttatgagtttaaagattgtagtacttgccaagcaagtacctgacacaagaaatgtgggcaaggatgccatgaccgctgaaggcaccgtgaaccgtgccgccctgcccgctatcttcaaccccgaagatttgaatgccttggagcaagcactccgcctgaaggagcagcacgaaggctccacagtgggaatcctgaccatgggaccgccgcgtgccggcgagatcatccgccaggggctctatcgtggtgccgacaccggttggctcctcaccgaccgcttgtttgctggcgccgacacgctcgccacgtcctatgccttggccactgccatcaagaagattggcgatgtcgacatcgtgattggtggacgccaggccatcgatggcgatactgcccaggtgggaccgcaggtggctcagaagctgggcctcaaccaggtgacctacgctgaggaaatcctgaaagtggaggatggcaaggccctgatccgccgccatatcgatggtggcgtggagaccgtggaggctccgctgcccgttgtcatcaccgtcaatggaagtgcggctccctgccgcccgtgcaacgccaagctcgtgatgaaatacaagcgggctacgtgtccgatggaacgtccacaggaaggcacggcttacgaccatctctacgaggagcgtccctacctgacgctcaaccagtggtcggtggccgatgtcgatggcgatgtcaaccagtgcggtttggctggtagccccaccaaggtgaaggcggtgaagaacatcgtgttccaagccaaggagtcgaagacaatgacaggctcggacgaagacatcaacagcctgatgaaggagttgctcagcgagaagatcatcggataaagcctcacccccttacccctctccgaaagagaggggcgtggatagtaattggggtgggaaaagcataacgaccatgggctatggataccagacggctgcctccgacagatataacattctgaaggagtttgcaaggcagaacagaaggcaaatgactccaagcgaggaggctctctgggaagcgctgagaaagtatctggacggctggaaattccgacggcaacatcccattggcgactatatcgctgattttgtgtgtttgcgcgaaaaactcgttgtcgaggtggatggcgaataccacaacgctgaagaacaacagcacgacgatgcgataagaactcactatctgcaacagatgggattccatgtcattcgtttcgacaaccaagaggtggatactgacatcatgtcggtcgtcctacgaataaaagaacaattaacaaaataagaatatcacatgaatacaagcaatgaacaacagggccagagtcataccactcccctctcccctcggagaggggctgggggtgaggccgtatttgtatatgtagagatagaaggcacgctcgtgcaggaagtgtcgcaggagctgctgacgaagggtcgcaaactggccaatcagttgggcgtggagctccatgccgtggtggccggaacgggcatcagggacaaggtggaagagcagatcctgccctatggcgtcgacaagctcttcgtcttcgatggcgaaggactgttcccctacacatccgctccccacaccgacatcctcgtgaacctcttcaaggaggagcagccccagatctgcctgatgggcgccaccgtcatcggccgcgacctcggaccccgcgtgtcgtcgtcgctgaccagcggactgaccgccgactgcacagagctggagatcggttcctacgacgatgccaagaccaagcagcactacgacaatctgctctatcagattcgtcccgcctttggtggcaacatcgtggccacgattgtcaaccccgaccaccgtccgcagatggccaccgtccgttcgggcgtcatgcagaaagccatctacgagggcgagtgccgcaaggaagtggtctacccagaggtctctaagtatgtcagcccagaggctttcgtcgtccgtgtcctcgaccatcatgtggaggccgccaagcacaacctcaagggtgctcccatcgtcgtggctggtggctatggcgtaggttccaaggaaggtttcgaccagctcttcgagctcgccaaggtgctccatggcgaggtgggtggcagccgtgccgccgtcgacgcaggatggctcgaccacgaccgtcagattggtcagacgggtgtcaccgtccatcccaaggtctacatcgcctgcggcatcagcggacagatccagcacatcgctggcatgcaggactcgggcatcatcatctctgtcaacagcgatcccgatgcacccatcaaccgcattgccgactatgtcatcgtgggtaccgtagaggaagtggtgccgaaactcatcaagtactacaagcagaacagcaagtagtccttccgttccctacatcgtaattcctccatcaacatggatttcctctatctcatcctgaaactgctgctctgcatcctcgtcgtgttggccatggcctatgtgccgtacatgaagttcaagaacttctgcaacaccaagataggcaacaagtacctgtgctatctcctgcagggatgcttcggcctgttcacactttatattttattcatcttaatcacattaatcgtataacaagatatggcaaactatttcagtgaccatcccgaactggagttccacctgcaccatccgttgatgaagcgcatcgtagagctcaaagaaagaaactacgctgataaagatacctacgacgacgctcccgtcgactacgacgatgccatcgagaactacaagcgtttcctcgacatcacgggcgatgtggccgccaacatcatcgagccgaactcagaggatgtcgacctcgaagggccccatctcgagaacgggcgcatgatctacgcctcgaagaccttcgagaatctcgatgccacacgcaaggcaggcctctggggcgtctccatgccccgccgctatggtggtctgaacatgcccatcaccccttactccatggcctcggagatcgtctccacggccgatgccggtttccagaacatctggtcgctccaagactgcatagagacgctctatgagtttggttccgaagagcagcgccagaagtacatcccccgcgtctgcgctggcgagaccatgtcgatggacctcacagagcccgatgccggttccgacctgcagcgcgtcatgctcaaggccacctacgacgagaaggaagactgctggcggctgaacggcgtgaagcgcttcatcaccaatggcgactccgacatccacctcgtcctggcacgctctgaagagggcacccgcgacggccgcggcctgtcgatgttcatctacgacaagcgcaacggtggcgtcaacgtgcgccacatcgagcataagctgggcatccacggctcacccacctgcgaactgacctacaagaacgccaaggctgagctctgcggaagcacccgcatgggactcatcaagtatgtcatggccctcatgaacggcgcccgcctcggcatcgccgcccagagcacaggcctctcgcaggctgcctacaacgaggctctggcctacgccaaggagcgccgccagttcgacaccgccatcatcgacttccccgccgtctacgacatgctctcgcgcatgaaggccaagctcgatgccggccggtccatcctctatcagactgcacgctacgtcgacatctacaaggctctcgacgacatcgcccgcgagcgcaagctcacacccgaggagcgccaggagcagaagaagtacgcccgtctggccgatgccttcacaccgctcgccaagggcatgaactctgaatatgccaaccagaatgcctacgacgccatacagattcatggcggcagcggcttcatcatggagtacaagtgccagcgactctatcgcgacgcacgcatcttctccatctacgagggtaccacacagctgcaggtggtggctgccatccgctacatcaccaacggcacctacctcgccctgatgaaggaaatgctcgaagggtctttcacctctcacccctcacccctcacctccaagatcgagaagatggtggacctctacgagcaggccctcaacaccgtgaaggaggctcagcatcaggagacgcaggacttcctggcccgccgcctctacgacatgacggccgagatcatgatgtcgctcctcatcgtcgaggatgccagccgtgcgcctgagctcttcgccaagagtgccaacgtctacgtgcgcatggccgaggagaatgtcatcgccaagtcggcctacatcgccaacttccaggctgccgacctcgctgacttccgcgcccgcgagtgcagctgcgaggcataggccccctgcctgacaaccaacttaagatcaacaaccgattccacggattgcacggattgggtccccatacccattcgtgcaatccgtgttttcatgccgcttccttgggaggggctggggggcgagccgcgagaagaaaatgtcacacagaaatcacagaaatcacagaaaggatattgcggacgcaatatcaaaaatccgcgagatccgtgaaatccgtgttagaaaaaaaaattctgtgctttctgtgctttctgtgtgagataaaaacgtggtttctacgtgagataaaagagggagtgtgtcaaattccgcctacagccgcttccttgggatgggctgggggccagccctatataaaatgcaaataaaaaacgtttttcctaaataattatgaatggaggatagcaaatcatgaataaattcgtaactttgcagaaacaatcacagaatatctgaatcatgaaagaattagcactcaaatacggatgcaatcccaaccagaaaccttcccgtatcttcatggaagaaggtgagttacccatcgaagtcttgaacggccgacccggctacatcaacctgctcgacgccctcaacagctggcagctggtgcgcgagctgaaacaggccaccggcctgcccgccgccgcctcgttcaagcacgtgtcgcccgctggcgccgccgtgggactccccctgagcgacacgctcaggaaaatctatttcgtcgacgacatccagcaggagctgtcacccatcgccagcgcctatgtccgtgcccgcggtgccgaccgcatgagctcctacggcgacttcgtggccctctccgacacctgcgatgccgtgactgccaccatcctgaaacgtgaggtcagcgacggcgtgatcgcacccgacttcacggaagaggccctccagatcctgcgcgagaagcggaaaggcacctacaacgtcatccgcatcgaccccgactatcgcccggcacccatcgagcgcaagcaggtgttcggcatcaccttcgagcaaggccgcaacgagatacgcctcgacgaccccgccctcttctccgacatccccacgcgcaacaagaccttctccgctgaagcccgccgcgacctgaccatcgccctcatcacgctgaaatacacccagtccaactccgtctgctacgtcaaggacgggcaggccatcggcatcggagccggccagcagagccgcatccattgcacccgcctggcaggcaacaaagccgacacgtggtggctgcggcagcaccccaaggtgatgaacctccccttcgtcgacggcatccgccgtgccgaccgcgacaacaccatcgacatctacatcggcgacgagtgcgacgacgtgctccgcgagggcgcctggcagcagttcttcaagcaccagcccgaacccctcacccgcgaggagaagcgccagtggatagcccagaaccgcggcgtatgcctcggcagcgacgccttcttcccttttggcgacaacatcgagcgcgcccacaagagcggcgtgcagtacatcgcccaggccggcggctccgtgcgcgacgaccatgtcatcatgacctgcgacaaatacgacatcgccatggccttcacccacgtgcgcctcttccaccactaatgctttcattctctaattctctaactcaactttcgcaagctcagcttgcttcagttaagaggtaagttgtgagaggtgagaggtgagtggtgagaggtgagagaaatgttagtaaaccctgaaagagaagcggaaaaggaggcgcaagagctatcctctcactcctcacctctcacccctcacccctgaaagttgagaatgtgaaacatgcgaaacttgaaagattttataatgctttaattttataatgctttcattttataatgcttaattttataattctttaattttataattctttaatttttcaagatggacgacgattttcagaaaatccttgaaaatggcatctcgtttgggcgaggcggcgagcgccgcagctccgacacgggcaaggtaaagaccaaagccaagaaaaagaagtacatcaccggcgcccacggcagcggttccgccatgcagaaagccaaataccgccagcagcgcgccaaccgccacaagtaagcgcaaggcatgcttttcagctatggtcgtgaaggccaaagccaagacttatgaacacaaaatagtccaccgttgaggacgatggactaggacctaatgttttcacaacggaataatccttattgtgatttgctaaaaattagtggtgcaaaggtaaagtttttccgataatctaccaaatgtttcaaaagaaaattgtacttttgcacaaaatatcattaaaaacattgttatgaagaagatattaggcttagatttaggcacaaatagtattggttgggcagttgttaatgccgaagaagagacctatgataataataaatcttgtttaaaacccgttggaatcagttctgcaggaagcaggattattcccatgtcagccgacatcttgggtgatttcgacaaagggaactctatttcgcaaacatccgaaaggactagactaaggatggttcgccgtttgcgtgaacgcaatcttttacggcgtgaacgattgttacgcacgttgaaaacaatgggtttcctgccagaatactttgcattgaagatagacgagacagggaagttcattgatgatagcgaaccaaaactggcttggggaaaaacaaaagaagggaattctgttttccttttccagaaatcatttgaagaaatgctggccgacttcgcccaacatcagccgcaatttgtggccgatggcaggaaagttccctatgattggacaatctattatcttcgcaagaaagctttgactgaaagaatcaccaaagaggaacttgcttggatattactgcaattcaaccagaagcgaggctactatcagcttcgtggcgaggaggaagaagaaaaggccaacgaaaccatcgagattatcagtgctacaatcctgtctgtggaacggagggagaaggataaaaaatacgacaaatactggtacgagatgactctcgacaacgggatggtgtatcgtgccacgttctacaacgatgtttctgattggaaaggagagaccaaagactttgtcttgaagtcgaccatactcaaggatggtagtacaaagcacgacctgtcttttcttcctaccaccgacgagattgagggaatgccacctcagagaaaggccaagatgtatgccaagataaagcttcgtacagagaaggaaatagagaacagcaagaaaactgttggctgttacatttatgattcattattgcaaaagccagatcaaaagattatagggaaactcgtgcgcaccgttgaaagaaaattctataaagacgaactcacacgaatcctcaaagtacaacaggaactaatatccgagcttcaagacgaggccttatataataaatgtatagaagagctttatccaagcaatgaggctcatcaccacaatatggccaagcccgacttcgtcaatctgtttgtgaacgacatcctgttctatcagcgacccctgaagagtaaaaagtcgctcatcgacaactgcccctacgaatttcattttgacaaggatggcaatgcgcatcctctaaagtgcatcgcaaagtctaacccactcttccaagaattccgattatggcagttcgttcagaacctgcgcatttatcaacgcgaaaaattggtaagcgatggtcagttggacttgttcagctcagctccgacaggaaagttgcagacagatgttgatgtcactgacgagtttcttaaatcagaagaagactacgtgagactctttgactggctgaactgccgggcttccatcaaacaggatacgctgctgaactcgttttttaagataaaaaaggagaggggcaaggaaaagtatccctaccgctggaactacgtcgaggacaaggagtatccctgtaacaagacaagggctgacatcctttccggattggcaaaaagcaacattagtcctgacttccttactcatgagaaagagatggctctatggcatgttctttactctgtggaagataaaatagaaattggcaaagccataaggacttttgcagccaagaacaaccttggtgaagactttgctgaagtgttcagtaagttgaaacctttcgagaaagagtatggatcctattcagagaaagcgattcgcaaattgcttcccttgatgcgaatgggtaaatactggagtgccgggagaatagataccaagacgctcgatagaattgataaaatcattacgggcgaatatgatgaaagtatcaagaatcgtgtgcgtgaaaaagccatccgactgacagagacaactcacttcaaaggtctgcctgtatggctggcctgctacattgtctatgatcgccattcagaagccaaggaaattgaaaaatgggagaaacccgaagacattgaccgttatctgagtggcttcaaacaacactccttgcgcaatcccatcgtggaacaggtcatcactgagacactcagggtagtccgcgatatatggaagaaagaaggccacatcgatgaaattcacgttgagttgggacgcgagatgaagaatcctgccgacaagcgccggcagatgacagagcgcatccagcaaaacgagaacaccaatctgcgtataaaagcaatgctaatggagtttgccaaccctgatatgaaaatagagaacgtcagaccatattctccaagccagcaagacatccttcgcatctacgaggagaacgcactcgataatcttacacgagaagacgaggaatacgactttgtatcgaaggtgtctaaaatggcacaaccctctaaatcggatatcgttcgttataagtgttggttggagcagaaataccagtcgccctatacagggaggatgattccactttcaaaactcttcacctctgcatacgagatagagcacatcattccgcagtcgcgctacttcgacgattcgttcagcaacaaggtcatttgtgaggctgaggttaacaaactgaaagataggcagctgggctatgagttcatcaagaatcacgcaggcgaaaaggttccggtcagtctgggagagcctgtcgagattctgtcagtggagaaatacgaacgtttggtgagagaacgatatgccaccaaccgcaccaagatgaagaagttgctgatggatgatatacctgacggattcatcgaacgtcagatgaacgacagccgttatatcagcaaagtggtgaaaagcctgctttcaaacatcgtgcgcgagaagttggacaatggtgagtatgagcaggaggcggtgtcgaagaatctcatatcatgtaatggctccattaccgaccgcctgaagaaggattggggcatgaacgacgtgtggaacagaatcattctgccacgtttccagcgcctgaaccaactcacaggaaagagctgcttcacaacgctgaatcgcgagggccatgaaattcccagtatgcccattgagctgcagaaggggttcagcaagaagcgcatcgaccatcgccaccatgcgatggatgccatcgtgatagcctgtgccacccgtgatcatgtgaacttgcttaacaacgaggctgcacactctaagcataatgccaaccgctatcagttgcagcgtaaactacggcggttcgagacaatcgtcgttgatggaaaagagcgtgaggtggcaagggagttcatcttgccctggccatcgtttgccacagatgcctggcaaacattgcagaacatcatcgtcagcttcaagcaaaaccttcgtgtcattaacaaaacaaccaacttctacctacattacgacgaaagcggaaagaaaaagctatgcaagcaagtgaagggcgacagctgggccgtgcgtaagtctatgcacaaagacacggtatttggagaagtgaacctgcggaagaaaaagaccgtctcgctgaatgatgccatcaaaaagccaacctgcattgtcaacaaggagttcaagaaaaaagtcattgagctgttgaacgatggacgcgatgcgaagttcatcaaaaagtatgtggatgaaaacaaggatgtgtggtctgacatcaatacggcaaaaatagaggtttactatttcacgaaagacgaaaagaagcgtaacggcgaacccaaggaacgctatttcgccacacgcaagccacttgacagttcgtacgaccaaaagagaattcaagaaagtgttaccgacacaggtatccaaaagatactcttggcacatctcgaggctaaagacaacaatcccgaacaagccttctcgccagatggtattgaggagatgaaccggaatatcgtggctttgaacaatggaaagttccatcagccaatcctgaaagtgcgtgtttatgagaaagctgataagtttgcagtcggacaaacagggaataaagcaaagaagtttgtggaagctgcaaaaggcacaaacctcttttgggctattctcggttcagaaaagacaaacaaagaaactggcgacacagagattgtacgttcctatcttaccattcctcttaacgtgatggttgactgccaaaagaaatatggagctaaatggaaagataatgttgaggcctatttgaaagaaaaagaactcattgaatcagaaactcaattgctgttcattctttcgccaaacgatttggtttatctacctacggaagaggatccgcataatgtatcaattgacaggcaacgtatttataaatttgttgatccgaatgacaacaaaggtagctttgttccatacacatttgctaatgctattttttccataaagtttactgaccaaaagaaaatgggattatcgtatcttatacagaatgagttagggataggaagtcagttttcaaagagtccacgagcatatacaggtgaaatgattaaagagatttgtgttccctttaaggtggatagattgggtaatgtaatagagttgaatggcttgaaagtatagaagaacaaaaagtccatgattaaaaagactctctgttttagcaaccccgcctacctgtcgttgaggaatggtcagttggttatcaagttgcctgaagtagaaaaggcctcctccctctccgcagagtttaaaaagacggcagaggtgacacgctccatagaagacatcggagtggtggtgcttgatcacaagcaaatcaccatcacctccggtgctcttgaagcgctacttgaaaacaactgcgcggtcatcacttgcgactctcattccatgcctgtcggtttgctgcttcctctggttggaaataccacccagaacgagcggtttcgccatcagcttgatgcttccctgccattacgcaaacagctttggcagcagaccattcaaaacaagatcagaaaccaggcagccgtgcttgactcatgttccgaggtagaaacgcggtgtatgcaggtttgggcaaacgacgtaaagagtggcgaccctgacaatatggaggcacgcgccgctgtctactattggaaaagtctgtttggccatatccccagtttcgttagagaacgcgagggcgtccctcccaacggccttttgaactacggctatgccatccttcgggctgtgattgcccgatctttggtggcaagtggaatgctccccacgttaggcattcatcatcacaatcgctacaatgcctactgcttggcagatgacatcatggagccttatcgcccatacgtcgaccgcttggtttacgacatcacggaacaatatggcgttgatgttgaactcaccaaagacatcaaagctgagctgctctccattccaactctcgatgtgaccattgcaggaaagaagagtccgttgatggtaggggctgcacaaacaacagcctctctctataaatgctttagtggtgaattgcgcaagattgcctaccctgaaatggaatgatagcaaaacggttcagtgaatacagggttatgtggctcttggtgatgttcgacctgccgacagaaacaaagaaagacattcgcgaatacaacttgtttcgtaagcgactcaagaaagacggtttcacgatgtttcaattctccatctatgtgcggcattgtgccagtatggagaatgcggaagtccacagaaaacgagtgaaagccattctgcctgagtttgggaaagtgggcatcatgtgtatcactgacaaacaatttgccaacatcgaactcttttatggcaataagccacataagccgaatgctgctggtcagcagttggagctcttttagaaaaggaaaatcccatccaaaggatggaactctcctcttttcttgcactgttttttcttttctgtttttccttgcaaccatctggtattcattgatttctgcgaatccagttgtatatgcgggtgcaaaggtactaatttttcagcaaatcacaacagagtttcctttttgtatttataggagaaggttgtatatgcgggtgcaaaggtactaatttttcagcaaatcacaacagacctacgagcgacacttcaagtttatcagttgtatatgcgggtgcaaaggtactaatttttcagcaaatcacaactggcctttgattgttgccatgttgttttctgttgtatatgcgggtgcaaaggtactaatttttcagcaaatcacaactatctttggtcggacgcttgtggtagagccgttgtatatgcgggtgcaaaggtactaatttttcagcaaatcacaacgtttgttcgtgatgacataaagacaattcgttgtatatgcgggtgcaaaggtactaatttttcagcaaatcacaacgccgtccagccggtgcttgttccggcttgtgttgtatatgcgggtgcaaaggtactaatttttcagcaaatcacaacggcatagaaagaatgagttccgatagtggagttgtatatgcgggtgcaaaggtactaatttttcagcaaatcacaactacaagtgattggcatacatacgtagatttgttgtatatgcgggtgcaaaggtactaatttttcagcaaatcacaacatgttcatggcctcatgctcacccgtgtaggttgtatatgcgggtgcaaaggtactaatttttcagcaaatcacaactggctgtccgacggacaatatcacaacgctgttgtatatgcgggtgcaaaggtactaatttttcagcaaatcacaactggctttattatgcaagatggaacaattgagttgtatatgcgggtgcaaaggtactaatttttcagcaaatcacaactataaacagcgttagtattaatattgatttgttgtatatgcgggtgcaaaggtactaatttttcagcaaatcacaacaatattgcatgtatgaaataaaatgcttacgttgtatatgcgggtgcaaaggtactaatttttcagcaaatcacaacggcatcgggtatgaggaatcagatattgctgttgtatatgcgggtgcaaaggtactaatttttcagcaaatcacaacaagaacgcggagccaaccgcgaagtacgcgttgtatatgcgggtgcaaaggtactaatttttcagcaaatcacaacaattgcttctcctataaatacaaaaaggagttgtatatgcgggtgcaaaggtactaatttttcagcaaatcacaacattggaaaatttggggtaatgattgggaatgttgtatatgcgggtgcaaaggtactaatttttcagcaaatcacaacataggcaagccctgtatcaccctatcctgagttgtatatgcgggtgcaaaggtactaatttttcagcaaatcacaacgatattaccgaggggagggtgagtgagtaagttgtatatgcgggtgcaaaggtactaatttttcagcaaatcacaacacccgcaggcagctgccgctgcatctggcggttgtatatgcgggtgcaaaggtactaatttttcagcaaatcacaacaccttctgccaacttacctcgtcagagaacgttgtatatgcgggtgcaaaggtactaatttttcagcaaatcacaactcctctataagattgagaaaggtatcaagcgttgtatatgcgggtgcaaaggtactaatttttcagcaaatcacaactggtgcaaagcgttccagatgcacatgcgcgttgtatatgcgggtgcaaaggtactaatttttcagcaaatcacaactccgtgactacgcatgtcaccgtgaaggaagttgtatatgcgggtgcaaaggtactaatttttcagcaaatcacaacgacttgccgacaacgccttaccgaagtcgcgttgtatatgcgggtgcaaaggtactaatttttcagcaaatcacaactatcagccttcagtatgtttcgaaggcttagttgtatatgcgggtgcaaaggtactaatttttcagcaaatcacaacacaactaaaaagaaagaaaactatggcaatgttgtatatgcgggtgcaaaggtactaatttttcagcaaatcacaacaaatcgaagaagaaattcctcgaagcaatcgttgtatatgcgggtgcaaaggtactaatttttcagcaaatcacaactacccaattggttgtatatgcgggtgcaaaggtactaatttttcagcaaatcacaaccgtcgtggacttagtgtatgaacgtgcggggttgtatatgcgggtgcaaaggtactaatttttcagcaaatcacaacatttgccgctcatggttctgatagatggtcgttgtatatgcgggtgcaaaggtactaatttttcagcaaatcacaactccattttatctcgttccatcttgctgcccgttgtatatgcgggtgcaaaggtactaatttttcagcaaatcacaaccaaagatatgcagtgttatatgggtgtagagttgtatatgcgggtgcaaaggtactaatttttcagcaaatcacaacacgtttgcagttgtcatggcttgtttcctgttgtatatgcgggtgcaaaggtactaatttttcagcaaatcacaacaaccgcctcatcacccatttaaggcataggttgtatatgcgggtgcaaaggtactaatttttcagcaaatcacaacttctttgacttagtggtacacagacaccgtgttgtatatgcgggtgcaaaggtactaatttttcagcaaatcacaacatatttaataattgattaaaactaaaatagttgtatatgcgggtgcaaaggtactaatttttcagcaaatcacaacattattcatcgactcgtcattcacattcgagttgtatatgcgggtgcaaaggtactaattttttagcaaatcacaactgaagtgtaatcgtaatgcttggtttgtgggttgtatatgcaggtgcaaaggtactaattttttagcaaatcacaacagcgtaaatgtttgcaataacacaaaaacgttgtatatgcaggtgcaaaggtactaatttttcagcaaaccacaacggttgagggtggcaagcctaatcttttcagttgtatatgaaggtgcatcggtccatcctaaaggtatcttgccagcagcaatggaaacaaccttttcacaacaaatccttgtcgctctcgcggtgaagatcatattttccaagtcagaaaacgatgttttccaagtcagaaaataatgttttccaagtcagaaaacgttgttctccgcgtcagaaaacaacggttctggtgtcgggagagactttgtgaaaagatttatcaggtcatgagctaagggttatcctcgctcctttcgatagtcatcgttgtgtgcatcaggaatccctacaatcgaatcagggtggagccggaggtggtttgccgccctgtgttgagctgcacggcatagacgcctgacgggcaggcggagaggtcgatggtactgccctggcacgatgccaccaccgctccgctgagggcatagacggtgagggtagaggcaggaggcaggggggtgtcgctctccacgctgaggcgtcggccgcggaggacgaagcgtgcgctggcgggctggtggtcggagaggccggtgaccttctcgttcatctgaaggatgtagagcaatccgcggtagacgtcgatctggccatagccgtaggtgctgttgggatagtccatcgtctcgtcgggatgggtgcaggtgtgggcaaacacatcgaggatgtcgtcgggggtgaggtcgggcttggcctgcagccacagggcgatggcgcctgccaccacgggcgatgccatgctggtgccgctctgcgctgtgtagtagaaggtcttgccttggtaggtcaccttgtcggtgagggccttgcggatggtgctggtcatttccacatagctgttgaagggggcgttgatgctcacgccgggtgccacgacatcgggcttggtgaggccgtcgaaggtggggccttgcgaggagaagcgggctatctggccggtttgggcggcggcgaggctgaccacttcgtcgttcgtctcgccatcgatgtttttgaacgtcgacttatagccagtggctcccacggtgatgatgccgggcatcgtgcctggccaccatgtggaatagccggggagggcgtaggcgtaggcgggaatgttgtcgatgttggagaacgggcagtatttgatgtcggaatagacccaggcgggtccgtcgccggtgaggaggaagagggcgccgcagagcatgagataggccaggttgggcatgtcgccatggaggtggagcacgtcgccgcgcgggtcttggtagtcgctcttccagattttcaggtggatgtcgcccagggtgacggtggtggagagccggcaggtgtcgttgagggccagcacgctgtcggtcctgaaggagagcgtcttctcgatgtgtgtgtccatgaggcggatgctgaggaagtcgaggcgcacctgttggtcgacgggtgtgacgatggcgaggtcgatggtctgtccgcctccgatgccgttgacga

SEQ ID NO: 1273 - DNA, 20682 bp, synthetic construct
  source 1..20682: mol_type = other DNA
  misc_feature 1..20682: note = Synthetic
ttaccacatggcgcacagtatccacatatttgccctgatagtcttgtgtaaagttcgacgattgtggttctaccatcgcacccacattaaagtcgaagctctcgcgaatcattctgaacatcaactctatgtcgtgtgtatagtttttatactccgaatagcggctcaggtcactgtcgtaatagctctccaaaggattgttcaatcgtgatagatatcctccccagttgccatagttatttaccactcccgcaaagaaatcttcacccagattgctaaaatcataggttgagcgtgtgctcttagagtagctatagttgaacttatagctcaactgcaagaatgttgccttccacagcggttcgctatacgtaacctgtgcgctatagtcgtatttctttgttggagtcaaactgtatctgtttgtctgatatgtagagtctgtgcccagcgagttcatcacctgatacaggtgcacattgcttgtcgacaggctcttgctgtcagaattggtgtagccggcattcaactgcaaggtgatgtttcgtccctcgttgttgagtttgcggtttatctgcaacattcccttatagttgtcgcttgtgctattcgagagtgagattccgttgcggctatttatcatcaagctgtcttgcgccataatgtcaaacgacgatgaagcaagcggatctgttacgtatagatatgggtcatcggcaaatgatgcagaagctgttgacgagctgccatctgatgtagagtgcgagaatgttggtctaaacaagatgttggtcatcgagtctggcatccattctattcgtgctcttgcattccagctgtcgctacggctgtagctctgcgaaaggctgttaccaaacgattttgctgtcgacacaaagttttcagtcgacatctttgtgcgctggtctccgtcgccatgattccatctcaagctaccattaaacttaaatttgtcttttatctcgtagttgaagtttccaccgagcatcttgcttgagttcaagccgttgttgccgccccagccgccacgaccgccaaatccacggtcgtttacgttgtttgccgagccaaagcccatcactctcatctttgagttgaagtgtgctgccatcactcgtgccgaatagcggtcttcggtgccgtagcccacgttggtattcgaaaacattcccttgttcattcctttcttcagtccgaagtcgagtactgtctcttcgttgccatcgttgattcctgtcaccttagccaaatcgctcttttcttcatacgattttatcttgtcaactatcgaggttggcaaattctttagcgccgtcttggtgtcgccggtcataaattccttaccatccaccagaatcttcttcacttcctttccgttgatggtaatcttgccgtcgtcgtcaacctgcgctcctggcaatcgcttcaccagctcttccaccaccgaaccttctggtgtacgataggctgcgctattatatacaaaggtgtcttccttcaccgtcaccttcatggcttgtgccgtcacctgtgcttccttcagcaatatggcgtccgatgccattgccaatgtgccgagcgcaaggttcttgtcctgggctatcgtaatgtttttatatgtggtatgatagcctatgctcgaaatcttcagcagatatcgtccgttctttggagccgagagactgaatgttcccttctcgttgctcacaccacctgccacatacgagctgtcggttctgagcagctgcaccgtagtctgcatcattggctccttggtgtctttatctactatggtacctgctatctttcggctttgtgccgttgccgtgagtgcggcaatcgataacagcgccattaataaggttcttttcatgatgattgatagttgccttgtgttattaataattgataactgatagttgttttagcgtttaactttatttctgacgtatattcttgcaaaaggtttaatccttgcaagaaaaaagcacaaatattttgaattttccgttattctacatatctttgcagaaatcaaggagacaaaacgacgaatgttatgaaacagagaatcattatttctacaagtttggagaaagaccttacgctcgccatttctgagtgcgagcacgataaggtatttgtattggccgacgaaacaaccatcgacaagtgttggcctgtgataaaagatttcaggatacttaagaatgcacaaactatcgttattggtgccacagacacccacaaaacgctcgaatcgttagctcatgtttggaaagctcttggcgatggtggagccactcgccactcgtgcttaattaatttaggtggcggcatggttaccgaccttggtggctttgctgcatctactttcaagcgtggcatcgacttcataaacatccctaccactctgctcgctatggtcgatgcgtcggtgggtggaaaaacgggcatcaacttcaatgggctgaaaaatgaggttggtgttttcaatgatgctaaatatgtgattctcgacaccaacttcctaaaaactctcgacgacgacaacttgcgctctggctatgctgagatgcttaagcatggactcatctccgacgatgctcaccttgctgagcttctcaattttcaattctctgctcccaactatcagcagttgcagcagatggtggctcactctgtagagatcaaggagaatgtcgtagagctcgaccctcacgagcgtgccatccgcaaggctctcaaccttggccacaccttcggtcatgctttcgagtcgtgggcattgaagcgcaagcctatccttcatggccatgctgttgcctacggtttggtgtgcgaactttatctcagctgcatcaagactggcttccctaccgagcgtatgcgccagtctgtaaggttcatccgtgagaactatcctcaccttgccttcacttgcgacgactacgatgagctcatcgcccttatgactcacgataaaaagaatactgctggcgtcatcaatttcaccttgctctcagccgtaggcgaaatcatgatcaaccagacagccacaaccgaggaaataaaagaagccctcgatttctatagggaaagctaaggaaacgaagagtgaagagtgaagaacgaagagtgaagaatccattagtctttatgtgtatttaattcttctctcttcgttcgtccctcttcgttcgtccctcttcacttcctccttcccctggggttgggttcggtgcagctcggctgcatcgctttccctctctttccctctcttccccttcttactattagattcttcactcttcactcttccctcttcactcttcactcaactcccctcttcggcttccccgtttccgtcattggtaatttttctaccgttattatttcttttggttgccaatatttcggaagcacctcatggcatacagccattatcttttccttatcctcatcctcagtcagcatcaccatttcttcgccatatttcttcgatgggcgctttgccatgaagaatggggctgcaagatgtggcgccaaagcctgctccacttcctccatctgtatctttactcctcctgagcacaccacattatctattctccccacaatcctaaagcggatgttgccctcggcattatccaccacggcaatatcgtgggtgtgcaatacttccgcacatacagcaggagcatttatcaccaggcagttgtcagcgtcgagcgatatttccactcccggcaacggatgataccagaggctgtcttcgcctccgccatttatcttgcgcaaagcaatatgcgagagtgtctccgtcattccatacgaactccacacggcattaggaaacttctgcaacttctgctccatctccttgtctatggctcctccgccaataaggatattctttatcgccatcagcttgcggcattctgcctcgttgcctatcgagttgtagacttgcatcggcaccatggctgcaaaatctatctcctcatcgtcggcaacatcagccatcggatgtccctttggctcgatgcttatcatctgcaaatcgcaaaccaggcttctcaccaccatcatcttgccggcaatatagtccataggcagacacaccaaggctttgtcgccagctttcagtcccaacgccttgcatgtcattcgtgccgaggcttccatgcgcaccttctcagccatcatcagcttaggcttgcccgtagatccgctggtatacacaggcacggtggctctactgtcgtgccattgcgataagaaatcatttattgtcataatacatcttctctcctctcaactctatcggcatttcgatattgtcggtaaacagcagtcctgtgcccaatccttgtggcataatctcgtcggtgccataggtgcgggcagcgagatgagctattgcgttcagtcccacgttgctctccagggcgctcgtcatccacgagcctattcctcgtgctttagccagctctacccactcttggcttcccatcattccgccatggagcgatggtttcagcacgatatattgtggttgaatggtgtcgagcagcatctctttcatcgagtgcaggtttacgcctatcagctcttcgtccagagcaatcgctattggcgactccttacacagtcgtgccatgtcgcgccattgcttctgctttattggttgctctatggagtgaatgtcatactttgccaatatctcgagcaatgccattgcgtcgtcggggtcgaaggcgccattggcgtctactctcagctccactttctcttttgggaaagcctcgcggataatgtgcagcaactccacctccttgtcaaagtctattgctccaatcttcagttttatgcacttgaagcccaagtccagtttctcttgcatgcgctccaacatctgctcgtatgagcccatccacaccaagccattggtgggtattcctacttcgccacgtgcaaaggcagtatcaaacaaggctgtcgaaccgcctgcctccaactgtgcaaaggctgtctccagtccaaagagcatagaggggtaagggcgcaacatgtcgtaaggaatacgctctgtgcgctctatcatatcacaaaactggcgtagcagacgatcgtagtctggaatttcgtcgcacgacaaatcgggcagagtggcacactctcccactccatgcactccatctttctctacatctacatatctgctcactcgcgtagtatattctccgcgcgatgtcttcgcaggttgcttaaaatgcaacgtgcgagtggtaatagtaatcttcattatttatggaaacaccggatacttatcaaactctggcttacgtttttccaagaaggctttgccaccctcttgtgcttcgtccatggtgtaatagagcatggttgcgtcgcctgccaactcctgaatacctgcctgaccgtcgagctcggcattgagtccagcctttatcatgcgaagagccagcggactgcgttccatcattatctctgcccactccacacaggtatcttcgagcttatctaaaggcaccaccttgtttaccatacccatttcctcggcttctttagccgaatattgcttgcagagaaaccatatttcgcgtgctttcttctgtcccaccatgcgggcaagatacgaagcaccgaaaccagcgtcgaagcttcccaccttcggacccgtctgtccaaatattgcattttcgcttgctatcgtcaggtcgcacatcacgtgcagcacgtgtccgccaccaatagcgtagccattaaccatagcaatcacaggcttaggcagtctgcgtatctgcatctgcacatccagcacattcagtcttggcacaccatccgagcctacgtagcctccgcgtcctttcacgtgcatatcgccgccagcgcagaatgccttgtcgccagctcctgtcagcagcaccactctaatatcggcacactctcggcaatagctgaaagcctgcgacatttcccatgtagtgagtggtgtaaacgcattgcggtagcgctctctgtttatcgtaatcttcgcaatatgattatactcttcgaacaatatttccttaaagtcgaagccctctatcttcttccaatttctttccatagtgattaattatttatatgataatctatgcaaaaatacataaacttattgacataaaaaaggaaatgggtaaaaaagaagtgtgtagtgtgtaatgtgtaatgtgtaatgtgtaatgtgtaatgtgtagtgtgtaatgtgtatctcaagctatggtttattttggtttattgcctgattgttttctgagaggcgtgcgcgcctctcagaaaacaatcaggggtttatttggtttatgttttaaaaatcgtctaaacactaaacactaaacattaaacattaaacactaaacactaaacattaaacactaaacactaacctccagcaccattgggcgcggacatttttcatctaccaaccagcggatgccatcacgaacctcatcgtcggtttccgccttgcgatacgccacattgttctgcatacacacaccctcggcagtagcattatgcttagccatcacatagctatcgcacgcaggactatcagccaactgctcaaacttgctaaatattcctccacacttattattgatgagcaatatgcggaagttgccacacagctcctgattccatagcgcattggcatcatagaagaagctcaggtcgccaatgatacacgccaccggacacgctgacataatcgaaaagcctgctgccgtcgacagcgaaccctcgatgccattcacaccacggttcacatacagatacctatccgcatacttcaacgccatacgcaccgacaagctgtttgccacatgcacattcatctccttgcccctaatggcacggaaaaactcgcgtatagcctcgttttgcctattcccagtagccacatttgcttgctctatagcctcagccttcagcctctgccagctttctatccatgtcgaagtctcattatcggaaacagcatcagaagaagaaccaacagccgaagccaacgccctgagcatttcgctcggtttagcctcaacgatatccgtggcgttcatcatcacgtctgccacatcgcccgcctcgctcaccacgatgctcctccttggcttcgtatgctgcaggaattgtctcattgccttagccaccatgttgccacctacatatattatatagtcgggctgatagtcggcagcatccgccatcagctccacgagcatgtctaatgcaggcagctggcgctcggaatcgtccgacagtttctctgccagcaccaccgctcgcgtctccaacctctccacagcctcggcagccctatgccattctcttcgctccatctgtcccaccactatcagcggctttcttgccttggcaaagtcgtccgcaatagccgttagctgcgcctcatcggcagaatctgcagccatcgtaatcttgcgttcctcgggcaattcctctactgcaaaattatacagcggttcagatataggcacattaatatgcaccggtccgccaccatgcagcagcatctttatcatagcctcgttcaccaatctgttgcaataccatcgctccacctcgttgtgcggttccggcaaatgcaccgtcgccttcaccatcatgcccagcgcaccggcctgaggcagcgtctgtccctgcagttggtttatcatagccaacggcctgtcggcagaaatcaccaacagcggcacctcgcgataataagcttcagccacggcaggagccagattgagcagtgccgagccactcgtcacacatacagccacagggcgctcagaagccagcgccaagcccaaggcataaaatccagccgaacgctcgtcggtggcagccacacaatacatctctgggcacgaagcaaaattgtgtgccaagggagcatttctacttcctgggcacacaacaacggttctcactccgtgagccaccatcaacgaagtcagaatatttacatttattttgtctgagtacatatacttctcattggctccattttcatcattgtctcttgccattcactctcctcggagctctcctccaggagtccgcctccagcatacatcaatcctctgccctcctttatctccatacatcttagcgacacaaagagcgaggtcttgccacccacattccatggtccgcaatatccactatagtatttgcgatctatgctctcgttggcagcaataaaatctatcgcctcctgcttaggcagtccgcaaacggcaggcgtaggatgcagcgcctctaccagttcacctattccgcagccatcagcatgcgcatcatcgagcgtaaacgagaagtcgctacgcagatgcaccaggttgccagccctgacagtatatggcttcgatatttccatatccttagcataaggcttcagcacctcttctatataccctgccaccaattggtgctccttcttgttcttgtccgaccagctatacacctttttgccttcccacgccatagttccggccagcgccatagtctgccatctgtcgccatcctgcgccagcaaaatctctggcgtagccataagccatgtgccagccacctcgctcttcaccagcgctatcgtcatacgcggatagcgacggcaagcctcggcaaagagtagttctgggcataactcatcatcagcagcaatctccgcatttcgcgagagcaccaacttcgagaactgtcccttactaatagcatcgtggaaacgagcaaagtcgcgagcataatcctcccttcgcccagtctccgccacctcgttagtccaactctccgtagccagttccacaggctttgctttgccttccacaaccactattggcgtttcagccgaagcgcgaaaaggcgccatcacaaatccgcacacatcgtcaagctgcgcagccgacgacagcagatgagtggtctcgccctctatcttataagcctgtttagcataaggcaacctgtataaaacgtaatccttcatagctctctattcacggggtctaatgatatagttagtcaccgtaaccgatgatatcagctcttcttccgagttttttatctccacatgccatgtatgcagcgttttgcctttgtgaatcaaagtggcagtagcctccaccacatcgccttccaacaccgccttcacatgtgtgccgctaacgctaacgcccacactaatctttccagggaaaatagccaacgagcccacgccagcaatattttcagccagcgccaacgaagcgccaccgctcagaaagccaaatggctgacggttgcgatggtctaccttcatccttgccttgcatgtatcgggttcgggtgtagacaaaaattccatgccaagagtatttgacaatccatcttggctactcaacattttctgtacgcgtgatatatccatagttacatagtatatagatccttatcttactgttctattttatgcaaagatagtgcaagtgaatggaataacaaaacaaaacacgcagtttttgtttttattcctgagtgcagcgtagtttatctaaaaacaaaaaatctaaatttcggaaagtaaccctctattgtaatataacttagtggaggtctctccttaacctctatttttatttattccattgtctttttttagccatgtatctatagagccatgtacaaacaaattcataaaagcgacacatataaaaaatcccaccgttaaaggacgatgggatagaacctaatgttttcacaacggaataatccttattgtgatttgcttaaaattttctgcaaaaataggcattaattaataaaaaacaaaattttttcttaaaaatttgatactattcataaaaaaaactatatttgtaatcaaaatacaaatagtaactataataaaaaatgattacatatgaaaaatgtcttaggatttgaccttgggactaacagtatagggtgggctgtagttcaagaaaaatataatgagagtaatatcttaataaaacaaatattaggagctggaagcagaatcatccctatggacgcagcacaacttggtgattttgcaaaaggaaacaccatatcacaaactaaagaccgtacacaattcaggggcgttcgccgactacgcgaacgctgtctgctgcgccgtgagcgactgttaagaattctcgacattatgggatttctaccacagcacttttcaaacgcactcacaagatatgggaagttcaaagatgcggacgaggagcccaaaatagcatggaggaaagataacgaaggaaaaatgcactttctctttgcagattcattcaatgaaatgatagaagagttccgttctgtccaaccggaacttctaaaaagaggtatgaaagtaccatatgactggacattgtattatctcaggaagaaagccctaagagaaaccgtcacaccattcgaactggcatggataatactaaatttcaatcaaaaacgaggctattatcagcttcgcggcgaagaagaaggtgaagccgacaacaacaaatgtgaagaatatcttgcgcagaaggtcgttgacgtaatagacacaggtgagaagaaaggaaaaagcacatggtttgacatcgtgcttgaaaacggcatggtatatcattgctctgcagaaataaagccagactggattggcaagacaaaagaattcatcgtcaccacccaattcgacaaagacggaaatcctaagaaagacaagaagggaaacatcaagatgtctttaagaatgccaaacgaaaacgactggaatctacagaaaaagaaagcggagaaggatatcgacgaatccggcatgactgtcggagaatacatctataatgcgctgcttcacaatccgaaacagaaaatcaagggaaaactcgtgagagtagtagaacgcaaatactacaaaaacgagctgcaaaagatattggagtcacaaaagcgcttcataccgcaactttccgactctgcgctatacgaaaaatgtataaaagagttataccagagcaacgaagcctatcgcaactccatatccacaagaaatgatttcacctatctcttcgtagacaacatcatattttatcaaagacctctaaaaagcaagaaatcattgatagacaattgtccatacgagagtctgacatacacaaaagatggcgaggaacacaaagcaccagtgaagtgcatagcaaagtcgcatccgctatatcaggaattcagactatggcagttcatctcaaacctccgtatataccaacgccagaagcaggtcggtgacaaagtgaaacttgacgttgatgtcacagatgagtttctgcctacggatgacaggcgagaagcgctttttgattatctcaacgacaaaacggaaataaaacaagacgtattgctcaaagaattcttcaatatgaagaagcccaagggcaaagacagcgtatatccatacagatggaactatgtagaagacaaaagttatccctgcaatgtgacaagaggaaagatactggctaaactgaacaaggctggggtatctgccgatttcctgtcaagcaacggcaatgaagaatcattatggcacattctttattctgttgaagacaaaggcgaattaagaaaagcacttgcccgtttcgctgcgaagaacggacttgacaacgctttcacagaagcccttgccgacatagagccatacaagaaagaatatggagcatactcagccaaggcattgaagaagctgctgcccctgatgcggttgggcaaatactggaactatgacaacattgccccagctaccaaggcacgtatcagcaaaataattgacggagaatatgacgataacatacgaaaccgcgttagagaaaaggcgatgtctctcacttctgcatctcaattccaaggacttccactttggcttgcgtgctacatcgtgtacgatcaccacagcgaaagggcagactccggcagatggtcttctcctgaagacatcgacaaatacctaagcgacttcaagcagcactctctccgcaaccctatagtggagcaggttgtcactgagaccttgcgaacagtacgtgatatatggaagaaatatggcgagataagcgaaatccatgtggagttgggacgcgagatgaagaatcctgccgacaagcgtagcaagatgaaccgacgtatgctcgagaacgaaaatgcaaacatgcgtgccaaacttcttctcaccgaattcatgaatccagaattcggaatagagaacgtgcgttcttattcgccaagtcagcaggaactcttgaggatatacgaggatggcgcaatcagcaatgccggcagcgaaatagacgacgagatttccgacatcatgaatcggctgtcgcaagtagatgtcaagaaacagcctacggcgtctgaagtaaaacgctatatcctatggcttgagcagaactaccgttcaccatatactggacagatgattccacttgccaaactcttcactcctgcatacgagatagagcacgtgataccacagtcgcgctatttcgacgactctttctcgaataaagtaatctgcgaagctgaggtgaacaagctgaaggaccgtatgctcggatatgaattcatcaagcagcacaagggcgaaaaggtatctctcagcatgggaggcaccgtggaaattctctctcccgaggaatacgtgcgccatgtggaatctcaatacaagaacaacaaagcgaagatgcgcaagctcctcatggacgacattcctgatgaattcataaacagacagctgaacgacagcagatacataagcaagctcatcatttctcttctctccaacatcgtgcgggaggaaggagaggaagaggctacctctaaaaacgttatcagctgcaacggcagcatcacagacaggctgaaaaaggactggggcataaacgacgtgtggaaccatatcattctgcctcgtttcagaagactgaatgaactaacgggaactgacaagtttaccacttcaaacaaagagggccacgaagtccccgatatgcctcttgaactgcagaagggattcaacaagaaacgcatcgaccaccgccatcatgcgatggacgccatcgtcatagcatgcaccacacgcgaccatgtgaacctactgaacaacgaggctgcaatgtcgaagaacaatgccaacagaattcagctttcaaagaaactccgccgatacgagtccgtagaaatcgaaaaagacggcatacgcaaacagatttctgtggcaaaggaattcaagaagccttgggaaggttttaccgcagacgtggaacgcaccctgagagacatagtggtaagcttcaagcaaaatctgcgtgtcatcaacaagaccaccaactattaccagcatttcaaggatggcaagaaggtttactcccctcaatctaaaggcgactcatgggctatccgcaagtctatgcacaaggagacagtatttggcgagattaatttaagacgaataaaagaagtctcgctaaaggaagcaatgaagcgcaccaaggacattgcagacaaggaactgaggtcaaagattgtcgaactgatggcattgcaatacaatgagaaaaagataaagcaatatttcagcgacaacaaggatgagtggagcgacgtgaacccgaagaagattaaaatccattacttctccaaggagaccaatgagcgtttcttcgccacaagaaagccactggacacttcattcgacaagaagaagataaagacccaagtggcagatactgccatccagaaaattctgctaaaccatctgtctgcacacggcgacaaggcggaaacagctttttcgccagatggcatcgacgagatgaaccgcaacatcattgagctaaataatggcaaattccatcagcctattctgaaggtgcgcatatatgtgaaagcggacaagtttgcagttggtctacaaggcaacaagaaaaagaaattcgtagaggcagcaaagggtacgaacttattcttcgccatctacacagaagaacagatagatgaaaagacaggagaggtcttcttcaaaaggacctataacacaataccattaaaagtcgtcatcgacagagagaaacgtggtctatcgcctgctcctgaagatgaaaatggagccagtcctaaatacgtgctctcaccaaacgatttagtatatataccaacagaagaggaaagaaaaacgaatagaatcaatttgcctttagataaagagagaatatatagatttactgacggttgtgataatactgctaatttcgcaccagctaatgctgcatctttaatattttccctaagaaaagatgaagcagaaagtttttgcaaaggagatattattatacaaaatgaatttggtcttggaagtcctcagtctaagaatcaaagagctttgacaggcgaaatgattaaagaaatctgcatacctatatcaataaaccgtataggagaaataacattgcgttaataataacagccgaatggtttattaaaaaacgataaaccattcggctttttgtttaatacctaacaggactaagcctatgattaagaaaacactttatttcggaaattctgcctatctatcgctccgtatgggacaaatggttatcaaactaccagaagtggaaagcactcctgaccttccaaagcgtatgaagcaggagtcagaagttaccaaacctattgaggatataggcattgtgattctcgacaacaagcgcataaccgttacgcagggactgcttgaagcattgctcgaaaacaactgtgccgtgataacatgcgacagccatagcatgcctgttggattgatgctgccgctttatggcaattctacgcaaaacgagcgcttccgtgaacaactagattcctcgctgccgctgcgcaaacagttgtggcaacagaccataaaagccaagattgacaatcaggcagctgtattatccctatacaccggtgttcccacaaaggttctcgaaagactctcggcagatgtcagaagcggcgaccccgaaaatgccgaaggtagggcagctgcatattattggaagaatattttcagcaacattccaaatctcagcgacttcactcgcgacagaaatggtatgcctcccaacaatcttctaaactatggttatgccattctcagagctgtcgtggctcgggcattagtgtcgagcggcatgctgccaacactcggcatccaccatcacaacaggtataacgcctattgccttgccgacgacatcatggagccttatcgaccatatgttgacgaactcgtatataccattattagagagtttggctgcgaagacttacaactttccaaagagataaagtttcgccttcttggtatacctactattgatgtagtaataaatgacaaacatagtcctctgatggtagcagtaacacaaactactgcatctctctataaatgtttcactggcgaattaagacgcatagcatatccgatacgtcttgactcctaataagagtaagtaacaatatggaccgttttagcgaatatcgtattatgtggattcttgtattttttgaccttcccacagaaactaagaaggacaagaaggagtatatgttgttccgcaagcggcttcaacgtgacggcttcaccatgtttcagttttccatttatgtacgtcactgtgcaagtatggaaaatgcagaagtgcatataaaacgaatcaaatcatttcttccagaatatggtaaggtcggcataatgtgtataacggacaaacaatttggaagtatcgatttgttttatggcaaaaagccaatacctccgaaagctccagggcaacaacttgaactattttaatcttttaaaaaagattagctgtattacagatattttaacctacaaaaaacttttattgccttccttcgtatccttagccctctaaaaccaaaaagaagaattccgtatttagagacggaattcttctttcttaaaacagtatttttgttttctaatattccatataaccaattgtgttacagaacattacacagactatactgttgttgctaccacaaaggtagtaaattttaagcaaatcacaacggtaatgtcgaggtattcttgccctcctgtactgttgttgctaccacaaaggtagtaaattttaagcaaatcacaacggcactcttgaaatcatagaacgtatcagaactgttgttgctaccacaaaggtagtaaattttaagcaaatcacaacttgttttaagattaagccagctaatgtaaactgttgttgctaccacaaaggtagtaaattttaagcaaatcacaacacaatcatagttcattattggttaaacagactgttgttgctaccacaaaggtagtaaattttaagcaaatcacaacacgctcttgacgctcaccctgaacggcagcactgttgttgctaccacaaaggtagtaaattttaagcaaatcacaacaccagcacagtagggtcaccgccgatttccactgttgttgctaccacaaaggtagtaaattttaagcaaatcacaaccttgtttcacataaagagtaatgccaaagaactgttgttgctaccacaaaggtagtaaattttaagcaaatcacaacctccatatcgtttactaatttggataactcactgttgttgctaccacaaaggtagtaaattttaagcaaatcacaaccgtccgattcaatgttagaatcgctaaatactgttgttgctaccacaaaggtagtaaattttaagcaaatcacaacatggtaaaaagtttcctcctaatactttacactgttgttgctaccacaaaggtagtaaattttaagcaaatcacaactacctatggcactatggatattgccgagtcactgttgttgctaccacaaaggtagtaaattttaagcaaatcacaacacaaagaaacaaggttcatcaggacttggaactgttgttgctaccacaaaggtagtaaattttaagcaaatcacaactgttcgtcatggctctggtgtagttcatgactgttgttgctaccacaaaggtagtaaattttaagcaaatcacaacatcctgactatcgttaaacaaaccttcgcggatgtcaatcgcgatgccactttcgttgtccgtcactgtccacatcaaatctttgcccgatgtcaacgaaaaatctttcttttgccataatctttctttttactttttttactttttacttttctatcattctcagctccgcgcctaacgctcctgcaatcttgttgagtacgtcgatattcacggcatacttgccggcttccacgctgcggatgtttgaggtggagatgcccgcaatctgggcgagctgctcctgctcccagccttgagcggtgcgcatcgcgcggatgctctcgcccatggccttacgcttgtcataaattacttggtctttttccatgttgtctatattttttttgtgattacacccagcctccataaaggaggcgcaaggcttaatgattaagcgcatactcgatggcctgctctgcataatactcaacaccaaactgcttggcatacttacggaggtcggctattgagatagatgtagccttatggcctatggcttcctcatacttgttcttgaactcctgagtaccagggcgacagttgccagactgttgttgctaccacaaaggtagtaaattttaagcaaatcataaccaaactctgccattactattttagcaaagaactgttattgctattcctaagtagaacgtagattacgttagaaattttttgcctatatttttgccttgttttttaacgattttaattgaccacttttaagcattattgataataggtgttgatgccgttacaatgtccacattttgttcagcatatcaatagcagaagcagaacggaacacattattcctaaaagcaatgatgcttggtgtggatagctgatcttcgaaggaaccgtttcgcttatgaaacacttttgtgctttttgtgatatttcattaatctttggtgaagaaattattgtctataattgtcagtcgttgtcggtaaaataaaaatggttagataaaaacgactatagagacaaaaaattgccgagaactgttgttacagaatcgtttcacccataaaacaagattaatcacacttttaaagagcatacatattttttcatcaacatattctgttattcttcagaataaaaatcatcatcgtcttcaagttcttctacttgaccattctgacgtaaatagaagatagcagcctttacgatatagacaaatccttgtacaaaaaacgatgtgattataccagaaattccatatgtaactaatgttataccaagaggttgttctatccaagagcccaatattcagtaatacaatccaacagggattaagattactgatatcactaaagcacagattgttgccactctcattacactaattgtaatgttttctttcatcttaaaaaaagctttcaaataagtttttgcttccatatctttcttaacgattattatattcgtatttcttattaacaacgcaaaagtacacaaaaaggaatgaaaaaaagaatttaaacaatttcttgttataacacctctatttagtcctttaagcaagcaagcggtataattttgacaccatcaggacgtgtgtaggccatttctcctccagttataaccatgagtaaatctggctcacgtagctttatttgtttttcagttttgttatgctcttgcacaagtcttttgatttctttcaaatgttctgcaccttcttcaatctctcgactacctagtttgaattcgattagggcatatcgtccatcatcaagatgaaggacggcatctgcttccaaatcatatctgtcatgataatatgatatagaaccaccaagggacaatgaataagccttcaggtcacgaattgccatacattcgaacaagaagccaaatgttttcaaatctgtataaagagcttctggtgacaaacctaaggctgctacagcaatagaagggtcaacaaactcacgtttcatacctcttcgtatggctgaagcagaacggatagcagggctccatgcttcaatgtcttgaataacaaacaaacgttcaaatgcatcaatatatgtgtcgaaagaagtggtactgacaccttctaagtgttcattcacatctcgatacaccacgctctttttggctaatgtcgagatattgcgtgcataactttggagtattatgcttgcaaccttttcatttcttttgactccatctattgtcgaaacatcagtactgcatactgttttcacatagtttttggctatttgtagtttggctttgtcgaacttggcatacaatgatgcaggccacccaccacggcaggccgcaaatataagtttttcaatagacatttctgacattgtgccatcaatatccaaatccttgttatcaaacaattcttttagcgaaatcttgccgttagactccaaggattcatacagactcatagtaagcatttgcatctttgcaattcgtccactgccagaatgtttgataaattcacttttcttatttgggtcaatcgaatttgaacctgtcataatgaattgtccaaactcatttcgtttatcaaccatagctcgtaccgaatcccatagcacgggggcctcctgccattcatctataagacgtggcgtttcaccaagcagaagaagcgaaggtttcaccctaatggtagcttgatatttgtcacgcatatcaggatcctgcagactgatagtgctgtttgcctgttgttctgcagttgttgtcttgccacaccattttggaccttctatgagcacggctccagaagaagccaatagcaagcttaaatgctcatcggctgttcttttgagatattccatatcgtttattatatgattcgtttgcaaagatactgcaagtgaatggaataacaaaacaaaatacgtagtttttgttttttatttctgagcacaacacatcttatctaaagttactgatttcttgcgtattacacatttcatttggtatttttgtggcatttcgtttggtgtttttgtggcaaatcgtttggtgtttttgtggtaaatcgttttgtgtttttgtggtattgagtaccatttaccgtatcatcacataaatagggaaacactttttggctaaaatcgtttcgcccataaaacgatttttatggctcacccgataaacattggggaatattgattacaaccagttagggaagactttgcctttgtcttttattatgtcgcacacggatagcacagagagcggatttttgagccctgtgggctttgcttctgcttgcgctccttgcttgaagtttaattaacattcggtagattcgctatattcgtgttcttttaaacacaaactgctgatttttttagaacacgaataatccaaatcgcacgaatgagccctatgggctctttagcttgagttccttgcttgcgtt

SEQ ID NO: 1274 - DNA, 20640 bp, synthetic construct
  misc_feature 1..20640: note = Synthetic
  source 1..20640: mol_type = other DNA
atgtaccataaagcaggtgacaacccactacctttgccaatgaaaaaaaacagtgttgattcttaggcaaggtacggacaaccgttttcatgttatacggctagaataacagtaaattttaaaccatgaaaaatcacttttttaccataatttttcttttactcttaagttgctgcaaagtaaaagaggccaccttttccccatctggcggaggcactaccgaactaaacgaactatccgagcagttccttaaaaaaatacagcaaggggaaggtacggcggaaatacaggaacagttggccaacactagcctaaagcaaattcaaaaaacattggtcacggaccaacagagatatgctttttggctcaacatttacaatgcttatatacaagtattcttaaggaatcaaccagaactgtataaagataggcgggatttcttttccaaggaacaaattaacatagccggccaaaccatttctttttctaaaatagagcatggtatcattagaaagtctcaatgggaacttggccttgggtacttcagaaaaatatttcccgatgcactggaacgtaagcttcgtgtaagcaaacgggactacagggtacattttgccttaaactgtggggccaaagactgccctccggtagctatctattccccggagcgcttagaagagcagttgaaccaaggcacagaaaggtaccttaaagaaacctccctgtatgattctagttccaacacggtaaaagtaaccgcattatttagttggtttaggggagattttggtggggaacgtggcgttgggaacatcctagtgcaatacggcattattccatctgcaaagggggtgaacatcagctacaagaactatgattggaccctggcattggacaattttataacactttaagctgttgggcattttgatttttttttcaatttgggtgagtgaattacgccaatgtaatcgcagctattcgcacccacctgagaacagctaggctcggaaccaacactttagtttaacaaccgttcttgatactttttttattcatcaaaatcactcaaagttacgactggtggtttacgctagtaacaatgcataccgggcagcaccttagctaaaaggcttccctaacggttagataaaggttaccaccttccgcactttgcccatagtctaccctaagtcgtattccctctttcttgttaatggtgtacctaaggcccgcacctgccgtgtttctgtacctagaagaaaaaagcgcactaaaatttggggccaccgtacctgtggatgcaaaaaacgttcctccaaaccgcccagatagtggaaaacggtattccatagaaaaactaagttccccattatcttggtaacgtctatcattgaagcccctggtgcgattggtgcccagtctatttaaatcgtaaagtggggcaccttggccattattagccaaaaaaagattggtcgctatgatatgctggccctttattttctggtagaacctactgtccagactaaatttggcataggaaaaggaagctcctaaaaaatccatggcagaaaaagcagcggcttgtacaaaaaaacctcgggtaggttgaaaaatatcatccctagtgtcataaaagacgagcagccccaaattggacaccgtaccaccccttttgccgggaatatctgtgcgttccaaaataccattttccttgctgacaaaatcatggtaaatatccagttcgtaccccaatccaacagagattttaggccatacctccttaagcaaggataccctgagcctgggaaacgttacttcataggtctcaaagtctgcttgattggagtctataccaagcccataaaaattatagaaatatttaaaataccctaattcacccaccaagcgccaccgttcttgtttccaatacaactcaaagggtgcaaaaatgaggagttggtttttggtggtgtagcttacggccaattgtgtcgatgaggccctactctgctctggttcatttttaaatctaaaagtggcaatacccagtccaccgtaacccaaacccgtttcaggcaaatagaataacacgggtaagccggttaacctaaattttttaacggtatcgttacttttattctggacatcttgggcacctccccacagggcgaaaaaaataaaaaaacaaaaaatcaacagctttttatgcatgctattaaggcttaatgaattttagcataacccgttttgcattttgagcaattttttttggagttaatcctattgatgaaatccttgacatgtgtacctgtttacgggcaggcaatcatggaatcaatattttagtttaaagacttttctcgatactatctcccattcctctaaatcactccagctaacatgttgttgtttagaccggttaaaaaacatcatggcatctaaaggtagtactcttctgccagccatatgaagcaatccagggattagtgcgacaaatggaacaaaacttaccaatttttttaagaccgtattttacccagggtttgggtaaccagcatcttcaatagatatcgccatcggaaaaaaatagggtattatccttacgcttcctttggtataaatggaagctcagcccttaacctgttcatctccataatgccatgggaagcccactagttggtttaccaaacaccttggccacaaagaatccggtgttctagtaaacaaccaatccaatctacaggctgtttatttctgccaaggagcttggccccaactcatagccagcatccaaaagttccgctttgagcgccttaacgatttttggtttgtgatttgccttataaatttgggcagcgttcaataaaatggcaggttcataggtcttatgcatgatatgttcctctacaatccgtaacgctttttgatattgttgggtctcataatatgccatggccaataaatgataggattctggcgttggcctgttcccaatctcggtttctgcgagcctaatagccttgctttccgcgtttgtgtgttttaaatggtacgctacattatgcccattgtacatatccccgtattgtttattggcaaccgcagttacaaaaatatccaagttttgggcctgtttttgggtgtctcccatgaattccgctatctccgcctttaacagaaacatatctggtgttttataatatttggtgacggcatccaaaatgcgaagtgcttccgatggcttttgttcatgggaaaagacgatccatgcgatacctttttttgcataggcgttgttggggtctagggccaatgctttcaaataatgttcatacgcgtcccggatgcgtccggcatggccgtaataatcggcaatattggtataggaccatatgcgtaagccgctattgttggaagactccgccttttctatagccttttccataaaattgatggtagtatccaggtcgcctttataatcgttccatttagccactcttattaaatacccaaaatctgacatatctgcaatcctatctaaatagtcctttgccaaatcatggtttcccaactccatatgcacatcaaacaaaaggctctgggtctcttttaggcctccacccaattccgctgcgtcctttgccaaattaagtgcctccctaaaccggtgttgggaaatataatttcttgccaatgcccgtaagtacgcttctttgttgatatgggcaatctccacggcctttttaagggcccgctctgccttgattagaaaatcaatagcaccggtttccttaaagtaacggccatattctgcggcaacatgcccaaaactcaatagctgtaagctatccggttttattttaccgttccagagttcaaaatacttagaacttgtccttacggtaatatcacctagatatggattgtaatctgcgctattggtaatgtcgctgttttgctgtttacaagaaagcatcagtgtgatgatgataagtggtatgatatttttcataaggtgtatttttttatgattataaggaaaggaaaggccaaacggccctccttttttctctttcccataacaattactattctggatttcctatataggggaattccgtagtgatctctgcggtgagtgaaacaccgtcggaagtcaatcttggaagatcgggagtcccgtccatgtctatatcctggccactaaagcgatttccctctgtgcccccaaacaaaagaatcaaagaaatgtctataatatcatccgttaaccttctaccggtcaaggccacctcatcaccgtccggtactaaaattctgccgtcattgtccgagtcggtacccggatcaaaatacgtggtaggcaaatccggggcaacctgcagcacgtccgcggccaaaacggtggtcaatgtggtggcatccaatcctagtatattgttttcataatttactgctgcgggatctagacccaacttcacggcataaacatcatggtattgttctaagcgtgcctcaaatgcaggctggaagctggaacccatctcagaaggtatggctccattatgtgcatccttggtggcaccatcaacactcaaaacagtgttgataccgggtctacccataaaatctacctgggcataggttccgctgaaatccgggtttgttcccatggcatcgcagggcatgcaggacccaccacaatcaatacctgtttcgttcccgttcaatataccatcctcacaagtgggtatttggtctaccatcattccatcatcattatcggtacaagaaaccaaggtaaccatggtgaaaagcgctaaaaatgaatatgttatcttacttttttgcatttgtattatttttttgaattaaaatctattgttttctgtttgtggttacccatgtgttgtaaacggtaattcccaaggcattggttgccgttggggtcccaagcaggctattgggtatttcaatggcaatacttaaagtgtttgccccgtcaaaagtatcttctgcctcaccactgggcaaaaagcccctaggagcggcatccattgccgggttgatgacggcattgaattgaaaaaaatcaaaaaagaacgggtcttgccttgggcctgcaaagagctttactcccgctgctgtggtctccacaatcgccgtagcatcggaaatttccacatcccctagcgctgcatccattaatactggtccgttaagtccggtctgaccgggagtggccgggccaaaaaaaaacattctcccatttctgggaatggcctggattacggtatcctctatcaaatccccatccaggtcaatgttaatttcggtcaacacatcctcgtcaaaggttccgtaggccaggtctggaagtacgttagactgtagatctacaatgaaggtagtttcattggccccttctgtgggctcaaaagcaaaataatccgcaatatctgcagaggtgcccatactgcccggtgcgtcaatgtggtctgcggctacaaaaatgagggtagcgaccacaatactgccaatccccataaggtactttgttctttttttcatcttacactgttttagttatttgtccttacctacggaacccgatggtagagggtttggtttttggtgttaaaatttaaaataggcccacaacctttgcccgatggtatttaacccgttgttgtgtagccattgtcttttaatttatgtttctttgatgtgttaaataaatttcatgaatccctctgcccaaggttggattaccaaatttggttcgctcgttaaaacggaaaaaacgccttatgccaaccataaggagctctaccaggaacttctgcaaaacggatttatttatggcatccatttaaatatttccggttttattccatcggaacatcaactttctgaggacgaagtagcaaaaatcaacttgcttaccgcactttattttgcttaccattttgaaacccagaattcagattttgaagtatttgtggagacggtatttacttattaccaaaaaatggaattgggaagcatttcttttcttagtaagattttatcgggcaccaaaaccgtttcacaattagaaaaactgttggattccagaatttacctcaacggtaacgtgtttaacaaggccataggcaacagtcttaccaattcactgttgtatgtagatgtcctggtttttcaggcctatttgcgcaaaacaccaaatctggaacagcatgcccgtatattggagtatattatcattaaccttgcgaaccacgcactgtactccaaacaagccaaagaaaacgaccttaagctcattcagcttttggaggcctcgttgagctatgtagaccatagcagcacccggtttcaaggctcttacctgcaaatgataccagaaaacctaagcacacttgaaaaagactatctgttggattttgcctgtttggccgtttgggaagatgcccatatagacccaacggaatctgcctttattgccacgcttttaggcccattgcaaaagaccgagatggacgcccagaccgcttttaaaaacgtacaacaattttttaaaaaaaatagggatagcatcccgtatttaaaggacaccaatctggcctcaaaattttacgagggcatgaccaaaaatgtgggcaaattaattttaaggaacagcaagcggttaaaaaaagaactttcggaaagtagggaactggtttcccttttggcaaaatccactatcaaggacctggatgcggaagagcgaaaaaaaattcagatgcaacttatagatatttttaaatccattccatcattggccatttttatgctgcccgggggtgccgttttattgcctatattcatcaagctcattcccaaattacttccttccgcttttgatgacaaccgagtggaggaataggcaaaaaacccatcaaaaaatccagtataagaaaaaactattgaactatccattttactttaatccaaatagttaaatacccttactccaaccaaagcttaaaatcttttacccgttccctacttacgatgatttcctgctctttatactggtttaacttaatttgtagccgggaattggtgtaggaaataatgtctttgatatggttgatgtttacataaaactttctgcttaccctaaagaacaattttggcgaaagctcttcttccaactgctccaaggtatgatctaacaaataatttctgccatccgtagtagctgcataggtgcctttgttttcactgtaaaaacattccacctcatctgcattgatgatttttaggtgctggcccaccttggcggtaaaccgttttttgtattccctttccaagggatttaccaatagttttttaatgtcctcaaaatccaccgaaataggttccctttccgtatgtatttcacggtattgttttaccgctttttccaactcctcgtcgtcaatgggctttaacagataatcaatgctattgagcttaaaggcctgcagtgcatattcatcataagcagtggtaaaaataatggcgcttttaacctcaatggtatcaaatatctcaaaggatagcccatcggaaagttgaatgtccaaaaaaatcagatctgggtgcggattgttctggaaccattcaatggattcctccacggagtgcaacatggtggccacgttcacctctaattctgccagtaaccttcccaaacgccttgcagcgggtttttcgtcctcaataattataaccttcatcttaactttagatttatctgttgttttttgcagtaccgttcagaaaattaaaccacggcgatgggcattagttatccaatctatccttctccataaactccttaatcttacgttcttcccatttgtctccgaaaaaaggaagccaaccataggttttagcggcgtgcatcagtaatcctatgccccaaaaaagcggaatggcaacaacgttccagtctatccagctgatcaatttatgggtactggtgttgtcaatggcattgcccacaaagcccaagcctgtaaaacgtaaaaataagatgcctatgttcaccaccaaataggtccgtaggtggttatggaattttttaatacgttttacctttttaatggcccttgcccttctctgttccttatccattagaattttttggccgctttatccatttctttccgctccttttccataaaacgcgctatctgacgtttttcccagtcctttccaaaaaagggattgaacctaaagaccttggccgcatggaatagtagcccaagaccccaaaaagtgaacgtaaaaaagtgctcaaacctccaaaaacgatccgcgttgtaatttacctgtaccaggatattccccaaaataaagatattgattaccgtaaaaacggccgtatgaatataaaaacccttaagttcttccatacgctttttggcgcgcgcccttttaatgtctgctgtattctccatgattatttccatttggtgtttgtttgttctttttccatatactccttgatcttgcgctcctcccatttttttccaaaaaagggattaaggttaaaggtgcccagggcgtgaaagaaaaccccaattccccagcctagggcagcccaaaggaaccatgggtaacgccactcatctatccagtagtttaaccctgccaagccagcgatcaccaaaacatacgaggtaaggtttacataaaacttgcgcagttggtctacccgttcccgagctttaaggtatttggtatccgtattgtttttttccatgatgcgattatttagttggttctttaaatatactattttgcttacagcctatcctcttccatgaattgctttatttttctttcctcccaagatttgccccatagtaggttttgtccaaatgcccttaggccatgacttgctaatcccaagccccaacccaaggcgggaaatataacccatacaaagctggtggtacggtaatttaaatacgctaaaaaccctatggtgatgctatagatgatcacatgcacataaaaagatttgattagctctacgtgttcttttgccctgttgtactgatactcgtttgtgttttccatcgttatcctttttattgattgttgttttaatttgtataccccaaatctcccctaattcaaggggttttaaaaaaatggatgacccaattgttgttttttggggatggaatgttggttggttggttggtggttgttggttggtggttggtggttgttcgttgatggttgttcgttgatggttgttcgttggtggttggtggttggtggttggtggttggtggttcttggttgacggttcttggttgatggttggtggttgatggttgttcgttgatggttgttcgttgatggttgatgatggtggttgatgatggtggttgatgatggtggttgatactctgtttacgctttaactaaggtttgcatatatgggatgtgatgaaaaagttaagaaaagagaaagcgatgctggaataaacccgtgccgctttaaatgttttagctcacgtactttgtccatttttcttaaaaggtgttcgtgaaacattcaaaagaaaaaagcgatagaaataaatctaccgccttgaatgtttgagctcacgtactttatacatttttttcaaaggagttcttgaaacatttaaggaaaagaaaagcgatactggaataaaccagtaccgctttaaatattttagctcacggtttttatttgttgttcttcaaagaagttcgtgaaacattaaagtaaacaaaaaagcccccgtagaaaggcgagggcgtccttaaatgttttcacaacggaataatccttattgtgaattgctttcagtgctgtaaagataaaaactctttggtaataaaaaactgacttttttcatatttttagaaaataagagcgtgtaatttcaaccgcttacaaactaaccatggtactatgaaacgaattttaggattggatttgggcaccaactcgattgggtgggcattaatagaaaatgacttcaacaggaaagaaggcaaaatagaagctttgggcagccgcataattccaatgagtcaagacatactcggaaaatttgatagcggtgtcactgtatcccaaacggcagcacgtaccaattatagaggaataagacgtttgtatcagcgagataatttacgcagggaacgtttacatcgtgttttgaacattcttgggtttcttcccaaacattatgcggaaagcattgattttgaagatcgcttggggcaatttaaacctgaaacggaagtgaaattaccttacagaaaggatagcgacgataactatcatttcatctttcaagaatccttcaatgaaatggtcgaggagtttcaatttaaaaatccgtcactgttttataccaaggctaatggtgagcaatcaaaaataccctatgattggacactctattatctgcgaaaaaaggcactttctaaaaaaatatctaaagaagagttagcttggatattactaaattttaaccaaaagcgtgggtattaccaactaaggggggaggaagaagctgattccaaggataagcttgaagaataccatgcccttaaggtttcagatgtgcaagctactgaagataccaatgccaaagggacctggtataacgttattctagaaaatggttggatttataggaggcagagcaaagattcgctttttgattggaagggaaaaactcgtgaatttattgtcactaccagtttagagaaaggcggagcggtaaaaatagataaagaaggaaacgaaaaaagaagttttagagctgtagattccgaaaaagattggattgccattaaaaagaaaaccgaaaatgaccttgccaatgcaggaactacggttggagtttatatttatgaaacattgttgagaaatcccgaccaaaaaataaggggtaaacttatcaaaaccattgaaagaaaatactatctagaagaactcaaagctatacttgccaaacaaatacaagaacatgctgagctacaaaaccgttcactttacaaggattgtatagaggagctttaccagggtaatgaagcgcataaaaacaatatcaaagaaaacggatttgattatttgtttttagaggatattatcttttaccaaagaccgttgaaaagtaaaaaatccactatttccaattgcccttatgaatcgcgcgtttttatcaaggatggaaaaaaggaaatccagccgatcaaatgtatctccaaatcaaaccctatttatcaagaattccgactttggcagtttattcataatctcaaaatatatgaaaaagaagcaatagatgatggaaaaacggtcataaacaaagatgttacaactgaatttttaaacactcaggaagcgtatgcggctctttttgaatttttaaatgataaagccgaaattagtcagaatgcattattaaaatattttaaactatcaacaaatacacatcgttggaataatgtggaggataaaaagtatccttgcaacgaaacgcggtccgaattcataaaacgcctttctaaaatggacggtattgatttgggtaaaacactcagtccagcttttgaaaaatccttgtggcacatcatttattcggtcaaggataaaaagcaatatgtaagggctttggaaacttttgccatgaaaaatggtttggatataaaccaattccgcgaaaattttgaaaagtttaaaccttatgatagtgcctacggggcgtattcggaaaaagccctgaaaaaggtgttgcctttaattcggagaggtacgtattggaaaaaagacgctatacctgctgccgttcaagaacgtatcgtgaatattatgaaacggatagaaagcgttgattttaatttggaaaaaattgaaaacttcgccgatgacgacatcccaaaacaattgttgaaaagtttcgccaaaggaaaagacccaatgcaaggtctgaatacatatcaagcctgttatgcggtttataacagacattccgaagtaagcgatatacaattatggaaatctccagaagatattaccaaatatttggattcctttaagcagcatagtttacgaaaccctattgtagaacaagttgtgatggaaacgctcagggtggtacgggatatttggcaatattatggcaatggcgcaaaggatttctttagtgaaattcatgtggaattgggtcgcgaaatgaagaatgataaaaaaactcgtgaacggatttcaaaatcaatcaccgaaaatgaaaataccaacgaacgcatcaagaacattttaaaagaattgatgggtgatgaagcccttcaaggcgatatcaggccttattcaaaagggcatcaagatattctaaaattatatgaagaaggcgtttttgccaatgcaccagagacctataagaatattaaaattgacgatattgaaaaaatccgtaaaaataattctccatcaaaatcggatattgttaagtataaattatggttggaacaaggctatatttctccctacacgggcagtccgattccgttgagccgtttattcactaccgattatcagatagaacatattattccccgttcacggtattttgatgattctatgggcaataaaattatctgtgaaagtgccgtaaacgaggaaaagactaacaaaactgcttacgaatttatcaaagaaaatgcaggacgtatcattgatttaggacaaggaaaacaagtgccgctttttgatttagaagcttatgaaagtcattgtaggggttattttaaggggaataccaaaaaattaaagtttttgttaagtgaagatattcccgaaggcttcattaaccgacaattgaacgatagcaggtatatcagcaaagtagtaactagcctattgagcaatgtggtacgcgaagaaggagagcaagaagcaacgtctaaaaatttagttcccttagtgggaacaataacaagtaaattaaaaaaagattggggattggaagccatttgggatgatttaatcgcacctcgttttgagcgcatgaaccaattaaccaagagcacagatttccgtaaagaagtaatagatggccatggtaaccgatattttataaacacggtacccgatgacataaagaaagggtttagtaaaaaacgtatagaccatcgccaccatgcacttgatgctcttgttattgcctgtactacaaaagaccatgtgaattacatcacatccttaaatacgcaaagaaataaccgttcgcttgtttctaaactgaggaaaattgaggaaaagaccattaaagataaaagaacggggcaacctaaaacgataaaaatcgcaaaagcctatcataaaccgtggccaaacttcacaaaggagacttttgaaaaactgtcgaaaacggttgttagttttaagcaaaatcaacgcattattaataaaaccaataacaaaacttggggctgggagaaagttgatggtgttatgaaaaaagtactgaaaaaacaggaaaaacggaattgggccatacggaagccaatccataaagagacgtattacggaaaggttaaagggttcgattcaccaaaaggaaaaattacaactgctactagaaagtccttgagagaaattacaaacgaaagacaactaaatacaataacggattctggtataaagaaaattttaaacaaccatttgaagacttttattgatgaatctggtaaaattaattttgaaccagcatttaatcaagatggtatcgacttgttaaataaaaatatccaacaattaaatgaaggaaaaaaccatcaacccatttataaagtcagaatgtacacccataataccatgttttccgtaggagatgaaggaaacaaatctactaaatatgtaatacctgaaagtggtacgaatctattttttaatgtttactgggatgaagaaaataataaaagaaattttgaaacagttcctttgaatcgagtaatagcttttcaaaaacagacatcgcacatcccaaggaaagatagaacagatgtgccaatagataatacattgggccgatttctttttacactatcaccagatgatttggtttatttgcctacagatgaagaaagtgagtcttttacaacttttgaaattgatagtttaaatagcaaacaggtagcgaacatctataaatttgtagatgggagtggaaccacgggtaactttgttcctgcggaagcagcgcgtgtcatagctaatataaaagataaaaaagtacgttctaatttctgtaaacgaaataatttatcagataaacaattaatcaaaaatgaatttggtttgggaagtccacaactcaaaaatcaaaattctttagatggtaggcaaattaaatcaatatgctggaaattggagattaataggttgggtaaaattattaaagttataaaatgataaaacgcaccctattttttggtaaccccgcttatctgagcaccaaaaatgagcagttggtggtcaattttccggaggaagggaagaaggaggctaccatccccatagaggacttgggctatgtggtcttggaagacccacaaattacgattaccaatggtttgattcgaaaactggtacagaacaaaacggccattattacctgtgatgcccaacacctgccctgctccgttttgcagccgcttgttggtcatagcgaacaaacagagcgaatacggcaccaactgaatgccagtctgcccttaaaaaagaacctatggcagcagaccgtggaggccaaaatagacaaccaagccaaccacttgttacgccgtgaaaagaacgccttgaaactaaaacgctgggccaaagccgtaaaaagtggggatacgggtaaccacgaggcaatcgctgcagccgattattttcaaaaacttttcgaggaagtcgaagggtttagccgcaatcagaaaggcgtaccgcccaataatttgctcaattatggttatgctattttaagggcggtcacggcacgggcattggtgagcagtggtatgttgcccagtgttggtatttttcatcgcaacaaatacaatgccttttgtttggccgatgatatcatggaaccctatcgcccttatgtagatgccgtagtctatgaaatggtggaagcaggagggaatatcagcgaactgagcaccaatttaaaatcgcaattgttgaccatcccagccctagatgtttttttagatggtaaatggagccctttgatggtggccatgagtagaacgaccaatagtttgtatgaatgttttttgggaagcagcagaaaaattttatatccagaatttcagaaggaatggcaacccgcttagattattgcgctcaacagcataggaatatttatagactgaattatgtcaggtcgagcgcagtcgagacctggataatatggaaaagtctgattactgtcaggtcgagcgtagtcaagaccttaaatacaatgataagaatgaaaagctactaggtgtatattttggaatgcaacggtgggctactgtataccagtgtgaccaacgatgtatgcagaggattggaagaacaccaattgggtagaagtaaaagctgttttacctataagcgaggacctttaaagttattgtggtatgaagtgttcaaggagattgaacaggccatattctttgaaaagaaaattaaaaagtgtagtagtaataaaaaaagggctttagcggaaggggatggtaacatgttgcaaattttagccgaatacaggaatactagctattttaaatataagccctcaggtctcgacttcagtttatattgaacgtagccgaaaggctcaacctgacaaaactcgactgcaatggaactgaaaaacctgaattgcttttgacgtaacaagagtatgaaacataaccatttttcacgtctaaaccaataccgaagcatgtgggtacttgtactttttgatttgccgaccgaaacacgcaaagaccgtaaagcggccacccgttttcgtaaaaatttgttggacgatggttttaatatgtttcaattcagtatttatctgcgtttttgtgccagtagggaaaacgcagcagtacacattaaacgtaccaaaatgaacctacccaaacacggaaaggtctgcatcatgcaaatcacggacaagcagtttggcatgatcgagctctttcacggtcaaaaagaggtggccccggaaacaccctcccaacaattggaactgttttgagcatgaaggagcaaaatctgcaattacgcttatttaacgcagcctgttactggccgcccaattacgaaaccgtaaagcaacttttggctcaaggagcggatgttaatggtgttttggaaggggaatccatactaggccgtcttttatgggagggccaagataatccgtatctcatggaaatgattgccttcttattgcaacaaggcgccgatcccaatgtggacacgggggaaggctttaattgtctttttcgtgccttcctgttaaataagccaaaggtggtgtccctgcttttaaatgggggcgcagaccccaactgcatttgccaggtaacgggcgaatccttgttggattgggccctgggcgaacaattttttctcactaccatagaaatttcggaagaatacattaaaaatcacgacgccatcgtggccctgctcttggcccacaatgccaaaagcagccgggacctgggctagccctttaaggccatcgctgttttatagccgactagggaatgtataagaaacaggatatcaccctttacagcaagtatcctgtgaataattcttaaccctttggcttgcctcagggcaggaattaaagaactgaaatcgagtttacgagattcagcgaataccattaaaaataacatagacatgagctaaagttatgctttgggtgcattactttctttagcatgctaaaaacaggataggaatggttacattaggcaaaataatacatactatcactcatcctaaagccacccataagaaacaggataccagccctttacagcaaatatcctgtgaataattcttaacccttcagttacgctcagggcaggaattaaagaattgaaatcgagtttatgagattcagcgaataccgataaaaataacatggacatgagctaaagcaatgctttgggagcattacttcctttagcatgctaaaaacaacataggaatggttacattaagcaaaataacacatactatcactcatcctaatgccattcataagaaacaggatgccagccctttacagcaagtatcctgtgaataatccttagcccttcggctacgctcagggcaggaattaaagaactgaaatcgagtttacgagattcagcgaataccattaaaaataacatagacatgagctaaagcaatgatttgggagcattactttctttaggatgctaaaaacaagataggaatggttacattaggcaaaacaatacatactatcacttatcctaatgccaaacataagaaacaggataccagctctttacagcaagtatcctgtgaataatccctaaaattaaagaactgaaagcaattcacaactgtcaaagtcataggtcagtttgccatcaacctgtgaataatccctaaaattaaagaactgaaagcaattcacaactgaatctgaagtattagtgatagcaccgatcctgtgaataatccctaaaattaaagaactgaaagcaattcacaacacgataagacttaattgaaatgggtgaagacctgtgaataatccctaaaattaaagaactgaaagcaattcacaacgcctacctactccatcaaacgtgcaattacctgtgaataatccctaaaattaaagaactgaaagcaattcacaactaaggtgctgaaacaaatccagaccttggccctgtgaataatccctaaaattaaagaactgaaagcaattcacaactttgaaaaggaaatatctaaataggattgacctgtgaataatccctaaaattaaagaactgaaagcaattcacaacttacattaaagtcattggtaacggtcttttcctgtgaataatccctaaaattaaagaactgaaagcaattcacaacattggcttaaagactatacagcaccaaaagcctgtgaataatccctaaaattaaagaactgaaagcaattcacaactttatataccgcgttagttgtccgttgtgacctgtgaataatccctaaaattaaagaactgaaagcaattcacaaccagtcaacatttaaaaaagcatgaacacaccctgtgaataatccctaaaattaaagaactgaaagcaattcacaactatagatttaaagattacttatatatttttcctgtgaataatccctaaaattaaagaactgaaagcaattcacaactaaaggatttgaagtaattagtatcataatcctgtgaataatccctaaaattaaagaactgaaagcaattcacaacgggggtatggggttggaaaatccctagagtcctgtgaataatccctaaaattaaagaactgaaagcaattcacaaccaaaagggtcacaatcaataatctcaccccctgtgaataatccctaaaattaaagaactgaaagcaattcacaacccgattgggattttgaaatgattaacgccacctgtgaataatccctaaaattaaagaactgaaagcaattcacaacaacagataagtggtctgagcgtttaacccacctgtgaataatccctaaaattaaagaactgaaagcaattcacaaccgaccgtcccgcctgtctggggggattgtacctgtgaataatccctaaaattaaagaactgaaagcaattcacaacattgaagtgaaaacaaaaaaagggaggttgcctgtgaataatccctaaaattaaagaactgaaagcaattcacaacagaatcgttctaaataattatttaatttagcctgtgaataatccctaaaattaaagaactgaaagcaattcacaacagctactacagttgtgcttacatctttagccctgtgaataatccctaaaattaaagaactgaaagcaattcacaacaattcttcttgtaacatttcaattactcttcctgtgaataatccctaaaattaaagaactgaaagcaattcacaaccattattatttcgctcaaaaaccacttggtcctgtgaataatccctaaaattaaagaactgaaagcaattcacaacgcatcgtttacgcctctggaagaccagcggcctgtgaataatccctaaaattaaagaactgaaagcaattcacaacaacagttccacggtttcctctgttacctttcctgtgaataatccctaaaattaaagaactgaaagcaattcacaaccaagtgacaatgtcctttaaagactcttgtcctgtgaataatccctaaaattaaagaactgaaagcaattcacaacataaacagcgtcatgcaatgggtggcggtccctgtgaataatccctaaaattaaagaactgaaagcaattcacaactgtacttgcataaataacaattttaaataacctgtgaataatccctaaaattaaagaactgaaagcaattcacaacttgggcttcgttctcgtagttatcgagcttcctgtgaataatccctaaaattaaagaactgaaagcaattcacaacctgtcttaatatagttactgcagtctgcagcctgtgaataatccctaaaattaaagaactgaaagcaattcacaactatatgctctcatttttggcaaggaaatggcctgtgaataatccctaaaattaaagaactgaaagcaattcacaactaagattataaaaggatttaaaacagttcccctgtgaataatccctaaaattaaagaactgaaagcaattcacaactacttatttgctctttaatgtggtctaagacctgtgaataatccctaaaattaaagaactgaaagcaattcacaacgccatagcctttaatgccgctgcgtgtatacctgtgaataatccctaaaattaaagaactgaaagcaattcacaacctagtttgctttagtttggatattttttgtcctgtgaataatccctaaaattaaagaactgaaagcaattcacaacttacccttttaacgtatgcgcaggatttaacctgtgaataatccctaaaattaaagaactgaaagcaattcacaacacaaccacctctgataggtagttgttcagcctgtgaataatccctaaaattaaagaactgaaagcaattcacaacacatcatatacaccattgaccgaaagctcgcctgtgaataatccctaaaattaaagaactgaaagcaattcacaacgccaaactcattgaacttcctaaaagggtccctgtgaataatccctaaaattaaagaactgaaagcaattcacaacgatgttctcgtcgtttacttttaccatggtcctgtgaataatccctaaaattaaagaactgaaagc

SEQ ID NO: 1275 - DNA, 20393 bp, synthetic construct
  misc_feature 1..20393: note = Synthetic
  source 1..20393: mol_type = other DNA
gttttcggcctatatgtttttcatgatgttcttcttcatcgtcatctattgtccgttggcccatatcacgtggcatcccgagggactgttcatgaaatggggtgtggtcgactttgcgggcggtatcgtggtgcatgcttccagcggtgtggctgctttggccggtgccatctacttaggccgtcgtaaggctgagacgcgcaagagcgaacccgccaatattcccttcgtgctgctcggcgcggccatgctgtggttaggctggttcgggttcaacgccggttcgtcgcttcatgccgacggcgtagccgtcaaggcattcctgaacacaaacacggcttcggccacggccatgatgacgtggattttcttcgactgcctgcgtggtcgcaaaccgtcggccatgggtgccgctgtgggttgcgtggtcggtctggtagccattacgccgtcggcaggctatgtcaccgtaggccagagcatcttcatcgcgtttgtcatcacgctcatctgcaatgtcgccgtgtattggcgttcgcgcaccagtattgacgatgcactcgacgtgtttcccacgcatggaacgggcggtatcttcggcacggtgctcacgggtatcttcatccaggagggtctcattgccggcacgtgggagggattcgttgtcttcctttaccacctgctcgccatcgtcatcgtgtttgtctatacctttgccatgagttggataggatataagctcatcgaccacctcattcccatgcgagtgtcggcctacagcgaaaaggtgggactcgacttctcgcagcacgacgaacactatgggctggcccacatcggtgaaagggaactggctgagtatgaggagcatctgagggagaaaataaagagtgaaaagtaaaaaactgaatatgaatacgaagtacatctttgttacgggcggcgtggtttcctcgttgggcaagggaatcatctccgccagcataggcaagttgctgcaggcacgcggctacaaagtgaccatccagaagttcgacccctacatcaacatcgacccaggcacgctgaatccatacgagcacggcgaatgctatgtgaccgtagacggcatggagaccgacctggacctgggacactatgagcggtttacgggcatacacaccacacgaaacaactctataacgacagggcgcatctacaagaccgtcatcgaccgtgaacgtcacggcgactacttaggtaagacgattcaggtagtaccccacatcacggatgagatcaaacgacggatgctgcgaagacccaccccccaacccctccctgcgaaggaggggagtggttaccttggaggcggagtcactgcggaaggactatctactcccctccctcgcagggaggggcaagggggagagtcttttgactttgtcatcaccgaggtgggcggcacgattggcgacatcgagagcgcgccgttcatggaggccatccgacagttgcggtgggagttggggcgcgatgccgtatgcgtacatctgacatacgtgccctacctgaaagccgccgacgagctgaagaccaagcccacccagcacagcgtgaaagagctgcaaggcatgggaatacagcccgacatcctcgtactccggaccgaacgtcacctcagcgatgctattcgcctgaaggtggcgtcgttctgtaatgtcgacttggagtgcgtggtgcagagcgaagacctgcccagcatctacgacgtgcccgtgaacatgcagcaccaaggactcgatgccgccatcatgcgtaagataggaatccccgtaggcgaaacgccagccatgaaaccttggcacgacttcctcgacaaacagcgcaaggccaccaaggaggtagacatcgcgctggtgggaaaatacgacctgcaggatgcttacaagagtattcgtgagagcctgaacctggctggtatatataatgatgtaaaggccaggctgcacttcgtgaacagcgaggagctgtcggcagagaacgttgccacccgactggcggacatggcgggcatcgtggtttgtccgggcttcggcagccggggcattgaggggaaaattctggcagcggcgtatggccggacgcatgatgtgcccaccttcggcatctgtctgggcatgcagatgatggtaattgagttcgcccgtaatgtgctgggctatcacgacgccaacagcgcggagatgaatcccggcacgccgcataatgtcatcgacatgatggaggaacagaagtccatcacccagatgggcggcacgatgcggttaggtgccttcgagtgtgaggtattgaaaggtagcaaaacttttgaggcatactcgcagtcagaactgtctactcccctcgcttgtagagaggggctgggggagagtcttctgattagtgagcgtcatcgccatcgctacgagttcaacaaccagtatcaggaggaattcgaggccgcaggtatgaagtgcgtaggcatcaaccctacggctaatctcgtggaaatcgtagagatacccgacaggcgctggtacgtcggcacgcagttccatcccgaatattcctctacggtactgcacccgcatccgctcttcatgagcttcatcatggcttgtataaaaacaacggattgcacggattgtacggattctaagtgcagaaaaaatccgtaaaatccgtataatccgttgttaaaaagaatatatgtatggaagagttgaagcatgagtgtggagtggcgatgattcgcctgttgaagccgttggactactacgagaagaagtatggtacgtgggcttacggtttcaacaagctctatctgatgatggagaagcagcacaaccgcggacaagaaggtgctggcatcgcctccgtcaatctgacgaacgaagccggcacggaatatatgtttcgtgagaaagccgagggaaaggacgctatcacggaggttttcagtcgcgtgacggaagagatgaagggcgaactactgatgggccacctacgctattctacgactggcaagagcggactgacgttcgtacatcctttcctgcgtcgtaacaactggcgggcgaagaacctctgcctgtgcggcaacttcaacatgacgaatatcgacgaggtcttccgcttcttgacccagcagggacaaagtccgcgtatctatggcgactcatatatcacgctcgaactgatgggccatcgtctcgaccgcgaggtggaacgactctttcaggaagccaaggaacatggattgcagggaaccgacatcacggactatatcgacaaccacgtggagatggccaatgtgctgaagaagacgatggagcactacgacggcggttacgtgatgtgcggactgacgggctctggcgagatgttcagcgtgcgcgacccttggggcatccgtcctgccttctggtatcaggacgatgaaatcatcgcgttggccagcgagcgtcccgtgctacagaccaccttcgacctgcaagtcgaggacatccgcgagttacagccaggtcaggcacttatcgtccgtaaaaacggcgagagcaaactggagcagattatgcctgcacagcagttgagtgcctgttcgttcgagcgcatctacttcagtcgtggctccgaccgtgacatctacctggagcgcaagcgtttaggcgaacagctcacgcccgccatcctcaaagccatcgatggcgatgtggacaataccgttttctcctatatccccaatactgccgaagttgcctactacggtatgaccgacggcttccgtcagcagggcttcaatgtacgcacggagaaggtggtttggaaggacatcaagatgcgcacatttattgccgtcaacagcgagcgcaacgacttggctgcccacgtttatgacatcagctacggctcgttgcgaccctacgaggacaatctcgttattatcgacgactcaatcgttcgcggcacgacattaagagagagtatcttcaagatactcgaccgcctgcaccccaaaaagattgtcatggtcagtagttcgccgcagattcgctatcccgactactacggcatcgacatggcgcgtctggaggagttttgtgccttccgtgccacgatggctcttatcgaggagcgtggcatacagcaattggtgaacgacacgtatctcgcttgccagcaagagctggcaaagcccaaggaggagatgcgaaactgcgtgcgtgccgtctatgagcctttcaccgtcggcgagattaaccagaagattgtcgagatgttgcgccctgccgatatgcagacacccatcgaactggtgttccagagcatcgagggattgcgcgaggcatgccccgatcatccgggcgactggtactttacgggccgctatcccacaccaggcggcaacaaactggtgaatcaagccttcgtgaattatgttgagcagcaattaaagagataatatatcaatgagacaagcaagattaatccttgaagatggtacgacgttctgtggctggtcgttcggatatgacgctcccacggcgggcgaggtggtgtttaacaccgccatgacgggctatcctgagagcctgacagaccccagttatgcggggcagatacttgtgaccacatttccgctgataggcaactacggcgtgccaagcctcacccccaacccctcccgcagaggggaggggagtatatacctccagcgcggagaaacagtggaaaaaccatcgaaagtggtaaccactcccctccccctcgtgggaggggacgggggtggggctgtccttcccgttttagagagcgaccgcatccatgccaaagctctcgtcgtggccgactatagcgagacgtattcgcattggaacgcaaaagagtcgttggcttcgtggctaaagcgtgagaaggtgccaggcatcacgggcatcgacacccgtcgcctgacaaaggtgctccgtgagcatggcgtgatgatgggaaggataagcctcacccccaacccctctccaataggcgaggagaatgattacaaagaatacggtagcgtgaattgggtagagcaagtgagctgtaaggaggtgattacctatcagccagattcttcactcttcactcttcactcttcactccctcgcgtggtgctcgtcgattgcggagtcaaggccaacatcatccgttgtctcgtcaggcgtggcatagaggtagtgcgtgtgccctgggactatgacttcaatcagttggagttcgacgggctgttcctggctaatggtcccggcgacccggaccggtgcgaggctacggtagcccatattcgtgagttccttcatagtgaaaaggtgcgcccctgcatgggtatctgcctcggcaatcagctgttggcaaaggccgctggtgcgaagacctacaaactgaaatacggtcatcgctctcataaccagcccgtgcggaaagttggcaccacccaatgcttcatcacctcgcagaaccacggctatgcggtcgatgactcgaccttgcctgaggactgggagccgctgttcgtcaacatgaacgacggctcgaacgagggcattcgccacaagacgaggccctggatgtcggcacagttccatcccgaggcctgttcaggacccgtcgacacggaatttctcttcgacgagttcgtaagaagcctcacccccgacccctcccgcgtgggggaggggagtagatactctcaaaccggaggtgaaatggaaaaagtaaccactcccctccccctcgcaggaggggtcgggggtggggctaaggtactcattcttggctccggtgccctgaagattgggcaggcgggtgagttcgactatagtggtgcgcaggccctgaaggcgttgaaggaggagggcatccattcggtactcatcaatcctaacatcgccacggtgcagacctcgaaggacgtggccgataccgtttatttccagcccgtcacgcctgagttcgtggagcgcatcatcgagaaggaacgccccgacggcatcctgctctcgtttggcggacagacggcgctgaactgcggcgtcaagctctatgagaagggggtcttggagaaatacggcgtcaaggtcttgggtacgccagtgcaggccatcatcgacaccgaagaccgcgacctcttcgtgaagcgcctcgacaagattggcgtgaagaccatcaagagccatgcctgttctactgtcgaagaggtgcagaaagcggcgcatgaactgggatttcctgtgatattaagagccgcatacgcccttggtggattaggctctggtttctgcgataacgaggaagaattgttggcacaggccgaggaagccttctcgttctcgccacaggtgttggtcgagaagtcgttgaagggctggaaggagattgagtatgaggtggtgcgcgaccgtttcgacaactgcattaccgtctgcaacatggagaatctcgacccgctgggcatccataccggcgagtcaatcgtcgtggcgccgagccagacgctcaccaactccgagtatcacaagctgcgtgccctggccatcaggattatccgccacataggcatcgtgggcgagtgcaacgtgcagtatgccctcgacccgcagtcggaagactaccgcgtcatcgaggtcaatgcccgcctgtcgcgttcgtcggccctggcatcgaaggccacgggctatccgctggccttcgtcgccgccaagctcgggctgggctacgggctctttgagttgaagaactccgtcaccagaaccaccagcgccttcttcgaacctgccctcgactatgtggttgtcaagattccccgctgggatctcaccaagttccatggcgtgaagcggcagctcggctcgtcgatgaagagcgtgggcgaggtgatggccgtcggtcgcaccttcgaggaggctttgcaaaagggactccgcatgatagggcagggcatgcacggcttcgtggagaaccacgagataaagattcccgatattgagaaatccctccatgagccaacggatatgcgcatcttcgtggtgtcgaaggcactggagatgggctatactgttgagcagattcatcagttgacgatgatcgactgctggttcctgcaaaagctgaagcacattgtcgacatcaatcatcggctgaggcagtatgtccaggtctcggagttcctccagttcatggacaacaccgaactcttggaataccttgaggcccctgagttcgtcggcctgcttcgcgaggccaaggtctatggtttctccgacttccagataggccgtgcgctggggctcgaagcctttatgaacatgaatgaggccggtctcaccatccgctcatggcgtaaggagtttggcatcttgcctgtcgtcaaccagattgacaccctcgccgccgaataccccgcccagactaactacttgtatttatcctacctgtaattttttcattatccattaagaatatgtgtggaatcgtagcaatactgaacgttcggaagcagacttctgaactcagagagaaggcattgaagatgagtcagaaaatccgccatcgcggtcctgactggagtggaatatactgtggcggttcggccatccttgcccatgagcgactgagcatcgtcgaccccgaatcaggcgggcaaccgctctacagccccgaccgtaagcaggtgctggcggtgaacggcgaaatctataaccatcaggagatacgtcgccgctttgccggacagtatgagttccagacgggctccgactgtgaggtcatcctggcattgtatcgtgagtttgttagtggtttaggagattcgtcgtttagtcgtttgggagattcgtcgtttagtcgtttagaagattcgtcatttagtcgtttgggagattcgtcgtttagtcgtttaggagattcgtcgtttagtggtttaggagattcgtcgtttagtcgtttagaagattcgtcgtttagtcgtttgggagaagttactaatatccccaaacaaccaaacgaccaaacgaccaaacgactaaaggacttcctcgaacagctcagtggtatttttgcttttgtactctacgacgaggagcgcaatgagttcctgatagcccgcgaccccatcggcgtgatacctctttatatcggttacgacagcgacggtacggtctatgtggcctcagagttaaaagcccttgaaggacaatgcgaacgctatgaaccattcccgccgggacactacttgtttagtgaagagttaagagtgaagagtgaagaatttgcttccgctcagcccgattcttcactcttcactcttcactcttcactaaacaaatactacagtcgcgactggatgcagtatgatgctgtgaaggataaccctgcgagcgtcgaagccatccacgacgcattagaagatgcggtgaagcgtcagttgatgtccgacgtgccctacggcgtgctgttgagtggtggtttggactcatccgtcatttctgccattgccgagaaatactctgagatgcgtatcgaggacgattcgaagacgaaagcctactggcctcgtctgcactcgtttgccgtaggactgaagggggctcctgatctggctaaggcaaagctcgtggccgaccacatcggaactgttcaccacgaaatcaactacaccattcaggaggggcttgatgccttgcgcgacgtcatctacttcatcgagacctacgacgtaaccaccgtccgtgcctctacgccgatgtacttgttggcgcgtgtcatcaagtcgatgggtatcaagatggtgctcagcggcgagggtgccgacgagattttcggtggttatctctatttccataaggcacccgatgccaaggccttccacgaagagaccgtgcgcaagctctcgaaactctacctgtacgactgtctgcgtgccaacaagagcctgtcggcttggggtgtcgaggggcgtgtgccgttcctcgataaggagttcctcgatgtggccatgcgcacaaacccggaggccaagatgtgccccggcactacgatggaaaagaagattgtccgtgaggcctttgccgatatgcttcccaaagaagtcgcctggcgacagaaggagcagttcagcgacggtgtcggctattcgtggattgacacgctgaagcgcatcaccgccgaagcagtaagcgacgagcaaatggcccacgcagccgagcgtttccccatcaacccgccactcaacaaggaggaatactactaccgtagcatcttcgaggaacattttcccagcgaatcggcagcacggagtgtgaaccaggaagcctcagttgcctgtagcacctctatcgccctcgaatgggatgccgctttcaagaacatgaatgatccctccggccgcgccgtcaagggcgttcacgagcaggcttattaattaaccacaacagattttacgtatttaaccacaacggatttcttgctaccatcgggacgcaagaaatccgttgttttttatactttaaatgagacgaacggaagtagtaaatcaatatgccgttcaagatacctttctatattaatgtaatgaacgaggggataagactatgaatgaaacggcacgcaggcgactacgatgatttcgtctattgtgacaaagagatgaccgacgaatacaccccgaaagcagaggcgttcatacaagcgataaaggaactcttagaaggcaaatagaacatcagcgtctttcaatcacaacagcatgcgtttttctagtatttgggtataaaaaatccaccgttgaaggacgatggattaggacctgatgttttcacaacggaataatccttattgtgatttgctaaaaattagtgctgcaaagataaacttttctttttgaatcaccaaataattcaaaagaaatttgtacttttgcggcaaaataacaaaaaacgtaataactatgaaaaagatattaggtctcgatctgggtacaaacagtattggctgggcagtggtaaatgctaatgaaaccatccgtgataataacacaacatacctaaaacccattagcatcagttctgcaggaagtagaatcattccaatgtcagcagacattttaggagattttgacaaaggaaactctatatcccaaacagctgagaggacaagactcagaatggctcgacgcatacatgagcgatgcattctacgccgtgaaaggatgctacggacattgaaaaccatgaaattcctgcctgaacattttgcagaaaagatagatcaattcgggaaattcgttgatgacagtgaacctaaaattgcttggttgaacaaaggaaacggaaattgcaacttcctgttccagaattctttcaaggaaatgctagaagactttgctgtccatcagccacaattggtagtcgatgggaagaaagttccatacgattggactatctattatcttcgcaagaaagccctgacccagcaaatcaccaaagaagaacttgcatggattttgttacaattcaaccaaaaacgtggttattaccaattgcgtggcgaagaggaagaggagaaatccaacgaaagcattgaaatcatttcagccaagattctgtcagtagagcgtaaagagaaggacaagaaatatgagaaatattggtacgagatgaatcttgacaatggaatgacctatcgtgccacattttataatgatgtttcaaattggcaaggagaaaccaaggactttgtcttgaaaacgacggttctgaaagatggcagcaccaaaaacgaactatctttccttccgacaacagacgagatagaaaggatggatccccagagaaaggccaagatgtatgccaaaatcaaactgcgtacagagaaagatattgaaaactgcaaagaaacagtaggcagctacatctatgaccatcttcttcaagaaccagaccagaagattatcggcaaattagttcgtacagtagagcggaaattctataaggatgaactcgtcagaatcttgaaggttcagcaagaattgattcctgaactaaaagacgttgaactatataacaaatgtatagagctgttgtatcccagcaacgaagctcatcgtaataacattgccaaaccagattttgtcaacctattcgttaacgacatctttttttatcagcgtcctttgaagagtaagaagtctcttattgacaattgtccctacgaatttcataaggacaaggatgggaatatctatcccattaaatgcgttgccaaatccaatccacttttccaagaattcagactatggcagttcgtccaaaacttacgtatctatcaacgtgagagaatagtaagtgacggtcaactggacttgtttagcaacacagcaacaggaaagttgcaaacagatgtagatgtaacggcagaaattctcagaactgaggacgattatgtaaaactttttgattggcttaataacagaagttccatcaagcaggacacactgctcagttcctacttcaagataaagaaagagaaaggtaaggacaaatatccctatcgctggaactatgtcgaagacaaagaatacccttgtaatgagacaagggctgcaatgcttaatgggtttgagaaatgtggtatcagccctgagattctgacacaggacttagaaatggctttatggcatatcctctactcggtagaagataaaatagaaataagcaaggcattgagaacctttgccaacaaaaaaggacttgatgacaacttcgtagaggtgttctgcaagatgaaaccatacaagaaagaatacggttcgtattctgaaaaggcggtacgcaagttacttccacttattcggatgggcaaatactggagcaaagacagtattgatgccaagactttggaacgcattggcaaagtcatcactggcgaatacgacgaaacaattaagaaccgtgtgagagaaaaagctattagctttactgacattgaacacttcaaaggtttaccaatatggctggcatgctatattgtctacgaccgtcattcggaagctaaagaaattgaaaaatgggagagtccagaggatatagaccattatctgaagaacttcaagcagcattcccttcacaaccctattgtcgaacaagtcattacagaaacgctgcgcaccgttcgagacatctggaagcaagaaggcaatatcgacgagattcatgtagagcttgggcgagaaatgaaaaacccggccgacaaacgtaaacggatgactgaacgcattcttcagaacgagaacaccaaccttagaatcaaggccttgctgatggagtttcttaatccagagatgggcatcgagaatgtacgtccttactcaccaagtcaacaggacatactaagaatctatgaagaaaatgcgcttgacaatcttaccaaagaggatgaagagtatgagtttgtttcaagaatgtccaagacggcccagcccactaaagcagatgttatccgatacaagtgctggctggagcagaaatacaggtctccctacacaggcaagatgattcctttgtccaaactgttcacacctgcatacgagattgaacacattattccacagtcacgctatttcgatgattccttcagtaataaagtgatatgcgaaagcgaagtaaacaagctgaaggaccgtcaactgggctacgagtttattaaaaattgtgcaggtcaaattgtacagcttagtcaaggtggctgcgtggagatactgccattagacaaatatgagaaattagtaaaagacttctatgcaggcaatcgaacaaaaatgaagaaactactgatggaagacataccagacgacttcatcgaacgtcagatgaacgacagccgatacatcagcaagttggtaaaagggcttctttcaaatatcgttcgtgaaaagttggaaggcggtgaatatgaacaggaggccatttcaaagaaccttatttcgtgcaatggctccgtcactgaccgattaaagaaggactggggcatgaacgatgtatggaaccatatcatcttgccacgcttccagcggttgaatcaattgacagaaacgacgaacttcacaactctaaatcgagaagggcacgagattcccaatatgcccttagagttgcaaagaggattcaacaaaaaacgcatagaccatcgccaccacgccatggatgctattgttatagcatgtaccactcgtgatcatgttaacctgctcaacaacgaagctgctcattctaagcacaacaaaaacaggtatcaactgcaacgtaaactcaggagatatgtcacacagactattaacgggaaggaacacgagttcgcacaggagtttttaaagccttgggattctttcacaaccgatgcacggctggtgttgcaaaacattatcgttagctttaaacaaaacctccgcgtcatcaacaagactacaaacttctatctacactatgatgaaaatggaaagaagagatacctgaagcaaactcatggtgacagttgggccatacgcaagtccatgcataaggatactgtctttggtgaagtaaatctgcgaaaaaagaaaactgtttcattgaatgaagccatccaaaaacccgaaagcattgtcaacaaagacttcaagaaaaaggttaaagaccttttggccgaaggacgagatgcaaaatatatcaagaaattcgttgaagacaacaaggatgcttgggccgatattaatactgcaaagattgaggtttactatttcacgaaagaagaaaagaaacggaatggcgaacccaaggaacgctattttgcaacgcgaaagcctcttgacagttcattcgacaaaaagaagataattgaaagcgtcaccgatactggaatccaaaagattctaatagcacatttagaggcaaaggacaacaacccagaacaagcattctctcctgatggcattgacgaaatgaaccgcaatatcattgccttgaataacggcaaattccatcaaccaatactgaaagtgcgagtttatgagaaagcagataagtttgctattggacaaacgggaaacaaaagccagaaattcgtagaggctgccgatggaacaaatttattctttgccgtttacaaaaccggagataatcaacgtgtttttgcgaccattcctttagctctatccattgaatgtcagaaagatagccctaataactggataaaacttctcgatgaaagacttcgagacaagtctcccatagagagattgcaaaagtatcagaaactggaaatcccaaaggatgcaaaagtgttatttattctttccccaaataatctgatatatgtccctactgataaagaaatagaaaatggaatcaaacaaattaatgttgacagaatctacaaaactgtcagttttaacaagaaacaatgcttttgcgtaaagagtcatgttgcaacacctattgtaaacagaatcgaatatacaacatctaataaaatggagcgtgcaattactggcgagatgattaaagagacatgcatacctatcaaggttgacagacttggcaatattatcaagattgggtaaattctattcagcctatgatcaagaagaccctatgtttcaacaatcctgcctatctctctctgcgcgacgggcagttggtcatcaaactgcccgaagtggagaaggccgacaatctcacggaggacttcaagaaatccactgaggtgacacgtcccattgaggacatcggcgtggtggtactcagccataagcagattaccatcacttctggtgcgctcgaagcgttgttggagaacaactgcgccgtcatcacctgcgactccaagtccatgccggtaggacttctgctgcctttagtgggcaacaccatacagaatgagcgatttcgtgaccagcttgatgcctcgcaacctttgcgcaaacagctctggcagcagaccattcaatataagattcgtaaccaggctgctgtactcagtcaatgttctaatacagaaaccaagtgcatgcaggtatgggtcaacgacgtgcgtagcggcgacccggagaacttggaggctcgtgcagcggtctattactggaagagcctgtttgggcatgtacccgggtttatcagggatagggatggcatagcacccaataatctgctgaactatggctatgccatccttcgtgctgtagtggcccgctcattggtggcaagcggtctgctccccaccctcggcattcatcatcacaaccgctacaatgcctattgcttggccgatgacatcatggagccataccgcccctacgtcgaccgccttgtctacgacatcacagagcaatacggcgtagatgtggagctgtcgaaggacatcaaggccgaactactctccatacccactcttgatgtggtgattggtggcaagcgaagtccgttgatggtagcaaccgcccagaccacggcctctctttataagtgtttcagcggcgaactaaggaaaatagcttacccggagatgtaatatgatagcagaacggttcaatgaatacagggttatgtggctcatggttttgtttgacctaccgacagagacgaagaaggatatcaaggaatacgccaagttccgtaaacgtctcatacaggacggtttcaccatgttccagttctccatctacgtgcgccattgtgccagcatggagaacgcagaggttcaccgcaagcgggtgaaggcaatccttcccgaattcggcaaggtcggcattatgtgcattacagacaagcaattcggtaatattgaactgttctatggcaataagcctcaacagcctaatgccccaggccagcaactggagctgttttagaaatggagattcctactcatcttgtaggaatctccattctcttagtggcattttttcttttctaattttctttgcaaccatctgattatcaactcattttcagaatccagatgtttatgccactgcaaaggtactaattttttagcaaatcacaacaatattctcgatgcttgtgttgttgtttatgatgtttatgccactgcaaaggtactaattttttagcaaatcacaactgacgttaagcatattaatgctatgattgagatgtttatgccactgcaaaggtactaattttttagcaaatcacaactgtacgctctttgatatactgataaacaggatgtttatgccactgcaaaggtactaattttttagcaaatcacaacattctcccttggtctgcgctcctcctaatgatgtttatgccactgcaaaggtactaattttttagcaaatcacaactgtatcatccactccttgttgctgagaatcgatgtttatgccactgcaaaggtactaattttttagcaaatcacaaccgaaatctgacggtctcgctcaatctcagagatgtttatgccactgcaaaggtactaattttttagcaaatcacaactagaacagcaaaagtatcataaatagtatgatgtttatgccactgcaaaggtactaattttttagcaaatcacaaccagggcgtggctgtcgctgtcattgtttatgatgtttatgccactgcaaaggtactaattttttagcaaatcacaacacacttcttgatatggattgctataatcaagatgtttatgccactgcaaaggtactaattttttagcaaatcacaaccggttgtattgggcgtttttcggttagccgatgtttatgccactgcaaaggtactaattttttagcaaatcacaactatcagcaactttggcgttattggcaaagtgatgtttatgccactgcaaaggtactaattttttagcaaatcacaacccatcagaactataacgttgcgccttggcggatgtttatgccactgcaaaggtactaattttttagcaaatcacaacgaggttatatttttgtaatagtctgtaacagatgtttatgccactgcaaaggtactaattttttagcaaatcacaactcgatggtgaagggtacgttgttgtttgaggatgtttatgccactgcaaaggtactaattttttagcaaatcacaacaacctgtttatttgatttcgaggaaatccagatgtttatgccactgcaaaggtactaattttttagcaaatcacaactctctgtagatgtaagtgtaggtctcgttggatgtttatgccactgcaaaggtactaattttttagcaaatcacaacatacacacggcttatggtgtagccgtttttgatgtttatgccactgcaaaggtactaattttttagcaaatcacaacgttagtcgttcattccgcatggccaaacaagatgtttatgccactgcaaaggtactaattttttagcaaatcacaacatactccacctctgcccagacaaagttagcgatgtttatgccactgcaaaggtactaattttttagcaaatcacaacgttatggctccaaggtattcatttctccagatgtttatgccactgcaaaggtactaattttttagcaaatcacaacaataaaataggtattgcaagcgcaaagtctgatgtttatgccactgcaaaggtactaattttttagcaaatcacaacagtattaacccccgttaagtatattgtcgtgatgtttatgccactgcaaaggtactaattttttagcaaatcacaacctattaagcgcagttattactgccgacaaagatgtttatgccactgcaaaggtactaattttttagcaaatcacaactacggagagagaaaaaaacgcgcgcgcgtgatgtttatgccactgcaaaggtactaattttttagcaaatcacaactatgcccactctgccaggctctcggcgtccgatgtttatgccactgcaaaggtactaattttttagcaaatcacaacttgcctttgagtatggagaaacaacctatcgatgtttatgccactgcaaaggtactaattttttagcaaatcacaacaggaattgcgttcacagtcaaagaatgcaggatgtttatgccactgcaaaggtactaattttttagcaaatcacaaccaatgatatgacgttaaaggattcctttgagatgtttatgccactgcaaaggtactaattttttagcaaatcacaacccaactctgttctgtatatagcgactcccagatgtttatgccactgcaaaggtactaattttttagcaaatcacaactgccttatgagcttctttggagtggttttagatgtttatgccactgcaaaggtactaattttttagcaaatcacaacatattaagagtgttcgtcctatgagtgtacgatgtttatgccactgcaaaggtactaattttttagcaaatcacaaccgttaacatcttctccagtctgagcggtaggatgtttatgccactgcaaaggtactaattttttagcaaatcacaactaaattaccctaagttaataacatcagcccgatgtttatgccactgcaaaggtactaattttttagcaaatcacaactcccgactctcagcgtacacacaagataccgatgtttatgccactgcaaaggtactaattctttagcaaatcacaacgctgatgacgagcaggaagcgcaactcgcagatgtttatgccactgcaaaggtactaattttttagcaaatcacaactgaaaataggcttttgtctaagaccttacgatgtttatgccactgcaaaggtactaattttttagcaaatcacaacatgctgcgtggattactgataatcatatccgatgtttatgccactgcaaaggtactaattttttagcaaatcacaacgtacttggtgttaccgtttacgtcgtggtcgatgtttatgccactgcaaaggtactaattttttagcaaatcacaacgtatgtgctgctcgaagccttcgcacaggagatgtttatgccactgcaaaggtactaattttttagcaaatcacaacgtcagctctaaccacatctttgcatagtctgatgtttatgccactgcaaaggtactaattttttagcaaatcacaacacgctccgtcatattatattcgcagtcgtcgatgtttatgccactgcaaaggtactaattttttagcaaatcacaacacgatataactctgcttgcgcctgctggcagatgtttatgccactgcaaaggtactaattttttagcaaatcacaacgacaaaacgaaatatgcccttgtaaggcttgatgtttatgccactgcaaaggtactaattttttagcaaattacaacaacttttgacgcgccctgctctgccgcaacgatgtttatgccactgcaaaggtactaattttttagcaaatcacaaacgaaatagccgcaaccattcttgcaaatcttggcattgtattaatacccaaacggacaaaaatattattacattctgccaatgactgccgatatgcgtatcagcagagcgaaaagacacaatcttttctcaatatagctgctgccatacttgcgtatttgcagaattatgactacatttgcaaaaaaaggaacgaatatggaaactctatttggaatcttattctggtgcgcagtcatctgccttgtggcaagatggtacgaccgccgtgcaaggagaagagcgtggaagccgaagaggaaaggtttccgtgagtcgctttgcgatggagatgtgacttatccaggctacactgtacgacataagaaatagcttttgcgcttgcaaatttgcagaattatgtctattcgtgttgaattaaaaagattaatagcccagcatagctgcaggcgttatccccaaggtagcacaaagcatacgggcaattttcagggtaggctcagctctgccagaaacgtagtcactgattcgggaaggactgactccaatcactgtagccaactgtttctggctcatcttcttctcgtccagcgaaagctgtatcaactgggccacggttggcttgcctatgggatagtgctctttctcgtagtcaatgacaacatccgacatcattgtcaactccacagcattacggtcgttgacaggcgtgttgtcatccaccatcggcaatagctcctctgcaatagtgcagaacagataatgatactcttctgagtgaagagcgagtttgtgaaaggtctgtcaataaaccaaagggataaggtggcagaagggtgacaggctaacagaggaaataagctggaagtggatgaattctcgagagaattgagcagttagaatgccttttagcaaaggcaaag

SEQ ID NO: 1276 - DNA, 20248 bp, synthetic construct
  source 1..20248: mol_type = other DNA
  misc_feature 1..20248: note = Synthetic
aggtcggaagtgtcggcagtgatgatggtgccgtcttccagttctattgcagccgaaggcgtaccgctctgcaagcgacgttcgtaggccgctacagtagtggcacggttggctgtagtgagcttcagctgcttcatgagcagcgcaatcttgaccacttcctcgttgcctttgcgaccatccagcatctcgcccaaagctgcataataacggcggataatctcttgcttcgatgcttcgcaacatacggagtcgtcggagatgcagaagccagccatgttcacgcccatatctgtgggcgatttatagggactttcaccgtaaatcgactcgaaaatggcgttcaacacggggaaaatctcgatgtcgcggttgtaattgactgttgtcttaccgtaggcttcaaggtgaaaatggtcaatcatgttgacgtcgttgaggtcggccgtagccgcctcgtaggctacgttgacaggatgtttcaggggaattgaccagatggggaaagtctcgaacttggcataaccagccttgacgccacggcggttctcaccccatagctgactcaggcacacagccatcttgccgctgccagggccaggtgccgtcacaacgactaatggccgtgttgtttctacaaaatcattcttgccgaagccttcctcggaatctatcaactcgacattggttggataaccctcaataagataatggtaatacacgcgcacgtgaccgaggcgttccaattgctcgcggaaagcaatggctgaggactgaccgttgaaatgggtgatcacaacggaactcaccagcaagccacggtctgagaacacatcccgcaggcgaaggacatcttccgtataagggatgcccaaatcactacgcaccttgttacgctcaatgtcctcggcagagatgacgataatgatttcagcatcgtccttcagctgcataagcatccgaagtttgctatcgggctggaagccgggcaacacccgcgacgcatggaagtcgtcgtagagtttaccaccgaactccatgtaaagtttgtcgccgaactgagcgatacgttccttaatgtgctccgattgaatgcggaggtatttctcattatcaaaaccttgtttcatagaacatcttatcttgaggtgagcgtctgaacatactaattttgggcacaaaggtacgcttttttggtggaaaagccaaataaacgtatatataatattatttttttctgcataaaaaggtctgtctttttatccgaatggctcttaggtaactgctacaacagtttgtccacaacaagctccaaagaaaaacgagctgatgccggagattaccttcaaagcactctcgtcgcaaagcttattttacaacaaaagggtcgcttcacagcgaccctattgcttcagtctttaggtattagtccgtttaaggtaaaaagattgtcttatttcaggataacggccacaaagataattgcaaatgcaataagttggagcgtttaaccacatgttttacaacatattttacaacaccctattcataagttctcactggcatgattgtggaaatcagccatcagctttatcggtgccttttctatacgcccgacaataaaatgttcgcattcagcagattgccgcaactcttgttcgaattgataagcaattcccccaacaaagttgacaggcaaatccggtcgctcatatttagctacattgcgaacaaaaaaatcgcaaaaagctcgatgaagcagctcctgaatgcggccatcagccctgttttcaacgagaaatggcactaaagaagccaaaaacttattggcttggggttttcgataaacagcttctatgattgaaccttgtgtaagcccaaaacgatcaagaaatgcagcgcgcaaatcgttgcccaagcatcctttcagagcatcgccgacaagacgacggcctaacacggctccgctaccttcatcgcccagaatccatcctaaaggcgacacattagctacaatcgactggccgtcatagaggcacgaattactgcccgtacccaagatgcaggcaatgccttcactcgtgccacacaacgcacgggctgcaccaaggagatcgctctcaacaacaacacggcttcccgtaaaagtctctgcgagcacccgctcaaccacttccttaaaaggctctatacatccggccccgtagaaataaatgctcagcgaaggtccccactgcggctggagcaggttcgcagggtctacggcaagaactgccgccaagctgccggccacaccttgcactacacgaagaatgtgggaagcttcatcgcggacaggatttatgcccacactctccaccaaaatatctgggctgccggctcggccaagcagccatgcggtcttactcgaaccgctatctactactaatcgcataatggtgtttctttaaccaaaagaatttaaggattatccattttcgtctacaaaattatacaaaagatttgatttgtgatcttttttccacataaaacaaggctttataagtgctttttactatctttgtgcccaaatatataattcatttctttatgaaaaagttccatttcatcatcaccgcagctttagcttctatgctacctgccaatgcagcacgtatcaactcgaataaagggctgcatgctctttctacggccactgattcaatcatacaaaactacagcgactcgctggcttcactcgtagagcgcctggatgaacagccaacaacggccacctcaccatcgccctatctctttcgtctcttaggacaaggcaccttgtataacagcgcactcgtccaacagatgtcccagcaacagcctgtcgccaaagccaacatactcccctctctcggatctacggacgacgatcagctgctactcgtagaggcctccaacaatcaattggcaagagcctacaccagctatcctcaactcttcaagaccacagagaatgtcctcacagagaccggaggactacgtaccgacatctcgcaaccgattgtcgaagagacaaagctcgccgagaagatcgtagaggagctgcccgacgtagaagttgaagaaattgagcccgaagtgaagaaacctaatttctggacttataaaggtaatggcggactgcaattcacccaaagctatttctccaagaactggtacaaaggcggtgaaaacagctacaccatgctcagtttgctcagcttcgatgccaactacaacaaccaacgcagggtacaactcgacaaccgtttcgaagcacgactgggattccagacgacaaacagctataaaccgaaattccgccccaccgacaaccttttgcgtttcacttctaacttgggcataaaggcaatcggcaactggaactattcagcacaactacagcttcagtcgcagccctacagaggctacgaagggagcagcaccaaggttatctccgacttcctctcaccgctttacgttcgttcgtctatcggtatggactttaacattaagaaagaacgcttcacaggaaagctgcacctcgcaccgctctcttatgtcatcacatacgtccacgttgacagccgcgtcacacgctatggcatcaaacaaggccacaattcaaaacatgaatggggtccaaatatcgaattcactttcgactacagaataacgaaagacatcttgtggaaatccagaacctattggttcaccacattcaagctcacacgtcttgaaatggaaaacaccatcaacttcgccatcaacaaatacctctcggcaaagttgttcgtgaacccaagattcgaagacacacgttactggggcaacgaagatgcccgacgcacccactggatgttgcaagaaagtttctcactcggtctcaactacgacttctaaatgattatcaacagcgccacatacctcaagagcagcgccttcatcagccaatgccctatcaacaacggattaccagagtacgcgttcataggacgatcgaacgttggcaagtcgagtctcatcaacatgctaaccaacaacaaaaaactggctaagacatcggctactcctggcaagacattgctcatcaatcatttcgagatacgctcctcagacagttctgccaccaagaagacagacacatggttcctcgtagacctcccaggctacggatttgccaagcggagcaagaccgaacgcacgaagttggagaacatgatatccagctacattctgcaacgcgagcaactcacaaacctttttgtgcttatcgacagcaggcatgccccacagcaagtggacctcgaattcatgcgatggctcggagagagcggagtgcctttctgcattgtattcaccaaggccgacaagctctccagacaggcacttcaaaagagcatcgagacttacctccaacgcctcgcagatgactgggaacctctcccaccacacttcatcacttcctccgagactcgcctcggtcgcgttgagcttctcgggtacatccagtccatcaacaacgggctcacacaagcttagcgaaacaaccattcaaggccacgccactgcctctttacctccacctacatctccaaaccgaaatttataatgacagtgctcggcgattccatcgccgagcaccaacacactaacaatagacaatggacaaaaacactatcacaggattcgtcctcatggccatcgtgctcatcctattctcttggtacagccgtcccagcgaggcacaactcaaagcacaacgcgagcgcgactccatcgctgccgcacaactcgaagcaaaacaacaagccgaagccgaacagaaagcaatcagcaattccaccgctgaagccaattctcacccactcgactccgcatccctcctcttcgctgcctcacaaggcacagaacagctcatcacactcgagaacgacctcgttcgcgtcacaatcaacacgcatggcggcatgatagaagaagctgagctcaagggacataaagaccaacagaaaaacaacgtacgcctcctcaccaagaaggacgccgccatgaccctctccctcgccggcaagcaggagaacatcgtcacacgcgacctctacttccaacccataacaaagagtgcaaccagtggctctgctgtagacaattccgtcacactccgtctacccctatccacaggctctctcgacatcgactacacccttcgtcccgacgcctacatggtcgacatggtcatccacgctaacggcattgccaatctgtttgcaccctcaatgcgcacgctcgacatccaatggaccgaccgcgcacgccaactcgagaaaggcttcgatttcgaacagcgctatgcctgcatccgttaccaccgtgcagacggtaaaaccaagaacctttccgagacctctgatcaggagaaagacatcgaagaagctctcgactgggttgcattcaaaaaccagttcttctcagctgtactcatcagccaacaggaacttaccaacgcccacctcaaatcccaaatgtataaaaagggacagggctacctgaagaactacgaagccaccatgcagacggctttcgacccctctggcgctcagcccacacaactccagttctaccttggtcctaacgacttccacaccctgaaggctcacaacaagctcagcctcgacggcaacaaagatctcgaactcgaagacctcgtatatctcggatggcctattgtacgatgggtcaaccgttggttcatcatctacctcttcgactggctcaagggcttcggcctccacatggggctcgtactcctcctcctgaccatcatcgtcaaggccctcgtctaccctgccaccaagaaaagctatttggccagcgcacgtatgcgagtacttaaacctaagatggatgccctcaatgccaaatatcctaaaccagaagatgccatgaagaagcaacaggagatgatgcagctctacagccagtacggcgtctcgcccatgggtggatgcttgccggcgctcatccagatgcctatctggattgccctcttcaacttcgtacctaacgccatcgagcttcgtggacagagcttcctctgggccgacgacctctcggcttacgacgacgtcatcagctggggcaaggacgtatggctcatcggcgaccacctcagcatcttctgcgtcctcttctgcatcatgcagattgtcaccacatggatcagcatgaagcagcaacagaacgctgccatgtcgcccgagcaggaacaaagcatgaagatgatgcgatggatgatgtacttcatgcccctcatgttcttcttcgtgctcaacaactacagctccggcctcaactactactatttcctctcgggtcttatcacagtcctcatcatgtggttcctccgcaagaccaccgacgacgacaagctcctggcgcaaatggaagcttataaggccaagaacgccaacaaccccaagaaagcatctggcatggccgcccgtctcgaagccctccaacgcatggccgaagagcagcagcgcctgcaacagaaaagatagctcttttcctgtacgccccagagcccagcgccaatccccccgataccgccctgcggctttgaacacggaaccaagcgtcaatgccccccgatagcgccctgcggttttaccgcagggttcctatacaataacaactcctctccgttggcctcggcggttccaccgtcgagcccttccccatccactcacccacctttccaacaatgaaaacagcattgaaaatcctctccgcctcagccatcctggccaccgtcgcccccctcacttcatgtacggaggacgttggcgacaacatcatccatcgtagcgacatcacccttgcctccgacaccctcacccccgaagccctgtgggccatgggacgcataggcagctacgccacttcgcccgacggcaagcacgtctgctaccaagtcacctattacagcgtcgaggaagaccgcagcaacaccctcctctacacccgtcctgtatgttgcgactctgtcgcaaccaacgacgaagaactcctcctcggcctcggctcctcccccgcctggctctctgatgactgcatcgccttctctcaaaacggcgagctttggactatgaacgccaacggcaagagccgcaagcagctcacccacaccgaaggcgctgtcgaaggcttcctcttctcgcccgaccagaagcgcgtcatccttatcaaggcagtgcccttccacgacatcatcaaagagcgccccgccgatttgcccaagagcaccggccgcgtcatcaccgacctgatgtatcgccactgggaccactacgtcgagagcatcccgcatccctttgtcctcgaccttgagagcggcgaagagttcgacatcctcgaaggacaacccttcgaatgtcccatggaacccttcggaggcatcgaacagcttgcttggagccccgacagcaagagcatcgcctacacctgccgcaccaaaacaggcttagccatgagcatcagcaccgactccgacatcttcctcttcgacgtcgaagcccgaacagcaaagaacctctgcaaacccgagggctatgttgaaccgcagattgagccctccaagacaatgaagttccaagaagtcaatgccgaagccaacctcgccaacaaccccggctacgaccagaatcccaagttctcgcccgacggacgctacctcgcatggctcagtatgccccgcaatggttatgaagccgaccgccagcgactctgcgtcctcgatctccagagcggtgagaagcgctatgtcaccgagtccttcgactccaacgtcgacgacttcgtatgggctgccgacaacaccaccttatattatataggtgtctggcacgccaccgtcaacctctaccgcaccaacctcgaaggccaagttgcccaactcaccaacgaccaagccgactggggcgccctgcaactggtaaatggcaaatctgattgcctcctcatggagcgccacgactacttccaccccgccgacctctacctcgtgacagtgctcggcgattccatcgcaaaggaatcccgcctcaccgccgagaacgaccacatcctctcgcagcttgccccaggctcatccgagccccgttggtgcaagaccaccgacggccagcagctcctctactgggtcatcaagcccccccacttcgacccctcgaagaagtaccccacactcctcttctgcgaaggtggcccccagtcgcccgtctcgcagttctggtcgtatcgctggaacttctacatcatggcatcgcagggctacgtcatcatcgcccccaaccgccgcggcctccccggcttcggccaggaatggcttgaagaaatctctggcgactggacaggtcaatgcatgcgcgactacctcagcgccatcgacgatgcttgcgactcgttgccctacgtcgatcgcgaccgcatgggtgccgtaggtgcctcgttcggcggcttcagcgtctactacctcgccggccaccacgacaagcgcttcaagtgcttcatcgctcacgacggagccttcaatctcgaagccatgtacaccgaaaccgaggaaaactggttctccaactgggagtacgacgacgcctattggaaccgcgaccgcacagccaatgccgaccgcacctatcgcaactcaccccacctattcgtcgacaagtgggacacccccatcctctgcatccatggcgagaaggactaccgcatcaacgccacacaaggcatgagcgccttcaacgccgcccgtatgcgtggcatcgaagctgagcttctcctctaccccgacgaaaaccactgggtgctccatccccagaacggcattctctggcagcgcacctacttcgactggctcacacgctggctgaagtaacgctaccatcatattaacatcacctcaagaatacctacaaggaagcatcccctcaacatcctttatactccgccgccagcacactcattgaagtgtctggcggcggatttttttacgttagcccttacgaacatgcgtgggggaataacatgaacgtctgtccatgtgacagacatttcgctaaagtcctgacttttcaaccaagaacattccagaagtcacgcggcaagctgatgttctccacgcctttggcttcaacaaacaacggcgcaatctcctcggcatcgaagccagctatgccacagccgatacgcgtgacgaggaactgcacttccctatgctcccgagcaaaagctatgaactcatcaacatagggcgctatcgtctctacgccgccctgcatcgttgggatgccgtaactctgtccctgcagtccaacaccctgtcccagcttggcaccgaacttcttcagcgcgatatacgcagctccaccgccgtgcataccggccagattactgccaaacacaaaaatctcattttctgccaaatccatgataaggtcaggcgtaatacgttttgcgtccattttgtctataataaaagtgataatctgtttttctgtcagcctatagatgtagtccgtcatgtcccaggcctcgtatgacatcgttgcctgtcatgctgcaaaagtagtgaatagcacacatttccgaaagcttttacatgaaaaaataaaaaatcaacacccagtttaaattcccacctcctcaagtcgttatgcagaaagcaaaaaggtgcaacattagatgtatccaaccattccaaggacatcgaaagtatggcaataaaaaaagcccccgttaaaggacgagggcaggaacctgaatgttttcacaacggaataatccttattgtgaattgctgaaattcgatggcaaaggtagatattatgaatgaataaacaaacttttcagcatacttttgacctccttcaaggttttttacttatttttgccctcaaaacattaactcatttaccgcatgaaacacatcttaggattagatttaggcaccaatagtatcggctgggctattgtaaacgcagaacaaattgttcgcgaggatgaaacgaattatctgaagcctgtgagtattagttctgcaggtagtagaattatcccgatgtctgcagacattcttggagattttgacaaaggcaattctatttcacaaacagcagaacgtacacggcttaggatggctcgccgacttagggagcgcaacctattacgccgtgagcggatgcttcgaacattgaagctcatggggttcttgccttcacactttgctaaggagattgatatttttggcaagttatttagcaacaaagagcctaagctagcctggaaaaagaatgaagagggcaaaaatttattcatttttcaggattcattcaatgaaatgttggaagattttgcgtgtcatcagcctcaattggttgctgaaggcagaaaagttccatatgattggacgatatattatctccgcaagaaagctttgactcaaagaattactaaagaagaacttgcctggattttattacaattcaatcagaagcgtggatactatcagttgcgaggcgaagacgaagaggatgataacacaaaacgggttgaataccttgctctaaaagtagaacgggttgaggcgacagatgaaaagagaggcgatgaagtctggtacaacgtttatcttgaaaatgatatggtctatcgacgtacaagtcgatatcctcttgattgggttggaaaagtgaaagagtttattgtaactacagaccttgagaaagatggtagtcctaaaaaagacaaggaagggaatataaaacgttctttccgcgcaccaaaagaagatgattggacattgttgaaaaagaagaccgaaaatgacattgaaaacagccagaagactattggctgctatatttatgacacccttttgcaaaagccaaatcaaaagattataggtaaacttgttcgtaccgttgagagaaaatactataaagacgaactgcttaggattttgagaaggcagcaagaactcattcccgaattgcaagatactgaactctataagaaatgtatagaagaattatatcccaataatgaaggacatcgtagtaaccttgccaaatctgatttcgtcaatctgtttgtcaatgatattctgttttatcagcgccctttaaaaagtaagaagtctcagattgaaaactgtccttatgagtttcataaaggcatagatgggaatttatatcctgtgaagtgtattgctcagtctaatcctttattccaagaattcaggctttggcagttcatacagaatctacgtatatatcaacgcgagagaatcatcaccgatggacaattggccttattcggaagtacacatacagggaagttacaaactgatgttgacgttacggctgagtttctcaaatcagaggaagattatgtcaaactattcgattggctaaataacagaaatgccatcaagcaggacacattgctcaattcttttttcaaaataaaaaaagaaagagggaaggacaaatacccctatcgatggaactatgtcgaagacaaagaataccggtgcaacgagacacgagcagcgatgcttacaggattagagaagtctggaatccgtactgatgttcttacccatgaaatggaaatggcattatggcacatcctctactccgttgaagacaaaacagaaataggaaaagcactaaagacatttgctaaaaagaacaaccttggtgaaatgtttgcagatgtcttctgcaagatgaaaccatataaaaaagaatatcgttcgtactcagaaaaggcaatccgaaaattccttccactcatgcgaatgggcaaatattggaacaaagagaacattgacgacaaaacattatcaagaatcgagaaaatcatcacaggagaatacgataaaaccatcaagaatcgagtgagagagaaagccattaacctaactgacattgaccacttcaaaggattgcctgtatggttggcttgctacattgtttacaatcgccattctgaagcaagagagattgaaaagtgggacaagcctgaagacatagatcgctatctgaactccttcaaacagcactctctaagaaatcctattgtcgaacaagttattactgaaactttacgcactgtacgtgatatatggaagcaggaaggtgacattgacgagattcatgtggagttgggtagagaaatgaagaatcctgctgataagcgcaggctaatgaccgaacgtattcaacaaaacgagaataccaatctacgaattaaagccttgttaatggaattccttaaccctgaactcggaatagaaaacgttcgtccacactccccgagccaacaggacatcttaaggatttacgaagagaatgctctggataatctcaccaaagaagacgcagaatatgaatttgttacaaagatatccaagatggctcaaccttccaaatcagacatcattcgctacaaatgttggttggaacagaaatacagatcgccatatacaggcaagatgattccactaagcaaattgtttacacctgcatacgagatagaacatatcattccccagtcacgctattttgatgattctttcagcaacaaagtaatatgcgaggcagaggtaaacaagctaaaggacagattgcttggatatgagttcatcaaggaacatgctggcgagattgttcaactaagccaaggagacacagtgaagattctctctgtggaggaatatgagaaattcgtaaaagattattatggctctaacaggacaaagatgaagaagctgttaatggatgatatccctgatggattcattgaacggcaactgaatgatagccgttacattagtaaggtcatcaagacactactttcaaatatcgtacgtgagaaattagagaatggagaatacgagcaagaagctgtttccagaaaccttatttcatgcaatggttccattactgaccgcctaaaaaaagactggggcatgaacgatgtatggaatcatattatcctgcctcgcttccagcgtttgaatgaacttacagggacgaacctctttacaactcaaaatcacgaggggcatgagattcctgcaatgccatttgaattacaaaagggattcaataaaaaacgtattgatcaccgccatcacgcgatggatgctattgttattgcctgtgcaactcgcgaccatgtcaacttactaaacaacgaagcggctcattctaagcacaacgctaatcgatatcagttacaacggaagctgagacgatttgcaaagattactatcgacgggaaagaacgtgagattgctcaagagttcttaaaaccttggcctactttcacatcagatgccttacgaacaatacaaagcatcatcgttagttttaagcaaaatttacgtgtcatcaataagacaacaaactcctatctgcattatgatgagtatggaaagaagatatatcataagcagacgcagggtgagagttgggctattcggaagtccatgcataaagataccgtattcggagaagttaatctgcgcaagaaaaaatcagtttcaattaaagaagctatcgtgaagccagaagccattgtaaacaaagaattcaaagaaaaggtaaaagaactcatcgctcaaggtcatgatgccaaatacataaaaaaatacgttgaggataataaagacatatggtcagatataaacccgtcgaagatagacgtttattactacacccgagatgaaaagaaacaaaatggcgaacccaaagaacgctattttgccacacgtaagccattggatacatcctttgaccagaagaaaatcaaagagagtataactgatacaggcatacaaaagatactattagcccatttggagtctaaaggaaacgaccccgaacaagccttctcacctgatggtattgacgagatgaatcggaatattgtgaccttgaataaggataaatttcatcaaccgattatcaaagtgcgcgtctatgaaaaggctgacaaattctgcatcggacagaaagggaataagaagaaaaaatttgtggaggcggctgacggaacaaatctcttctttgctgtttatgaaactgcagataagaagagagtgttcgcaaccatttcattaggcctatctatagattgccaaaaagaaggttcccaatattggattaagctacttgatgaaaggctaagagacaagacacccacagaagaattacagccttatcagaaaatggatattcctactgatgctcatttgttattcattctttccccaaatgatttagtttatgtcccttatgatggtaaacctacggatttaacgcaggttgacagggatagaatttatagggcggttagtttcaataaaaaacaatgtttctgcattaagtgtaatgtggccacccccattgtaaacaaagttgaatacacaacttcaaacaaaatggaacgcgccactaccggtgaaatgataaaagaggtctgcgtccccattaaagtagatagacttggcaacatcactaaaattggataagcatgaatgcaaacaacataactacctacaagcctgctgctgaaaccatcaagcaggctattcttcaaggccaatatgaggctgcaaagggcgttaaccgaatccagttagccgtatattttgctatcggcaaatatatttctctgaatacccgtaaaggtaaatggggaaccagtgcattggagtccatcagccagatactgcgtaaggagttgcctgggttgagagggttctcggcaacaaacatgaaaaatatgcgtactttttacgaagcgtggattatattaaatcccaattcgtcagccacggctgacgaattacaacaaattgatactgtagagattagtaattcgtcagccatgactgacgaattagactctaaggaatctgcagttgatatcaacgattttcaacgcacccatattgacatttatacggctatccaaataccagaaataaaaaacttccctattgatgactttttcagagttccattcactcatcatctcatgattattgagagagaaaaaacacttgaagggagatattattacatccatcgtactgcagaagagaatcttcagaaaagaacgcttgaaaagctcatcaaagaggatgcctatggtcatcgcgatgcgatgccaagcaacttttcacaaaacattcccgatgcaacactggctcgcaaagccgtgatgatgttcaaggactcctatctgctggacttcatcaacgtagagcagataggggaacgagaagctattgatgtggatgaacgagaggttgagcaacagattgtgcagaatgtcaagcagttcatcatgactttcggacgtgacttcacgttcgttggcaaccaataccacttggaaatatacggagtggaacatttccccgatttgctgttcttcaatcgcgaactcaatgcccttgtggtcgttgaattgaaaacaggagaatttaagacatcatatttaggccaactcatgggctacctctccattctggaagccaaagtgaagaaaccgcatgagaatccacccatcggcattgttctatgcaaagaagcgaatcgggaatatgtggagtttgtcatacgggattacgccaagcccatgggcgttgctacatataggacaacaaccgacatgccagaggaactgcggaataccatgcctgacatcgaagagctcaagaaactgttatgacctgcctatgatcaagaaaacgctttgcttctctaaccctgcttaccttagcctgcgcaacggacaattagtcatccagattcccgacgtggaaaagaatgaaagcttgacgcatgagttcaagaaaatgaacgagcgtacaatcccgattgaagacattggcgtggtggtgcttgacaacaaacgcatcaccatcactacgggtgccatggaagcgctcttagagaacaacgcagccctcatcacctgcgacagccgcagcatgcccgtgggactgatgctgccactctatggcaacacgctccagaacgaacgctttcgtgaacaactcgatgcctctctgcctttacgcaaacagctttggcaacagaccatccgacagaaaatagccaaccaagaggttgtgctgcgtcgtcataccgaggctgagacacgttgtatgcaagtatgggtggatgaggtgcgcagcggcgatgcagacaacctcgaagcaagagccgcggcttactactggcgcaacatattcccacagcttcctgacttcgtacgtggacgcgatggcgaaccgccaaacaacctcctaaattacggctatgctatcttacgtgccgtcatagcccgttctcttgtaggaagtggattattacctacattaggaatccaccatcacaatcgctacaacgcctactgtcttgcagatgacatcatggagccttacagaccctatgtggatgagctcgtcataaaaattatccataagtatgccgactattccgaactcaccaaagagctgaaagccgaactacttgcaatccctgtgctggacgtagtcattgacggcaaacgcagcccactgatgatagctgcaacgcaaaccacagcctcactctataaatgtttcagcggggagttgcgcaaagtgagttatccacaaatggaaggataaaactatgattgccgcagatgcctcacgtttcagtcagtatcgtgtgatgtggattctcgttttcttcgacctaccaaccgacactaagaaggaacgcaaagctgcagccaagttccgaaaggacatcatgggcgacggcttcactatgttccaattctccatatatatccggcattgcgccagtcgcgagaacatggacgtacacattaagcgtgtcaaagctgcattgcctgaatatggaaatgttggcatattgggaatcacggacaagcagttcgcagacattgaactattctatggcaagaaagagaaagcaccgtctactccaggacaacagcttgaactcttctgacgtacacatcaccttgactcttctttgcgatagcggattctgttttactctgcagaacccgctatcaaatcataaactttttttgaatcctaatttcatccgtaaatctttgacttatactatcttatacacatcgtggtgtttatgatagtgcaaagatgaagaatttcaagcaattcacaactggtactcgtagatgttaccccaccactgcggtgtttatgatagtgcaaagatgaagaatttcaagcaattcacaactttgttaattcctaatatttttgcaaaaaaggtgtttatgatagtgcaaagatgaagaatttcaagcaattcacaacggttgccatagctcgatacgaggtgactcgggtgtttatgatagtgcaaagatgaagaatttcaagcaattcacaacctgcatggcctcgccacgctcactcgcctgggtgtttatgatagtgcaaagatgaagaatttcaagcaattcacaactatttttctaagtattcgtcttttgataaaggtgtttatgatagtgcaaagatgaagaatttcaagcaattcacaactattcaaggtgaaggtatacaatttgaaacggtgtttatgatagtgcaaagatgaagaatttcaagcaattcacaacggccattggatcaaccatccttgattatcaggtgtttatgatagtgcaaagatgaagaatttcaagcaattcacaacgtgcgacaactgcgaggactatgagccggaggtgtttatgatagtgcaaagatgaagaatttcaagcaattcacaacggaggactgaactatggcaaggaaactatcggtgtttatgatagtgcaaagatgaagaatttcaagcaattcacaactgtacgcgagcagacatgatttttttcttggtgtttatgatagtgcaaagatgaagaatttcaagcaattcacaactgccataatgttaaaacagtttttggtcttggtgtttatgatagtgcaaagatgaagaatttcaagcaattcacaacaacaatgagtaaagtcaagtacagagttcgggtgtttatgatagtgcaaagatgaagaatttcaagcaattcacaacagtatgtcaaagatctcaatatgcctttaatgacttcgcaaaggtaaataaaaatattgaaaggtcatgagaatatagaaataaaagaataatagaaattagagaataatgagttccttagcctatatgaacgcaccagcaatgcctgtttgacatggttaacgttaatttagataggtttgccgcttatatcgatgaagaacctttggaacctcaaaaccatacagcagtatgcatatagctggaattccaggaaacaaagaaatacaatcagtagtatcagcctatacaaacggaagcatcaaacaacacaacctgaagaatctgcctatacaatcgcatgcatcaacctatacaaacagaagcactggttgttcagtcgtgaccgaacaacccgcatccttaaaagttttttcgccattgcatgcttccgagccctctcctctacattcgttcctgcaccacctatcagaagcatcaagtcatcccgcttcaccctatgtcccgaggtgctggagctacacaccacccctctggcacgttttataaatcgcctctggtataatcccaaggtctcgtatgggctctgtcagaagctgttatagcattgccattctcattctatgctttctatttcaacgccatccagccccgtcataaaatggagtatctgttctccgtatttgctacgcgatgtcttgagctccaatttcatcgtgtaacgtcgaaagactcggttggcggctttagtttccacggactcgccatcaaaagtactgtctccgtcaagagctatagctgacggcgataccgagccatcgggtgacacaacaggctgaggaccaaaggctttctcgctgagcgaaaagttagctatagccactccgtcgtccttcagatgctgcaaaacagcctgtaatgaagcacgatcgttggcacaaagggtgacgtcgatattgcgatggcctatatgaggcaacaaccagttgagggcctccaaaccgatgagtacgagcaatgttgtaaacgtggcaagcccatacattccggctcctgccgccatgccgatggctgccgtgacccataggcctgcagcagttgtgagcccgtgcaccatctggcgctgaaagattatcgtaccggcaccgatgaagccgatacccgaaaccacctgtgccgctatgcgggacacatctaaccgatgaccttcggtcgtaagagcaccgtcgaagccatgggccgacagtatcatgaacaaagcagcaccaagcgctacgagaaaatgcgtgcggaaaccagcttcctttgcacggtaaccgcgttccatacctatcgcaccgccaagaaacgctgctactgcgatgtgcaacaaaaaggttgtattcatagacataatgcttatttatatttgtacgccacaaaattagtaaaaccacacgttcagacaataaaaaaactggaaaaatatatattcaaccgccttggcgctaatataccaacgcccataattcacttaacatcgatattcacaccgtttttatctcttccgactttcttcctcattcctcctattatataataattaaatgtacgcgcgcgagccccgtctcccccgtccccttcgtgccccctcttttccctcttttccgatattttttgcaaaaaagtttgcgaaacgcttgcaggaatgaaaaagtcgccgtacctttgcacccgcaaacgagaaagggacacccctgaatcacaggggttgtgacttacgctcgcttcgcagtccgggcctggcgcccgggacgttctttgaaagattagctaataagacaaagtagtacaggaagcaagaaattgcaaccgtcatttctgatccgatacaggtcgctcttgtgaaggtgtcttcaatgatacagacaaccggtatccggtctccggcattccctccgtcccctgtctgcgccgccatcggcgtatggggtctggtccatgggagtccgtgagttccggttccgcacgat

SEQ ID NO: 1277 - DNA, 20228 bp, synthetic construct
  misc_feature 1..20228: note = Synthetic
  source 1..20228: mol_type = other DNA
cgcgaaaaaaataaccgagaaaaaaatgtttgttttcgtcgtaccgatcggccccaaattcaaagggaatagtttgtacaccacgttgtgaattgatggtttgtgcttctgaattttgttgggaaaacaccgtattcacatgcaattttccaaactgcaaatcggctttgatcccaaaaagtgccgcaccgccattgatcagcgagtttgaggtggtcatgctcacatttccggcttcgatgtgcttgatgatttcgtcctccttgccgtcgtaggccagtttgatgcgtttggcatcgaagtcgaacatggcttctgtatcgtaattgacgccgaatttgattttgtcgcccactttcacgtctgcgttcaattggatattttggtcgaaattgagcatcgttcgtttacgcgaatgttccggcaacaccgggttgtctgttaccgttcgtttgatgccggttgtcaggtcaatcgatccgtgagcgttgaattgtactcctcccgggccaaaaatttcgccaaggatattattggattttctcagagaagaaaacgagagtggttcgttctctttctgtttcgtttggtgattaaaggcatttttttctttgaaataattttgggtagccattcgcacgctgtaacgcgtatattcgtccggagtcatactgaaaggctcatcgatgaccgcattgccgatgatattgcgaaaaacgtagcgatttgttttcgggtcgaattcgactttggtttgaatattggaaggcgtttgcaaatcaacgggcgtagatgtggtaaggtcttccggtttttcgacgatggttttcctcacgggataccgtgtgtcggtactgtcttttgaggtattttcctgacaaaaaagattactgtttccgttgaatatcaatagaaacagaaaaaatatacttatgtgctcaaatcttttcagagaaaccgttttatcgattgacaaaaggcgcctgcgataagagggcgcatttctctgaaattacgcagttacaaccttttgagagcctccttaatgattgcttccaccggaagagacgatgattctttgagaattgccgaaaccactttttgcgaagcgacttgcggaaatccgagcatcacgagcgcagctattgcttcgtgacctgtgccggaaacatcggctttcgtgggtagttgcatgctgccttgcgaatcggtcatttttatcttgtccttgagatcgacaatgatgcgttgtgccgttttagctccgattcctttcacggattgcaataccgcaacgttttcggtggcaatcaccgattccagttcttttgcactcagcgacgacaatatgactctcgcggtactcggcccgacgcctgaaacacttatcaacaaaagaaaaatatcgcgttcgtgtttgtcggcaaagccgaaaaaaacatgtgcatcttcgcgaatgacttcgtggatgaagatttttgccgatttttcgccgttcagaatgctgaacgtattcagcgaaatattcgcgaaaaatccaatcccgttgcagtcaattgtaatggaagcaggtgtcagttcggctatttcgcctttcaagtaatctatcatcgtttctttcaaaaaaaaggtggaatattgcgtaattccgtactaataacggaaaaaacggcaataacgtatatttttcgtcatctttctttatcctgttttatcttaaatccggtcaacgaaaccgtgaacttcttatttccgtttaaaaagcattatgatcgaactcgtgtgttttcgccagtccgccttcgcctgtttctttgtagagcgacggcaagtcgtggccggtttgcttcataacggctacgacacggtcgaatgaaacgcgatggactccgtcggtgaatgacgaataaagattggcatcgagcgctcttgcggcggcataagcattccgttcgatgcaaggaatttgaaccaatccgcacacgggatcgcacgtcattcccaaatggtgttcgagtcccatttcggcagcatattcgatttgcgccggacttccaccgaaaagttgacttgctgcggcagcagccatagcacaggcaacgcccacttcgccctgacagcctacttttgcacccgaaatggaagcgttcgtttttaccgtgttgccgaacaagcctgccgtagcaagtgcccttagaattcgcatgtcgctaaattcgcgaatttcctgcaaatgatacagcactgcgggcatcacaccactcgaaccacaagtgggagcggtgacgatttccccgcctgaggcgttttcttccgcaacggcaagtgcatatgcaaagacgagaccgcgcgattgcagcgaagctttgtagcctttggctttgatgtagtagctcgctgctttacgatgcagcccaagcggacctggcagcacgccttcgttgtcgaggcctctttttacggcggcgcgcatcacgtcccacacgcgctgcagataattccaaatgtccttgccctcgcattcttccacgtattcccaataactttttcccgttttttcgcaccacgcaagaatttcggtgatggtattcatggtgtagatttcccgctcctggtcaggatcgagacccacgattttttctccgtcggaaagtgcaccgccgcccacactgtaaaccgtccacgaatctgcaactttttcgtcaggccctaacgcctcaaacttcattgcattcgggtgaaacggcaaaaatatttggggttgccattcgatggaagtgggcgctatcggattaagaactcccatgattgctgcatccgtgaggtggcctttgccggtggctgcgaggctgccgtaaagcgttaccacgaatcgcgaagcatgttgatttcgttcgaggaaaagttgagccgcttttttcggccccatcgtgtgactgctcgatggcccgtttccgatgcgatagagttgtttgagcgatttcattcgacttgattttttgtcaatacgtctccctgatatggcggatggttatcggagtcttttcggaagctttgagcttgggcgatgtgatttcgataacacgtttttcgccgggcatcaaatcgatgaagttatccgtaaatcgggcaccgagaacaggaatttcgataaacacatcttttgccagcttcgaacttgacagtgtaaccgtatatttgccgtcggcatagacgattttggaattcaccttcgtttcgggcagattgagtttgttcggccaataaaagaagtaatcttttgtagaaacgattttccctttcgcatcgcttaaccacgcatgaatgaccgtgtttgctttatcggattccgaaatcagcgacgaaacatcaatgctttttacgatttggctcgaattggcttttgcgttcactttttctttcaattccttcactacgcctttcgaaaaatcgattacttgaatggtcagtttcagattatcgacatcgttcaagtagtcggacatggtataataattcagcttgttgtcagcgaattttacgccaagtgcaagcggtgcaaacacatcgcgcatgcgatagtgttgcgccttccaattgttgtagtaatcgatgctcgaccacgaaaccacaggccagtcgtcgttgatttgccaataaagagctcccatgcagtaaggtctgccccgacgattggcttctacggcttcttccatgccgttgccctgcatcaccaagcccagatagacaaaatcttcgaagtttttcggttcatgaaaatacatatccatatattgcttgatgataacgttcccgacgccacttttctgatgaattttcattacatccgaattgatatcgaaatccttttcggtagcaaacgtgcgaatggttttcatctctggaaacgattgaaatccgaattcgcttgcgaatcggggaagtcgatcggacattgcctcgaatggcatacgtccgtgccacaatccccagtcgtgtacatcgctcgatttgaacgattctaattttccccaactcgaattgtagggcgaaccgtgaatatagcttcgtgtgccgtcgtattgcgacaacagatcgggaatcaaagttctgaaggttttatcatacccttttttccacagctccatcgtttcgggcgtattccttttgtcccagccccaatagcgcaagccctcttcgatctcgttgttaccacaccagaaagcgagcgaggcatgattgcgcaatcgtttcacgttgtaaatcacttcttcgcgcacattttgcagaaagacatcgtcggacgggtagggcgtacatccgaaaatgaagtcctgccaaacgagaatgcctttttcgtcggccagccgataaaaataatcgtcttcgtaagttccgcctccccacacgcggataaaattcatgttggctgaggtgatattatcgaacaatcgctgatagtaggtcgtatcctgttgcgtgcgaagaatttcgccgggaatataattggcgcccttggcaaacaacggaatatcgtttacttcgaaataaaacgattttcctgtttcgtcgtctttctgaatcagttgcactttgcgaagaccaacgctctctattttttcggcaattgtctgattgccaaacgaaagttttgccttaaagtcatataaatagggtttgccccaattaacgggcatccatcttttgggattatcgatttgaagcggaatcgataccgcatttttacccggattgagcacaatgtttttcgaaacggttttttgcgattcaccttttaaaccatattcaatggtaatgcttgcatcgacgggttgaggctctatagaataaatttcgatctgattattgatgatcgctttctcttttgttacggaagtttgctttacgaaaaaatcatcaatgcgtgctttatcgtaaaaggtgagagtaatcggtttccaaattcccatctgcaccaatcgcattccccagtcccaaccgaattggtatggcgctttccgactgtaaacgctgagtttgggcgtaccgtgatcgttatccgccggatagtcgaacccggccgtagctgctgccggcaacatgcgggtgatgggcgaaaaaaatcggatataaagattattttcacctttgcgaagaagatgctttaccgaaattttgtgaccgacaaacatgttttgtgattggagaatgcgcgatccgttgaggaaaacatcggcatgtgtgtccaacccttcgaaaaacaaaagggcatcatcgtgattgagcagctcttcggagagtgtaaacgattttttgaaatcccaatcttctttttcgggccattgaacctcattttcatttgttccgaaatagggatcgggaagcacgccatgacggatgagatcacgttggacagaaccgggaacttcggcatcgttccattggtttttaccggtttgcgaaaattgccagccgtcattcagcctcagcgtttctgctttgctttggccaaaaagcagacagggcaaaagggcgatccaaaggaaaataatcgatttcttcatgtttacgaattatatatcggtttacgaatattttgggggaagatggacaaatttcaataaaaaagcgaaatccgcgttttatgaactgctctcccgtaattgtccgcaaatatagccataagttaagaaattgccgtccaaaaaaagaataaaatgaactgatcttgcgaatgtgttttttacgttcatttgttctaataatgcgggaaaaattcttatttttgtttctcgataacgcatttttgcgacataaatttgctaaattacagaaatggccgaaaaaggtacaccaacattcaagcaatcttaccggcaactttattcgtttcttcgcaaaaaaatgaatagagaagaggtggcggagcttaaaaacattgtcgaaaaatcggtactctcggcattggaaagatccgaaaccgatgcattcgaaaagttgtgggccgaaattcgcacggcaatcacggctatcgaagagttgaatgtgcggcaacccgaagtttgtgccatcctgctctaccatcctattcagcgaggagattactctatggaggaggccgcaaaatcgtttggcgaagagactttcatcattttgcgcgggatcgaaaaaatcaacgaattcggcgataaaaaagctgcggtggaatcggaaaactacatcaagttactgctatcgatggcagaagatatcagggtagttttcattattattgcccaacatttgcgtcagatgcgcgaagccaaaaatttggataatgctgcgcgtttggccctttcggtggaatccacctatctgtatgcgccgctggcacatcgaatgggtttgtattccatcaaatcggagcttgaagacctttcgctcaaatataccgatcggaagacgtacgacttcatcgctcacaaactcaatgaaaccaagcgttcgcgcgaccggtatattcaggaatttatcgaaccgttaaagtcccgcctcgatcagacaggattgaagtacgagataaaggggcgtaccaaatcgatacattccatcaacaacaagctcaaaaaacagcaggtagaattcgaaggaatatatgacctgtttgccatccgcattatcctcgatgccccgctcgaacaggaaaaggcgcaatgctggcaggtttactccatcgttaccgatatgtatcaacccaatcccaaacgattgaaggattggctctccattcccaaaagcaatgggtatgagtcgctgcatattaccgtgttgggacccgaatcgaaatgggtggaagtgcaaattcgcacacggcgcatggacgaaatagccgaacacggattggcagcgcactggaaatacaagggtgtgaaagaagaaaccgaatttgacggatggctcaattcgttgcgcgagtcgcttgaagacaaggatgtagcgctcaaggaaaagctggtggattttcgtctcgatctttacgatgaggaaattttcgttttcacgcccaaaggagacctcattcggttgcccaaaggtgctacggtactcgattttgccttcgctatccactccaaattgggtgcaagctgcgtttcgggcaatgtcaatggcaagaatgtccccatcaaatatgttctcaaaagcggcgatcaggtttccatcaacacttcctcgcatcagtcgcccaagcaggattggctcaacatcgtggttacgtcgaaggccaaaagcaaaattcgacaactactcaaagaggaagccgccaagcaagccgatttggccaaagaaatgcttgcacgccgcatgaaaaatcgcaaaatagagatggatgatggcattttcatgcagcttatcaaaaaattgaaatacaaaaccgcaaccgaattttatgccgatatcgcttccgaaaaaatagatgccaattgggtgatcgaccgctacgtggaactcgaaaatcgggatacggcttcttatagcgctctgagcatggcaagtgccgaaaattttgttctcaatcccgatcggatttcggatgaacaggatgaactcatcatcgatcagaatctgacgggaatcgaatacaaactggccaaatgttgcaatccgattttcggggacgagatttttggatttgtttcttccaacggcattaaaatacatcgcgtcaactgtccgaatgccgaaaatatgttttcgcggtttggttatcgcatcgttaaagcccgctggtcgggaaaatcgagcggcacttccaattacaccaccattctgagggtaatcggaaacgatcagatcaacatcgtgtccaacctcatgtccattatttcgaaagaggaaggcgtgaaaatgcggtctatcagcatcgattccaatgatggactgtttcaggggaatatctctgtttcgttggcaaacactgctatcctcgagcagcttatccgcaaactgagtgccgtgaaaggagtaaaatcggttagtcgcatcagctgaacggttccactgcttttttcgaaaacatggccatgctatcgatttgtggaagcaaatcctgcacataactccgttcgaagtctttgggacgaagaatcttgccgtcggcagctatcaaatcaagatcgatcaccactttacctttctgcttatctgtcggtgccctacccaaacgtttctctatctctttcaattgtgcattaatttcgtcggcactggccgaatgatttgcaatggcaagaacattcacaaatgggcgtttgtaatggtcgccatacggttttgtcggcaaagcttccgtaaaaacaatttctgagaacaggttcttgagcattttttgagctttggacaagttcgaccgcgcctgaaaattggaactgatgctgagcaaataggaatgcatatcaatgattgaaacaacaaagatactccagatttttcatgaaatcgaccttcgttttggaaaaataggctgtcagtttcgatgccaaagttattcgcgaaaaagatttcactcatgcaatggattgaaatagcattcgacgaaaaaatagtatatcagcaggggttgagatgttatgaaaaaatgtgatgtcgatcgaaaaattagagggcaaaaaatgatcaaaatctattcgaaccatgtacggcgcaaatacgacggaaacatggaacgaagcaggcatggttttaggggtcgaaaattatcgatttaccgatgaattttcggagcttgttatcacacgattcaatcgcttaatcaaacaagttttcaaaacccgttagattttagttaatgacttaaaataactaccaatatttacctaatatcacattcttttcaatttgcaaatatatttacgttcattcacatttagatatagtcgttaagttgaaacggcagttttatatcactttttacactttctaacgcgacgagtaggttttgtgtcataacattggtcactttccattttgacgagtgacctttgtgttcacacaaaacgtactttcctaaatgcggaatggcatttgtgaacccaaaatggtcacttttcactttgacgaccgaccttttacggtttacatgacccactccgttaacaaattatgggatgttgcgccctctttgataactatttttaagggagagtggcttttgtgcagacacaaaagccgttcctcacggcgacgagtgagttttgtctgcaaacaaaggtcgttccttttaacgtcgaacaacctttttcgggtgaaaaaggtcgttcctcattttgcggagtgaacagttcgaacaaacaaaggtcgttccgcgcaatgcggagcagacaaagtagcaaaaataggtcactccgcatcctgcggaaggagtgatttaccgataaaaacctgttcggcaaaatggaaagtaggttttgtgtctgcacaaaagtcgttccgcgtgataacaaacggtaatttcacacatcaaattatcgttcctttaacagttcgacaaccttttcgaatagtgattggtcgttccgcaaaaggggaaatacatcatgtgacggtgaaatgattgttcggcaaaatgacgagtggggttttcgccgcgatgaatggccgaaagcaggaaagaaaggcgtaaatttgtgattgaagccggtctctttttggatgggaataacgaagtcctttcttgcaaaaggaataattacgtcgacgaatgttgccggtgtatcgtgaaatccgtttaaaagcaatttaaatatcgattaaacaggatatatataaaaaatgcctcctgattgatggacaagaggcaacccaaatgttttcacaacggaataatccttattgtgatttgctttcaaatttatgatccaaagatacagtttttttctgttcaaaaaaatatttaacacaaaaaaatgtttatatttacagccaaatacaatgaattgaaaattaatatcataaaatataaactatgaaaaccgtattgggtcttgatttgggcacaaattccatcggatgggctttagtggatgtagaagaaaagaaaattttgggaattggaagtcggataataccgatgggacaagatgttctggatacattttctggtggaaaaccattacaaacacaaactgcaaagcgaacaaactatcgaggtgttcgtcgtattcgcgaaaggcatttgcttcgtcgcgaacggttgcatcgtgtattaaatgtgttgggttttttacctgaacattattcaaaacaaattgatttcaaaaaacattttggtcagtttgttgatgaagcggaaccaaaacttgcttacgataaccgtaatttcatattcaaaaactcttttgaggaaatgctgaatgatttcaaacagtcccaaccccaattgttttatacaaagtcaaatgggaaagaaactaaaatcccctatgattggacaatctattatttgcgaaagaaagcattaagtcagaaaattgcaaaagaagagttggcgtggataatcttgaattttaatcagaaaagagggtattatcagttacgtggcgaagaagaagaggtgaccccaaataaattggttgaatttcactcgcttaaaattgtggacgttattgccgatgaaaaacaaaatggaaaaggtgagatttggtattcacttcatttgcaaaacggttggatttatagacgttcgagcaaaatacctctgtttgattggaaagataaagtacgtgattttatagttactaccgatttaaacgaagatggcaccataaaaacggataaagaaggaaatgaaaagcgaagttttcgtgcacccagtgaagacgattggactttgctgaaaaagaaaactgaacaggaaatcgataagtccaataaaaccgttggaacttatatttatgaaaacttattacaaaacccttcgcaaaagattcgtggcaagttggttcgtaccattgaacggaaattctacaaggaagaattaatcgccattctcaaaaagcagattgaattgcagccggagttatttaccgatgatttgtataacgactgtgtgcgtgaactttatcggaataatgaggctcaacagcttgttttgagcaaacgcaattttgtgcatttgtttgttgaggatattattttttaccagcggccacttcgcagtcagaaaacctccattggaaattgttcgttagaatataggatttataatgacaaaaacggcaatcaagtgaaggattatttgaagactattcccaaatcacacccgctttatcaggaatttcgtgtgtggcagtggctctcgaaccttaagatatatcgaaaagaggatggtgtggacgttactactgaatttctgaaaaatacggaagatattgtcaatttatttgagtttttgatgacacaaaaggaggtcgggcataaagatattctgaaacatttggttatcccagcattgaaagagaaatttccaactgcaaaaccagccgccttcaacaaagaagttaataaagagattgcaaaatatcgctggaactatgtatttgatgattcgaaagacaaggaagaagacaaatcgaagaaatatccgtgcaatacaaccggttacgaaatcaggcgaagattggaaaaagtagtaaatattcctgccggcttcctgaactccaaaatagaacagcatttgtggcacattatctattcagtaaccgacaagaaggagtatgaagccgcattgagatcattcgctaataaatataagttggacgaaaactcttttgtcgaagaattcaagaagtttccgccattcccaagcgaatacggagcttattccgaaaaggctatcaaaaagcttctgccattaatgaggctgggtaagtattggtgttgggatgctattgatactaaaacacaagaccgaattgacaagataatttcaggcgaatacgatgaaaacattaaaacccgtgtcagagagaaagcgataaaccttactgccaatgatcatttccagggattacctatttgggtggcaagttatattatttacgaccgtcattcggaagctgatattgcaggaaaatggaattctattggtgacttggaacaatacctcgaagaattcaaacaacattctttacgtaatcctatagtagagcaagttgttaccgagacattacgtgttgtacgtgatatttggaaacaatatggacaaggagcaaaggatttcttcagcgaaattcacgttgaattggggcgggatatgaaaaataccgccgatgaacgtaagcgattgacggaacaagtgagcaacaatgaagcgacgaatttgcgaataaaagctctattaactgaattaaaggagaattcagatggcaaattgtctgttgaaaatgttcgtccttactctcaaatgcaacaggaagcgttgagaatctatgaggatggggtgttgaactcgaaaattgatttgccggaagatattatcaaaatcagcaagtctgcccagccaagcaaaatggaattgcagcgatataagttgtggctcgaacaaaaatatcgttcgccctacacaggaagtgcaattcctcttggacggctgtttaccgaagattatcaaatcgaacacattatcccaaaatcgcgctactttgacgatagtttcaacaataaagtgatttgcgaatctgctgtaaatcagttgaaagacaaacagcttggtttggaatttattcgaaatcaccccggagaaaaagtggagtgtggaatgggtaaagtagtcgagatttttactgaagaagcctatgtagcttttgtaaaagagcattatgccaaaagcaaaaaagggcaaaacctgcttcttgaggatattcccgaacaaatgatagctcgtcagataaacgacactcgctatatcagcaagtttatttcgtcgttgctttcaaatattgttcgtgccgataaagaagacgatggtatcaattcaaaaaacctgattccgggaaatggaaaaattaccaccgttctgaaaaaagattggggaatggatgctgtttggaacgatttgatacttccacgctttgaacggatgaatcaattaacccataccgatgttttcacttattggaacgaacaatatcaaaagttcgtaccagtggagtattcgccagtagactcgaaacgaattgaaaagaaacgaattgatcaccgtcaccacgcaatggatgcattggtagttgcttgtatgacaagagaccacgttaacctgctcaataatcaatctgcaaaatcagaaacttcacgttatgatttacaaaacaaattgaggaataaaaccaaagagtcgtggatagataaaaagacaaatgaaaaagtagaacgggatgtttttaaagaattcaaaaagccgtgggataatttcactgttgatgcacgaaatgctctggaaacaattgttgtaagtttcaaacaaaaccttcgtgtaattaataaagcaactaattattaccagaaatgggttgataagaatggcgtaaaagtaaaagaaaccgttaaacaagaaggcgttaattgggcaatccggaaacctttgcaccaaaagacagtttcaggcaaggtggatttgccgtgggtgaaagtccccaaaggaaagcttctcacagcaactcgcaaaaatgttgatacttcgttcgatttaaagaccataaatgcaatcactgattctggaatacaaaagatactcaggaattatttagcatataaggggaataacccagaaatagcattttctcccgaaggattagaggagatgaatgccagtataaagcagtataataacggcaaaccacatcaacccattcggaaagttaggatattcgaactgggaagtaaattttccttggggaaaaccggaaataaaaaaaataaatatgtggaagccgaaaaaggaacaaatctcttttttgccatttacgaaggcaaagatggtaaacgcagttacgaaacaattcctttaaatatagttattgaaaggctgaaacagggattaccaccggtagaactaaaaggtgaaaacgacttttatctgactcccaatgatttggtgtatgtgcctaccgaagatgagcttataaatggcagtaaaatcgatcttgcaaattttaccattgagcaaaagaagcgattattcaatgtgaatgatttttcaggaacatgctattttactcctaaccatttagcaaatgctattgcgccaaaagaagttgatttgaatttcgacaataaaagaaataaactcacaggttcttttgatactaaaactgcaagtttcgacggagttcaaataaaagatgtttgcataaaactaaaagttgaccgacttggtcatatttctttatgatatctattatttacttggttaagagaattgaagaagaattttttagaaaaagaaaatagatttcttttatgatcaagcgcacgctttattttggcaatccggcttatctctcgttgagaaaggaacaactcgtcgttcaactgcctgaagtggtcaaaaatgaagatttgcccgaaaaaatgaaacaggaatcgattgtcactattcccatcgaagacattggcgtggtgattctcgaccacaagcaaattacggttacccaaggcttgatggagaaactacttgagaacaactgtgcactcattacttgcgacagcaaccgcatgcctgtcggactgatgttgcctttagccgggaacacgattcaaacggaacgtttcagcgatcaaatcaatgcctccgttccactaaaaaagcagctttggcagcaaaccgttcaagccaaaatcgaaaatcaggcctacgtgctcgataaaatggccggaggagtcattaagaatatgaacgcttgggcggctgacgtcaaaagtggcgatcccgacaattacgaagctcgtgccgcggtgtattattgggcaaatctttttccgaatattcgaggattttccagaaatcgggatggcgttccacccaacaatttgctgaattacggttatgccgttttgcgtgcagtggtagcccgatcgcttgtagcaagtggactgcttccgacgctgggcattcatcatcgcaacaaatacaacgcctattgcctggccgacgatgtgatggagccttaccgacccttcgtcgatcgcttggtttttgaaattgttgccgaaaatgaaaatattgacgaaataacacaacctatgaaaacccgattattgggaattccggttctcgacgtaatgatcaacgggcaacgaagcccgttgatggtcgccgtggggcaaaccacggcatccctctatcactgtttttcgggagaaatccgaaaaataaaatatccttcatttacttaaaatgtcgatttggaggattaggggcatttatggaacgttttagcgaatacagaattatgtgggttttggtttttttcgacttgccgaccgaaacaaaaaaagatcggaaaacatacaccgatttcagggacaaactgatcaaggacggattcaccatgtttcaattttccatttacttgcgtcattgtgccagtgcagaaaatgcacaggttcatatccaacgggtaaaaaagaatttgccgcccaaagggaatataggcattttgtgcattaccgacaagcagtttggcaatatggaactgttcgttgggaaagaagagaaaaaagtatccacgccctatcaacagttggaattgttttaatgaatatggacaaaaaagaattgctgaaaactcacgaattactttgtgaatcatacattaaacttatgaacgacaaagaagtaatgttgaattttaccaaaccgcaattggaatcgatgtatgcatccaaaattggtgtattgcaaatagagattttaaaactgcagctcgaaatcaaagcactcaaacgccaaatcgaaatggtacaagccgaaatcaatcaaaacaaagttcccaatttcaatcaaatagaagcggatattgccggtcaacttttggaagctcaaatggagattatgttcaaaacttacgaattggaggtggccaaacaatttttaagtcatttggcctctcccgacaaaaaagtcgatataagaaaaattttcaggcgattggccaaggcattgcatccggatgtgaatcccgaattatcgtcgtcgaaaaaagagatttggaacaaagtgctttgggcctacgagcatggcgatatggaacagctgaaagcattggaaatcatttatgcaaaagaaatttcggaatcggaaaatgccaaaaacgaaatgagtgaagatgaactcaacttgttaaatcacacactttcagaaggaatcggagtgcttgaacaacaaataacagagctcaacaactcctttccgttttcgatgcgggaacaaatcttaaatgaagattggataaatggagaaagatcgagattgcaattacaaatggaagaattgaaaacatatggcgaagaacaaaaacaaaaatacgctctaataaaagccgcttatgaataacgatgaaagcttgattaaagttgattctgcgcttttggcagcattaagctcgcatgccatccaattcaatgttttctcgaaagatattctggtattggaaacagtggttgccggcacttcttttcgtgatctttccaaagtaaatgagcatttggaaaatcggataaaacttgaagtcaaacgcgaagccgacaacaaatacgacccttttgccgtttcgctatattttggcgagaccaaaattggttatcttcccaaaacgaagaatgagaccatcgctcgtttgctggatgcagggaagagcttttttgcccagctttcggcaaaagaatgggaaggcacgtggcttcggttggaaatcaaggtgtatttgaacgattgattccttcttcttatcagatgtacaataaaaaatcccgcttattaacgggattttttgttttctgaccaacattttttattttctgattttgtctgtaaatctttgataatttgcaaataatacacatcgagttgtatcagaatatcaaagatataaatttcgaaagcaaatcacaacaaacaaataaaaacattgttatgacagcagttgtatcagaatatcaaagatataaatttcgaaagcaaatcacaacgtacatgaggcatttgattataaaagagacgttgtatcagaatatcaaagatataaatttcgaaagcaaatcacaactataaggtaccatcaccgtctcctttcgcggttgtatcagaatatcaaagatataaatttcgaaagcaaatcacaactccgtttattttattacttgcccctattcgttgtatcagaatatcaaagatataaatttcgaaagcaaatcacaactgtgttgctgatatggcttttgtctgtattgttgtatcagaatatcaaagatataaatttcgaaagcaaatcacaaccgtgtctgtcccgtaatgtgtcacatgaaagttgtatcagaatatcaaagatataaatttcgaaagcaaatcacaacagaaatttctgtccgaattttttaccggttgttgtatcagaatatcaaagatataaatttcgaaagcaaatcacaacggttttgaacattacctgttcttatattgtgttgtatcagaatatcaaagatataaatttcgaaagcaaatcacaacccttcgacatacttacctccctgatataagttgtatcagaatatcaaagatataaatttcgaaagcaaatcacaacgttattgtactcggacgagtggactgttttgttgtatcagaatatcaaagatataaatttcgaaagcaaatcacaacagtttgtttgtaaagtttggcgcacccagtgttgtatcagaatatcaaagatataaatttcgaaagcaaatcacaacgaaaagaatattgtaatagcaaaatactcagttgtatcagaatatcaaagatataaatttcgaaagcaaatcacaacttcaatctatctatatcgtcaaaaagatgtgttgtatcagaatatcaaagatataaatttcgaaagcaaatcacaactaaatatcccaatatgctagcataggtacagttgtatcagaatatcaaagatataaatttcgaaagcaaatcacaacgccgcttcctaagcggtcgcctcctaaaggttgtatcagaatatcaaagatataaatttcgaaagcaaatcacaaccgaagtctttgatcatttcctgataaattggttgtatcagaatatcaaagatataaatttcgaaagcaaatcacaactgtcagttgtttctggattttttcgatgagttgtatcagaatatcaaagatataaatttcgaaagcaaatcacaacaagaaacccgatatatcctccgatcgctatgttgtatcagaatatcaaagatataaatttcgaaagcaaatcacaacaacaacaatatagtaaaaaagtagatagtgttgtatcagaatatcaaagatataaatttcgaaagcaaatcacaacttataattgattgtaaatgcaacaggatcggttgtatcagaatatcaaagatataaatttcgaaagcaaatcacaacacagttactatatatgagtgcaatattagagttgtatcagaatatcaaagatataaatttcgaaagcaaatcacaacgtaaaaattcggagcaaaattttactttttgttgtatcagaatatcaaagatataaatttcgaaagcaaatcacaaccagtttgctttgaagctcatcgattgtgtgttgtatcagaatatcaaagatataaatttcgaaagcaaatcacaacgagttattcatttaaacaaaacaactatttgttgtatcagaatatcaaagatataaatttcgaaagcaaatcacaacacaagaagcttgatgagataataaaagaaagttgtatcagaatatcaaagatataaatttcgaaagcaaatcacaacacaagaagcttgatgagataataaaagaaagttgtatcagaatatcaaagatataaatttcgaaagcaaatcacaacgatttgttcttccattgttttattgttttagttgtatcagaatatcaaagatataaatttcgaaagcaaatcacaaccaaagcgatacggcagatagaaagaaatttgttgtatcagaatatcaaagatataaatttcgaaagcaaatcacaaccgagtttgcttttcataagatcgatcttttgttgtatcagaatatcaaagatataaatttcgaaagcaaatcacaaccccattatccatctcttcccttcgtccagcgttgtatcagaatatcaaagatataaatttcgaaagcaaatcacaaccgaaggcttgtcgcatgtacacggcttcaggttgtatcagaatatcaaagatataaatttcgaaagcaaatcacaactgcctgtaactatttctgcaccatcaaaggttgtatcagaatatcaaagatataaatttcgaaagcaaatcacaacgaaggctgggacaaaatgaaaacggctccggttgtatcagaatatcaaagatataaatttcgaaagcaaatcacaactattgctgatttccaactcacaggacaatggttgtatcagaatatcaaagatataaatttcgaaagcaaatcacaactactctactgttcgttagttaagactcctggttgtatcagaatatcaaagatataaatttcgaaagcaaatcacaacttagatgtttgagataaatcatgattgccagttgtatcagaatatcaaagatataaatttcgaaagcaaatcacaactgaagcatcaagaccttttaaagttgactcgttgtatcagaatatcaaagatataaatttcgaaagcaaatcacaacgtaagaaagtttttgaaggagactacgatggttgtatcagaatatcaaagatataaatttcgaaagcaaatcacaacggaatatacgttacagcaagacgctttttagttgtatcgtaagcattcggtgaagtccgtatttgatttcaagtttctttattttctgaaagaaaactttcaaaaacttggaaaacaatcggagtcgatttggagtttttagaagtttctcttaacccggttt

SEQ ID NO: 1278 - DNA, 20066 bp, synthetic construct
  misc_feature 1..20066: note = Synthetic
  source 1..20066: mol_type = other DNA
ggcacgctacacacacgtgaaactcaactctgacgagataaagacctatgccaacgacatatcgataacgccgctgggcatacctatgctctgcggtccgggcgccatagccaacaccatcgtgctgatgagcgacgcccatacaataacgatgaagagcatactgataggctcgatagtgtttatctacgtgcttacatacttcatcctgcgcgcctccacgcgccttgtgagcgtgctcggcgagacgggcaacaacgtaatgatgcgccttatgggccttctgcttatggtcatcgccgttgaatgtttcgtcggcggaatgaaacctatacttatagacataataagtcagggcgcggcaggtgcctgacgtgatatcatataatgcggtatgacgcgttgaatgcggcagtcgggacaagtgtccgggctgccgcatttattgtctcaaaacgcttcttaggcagcatatagctcagcctgttcggcttattccagccttcgtcgtccgtcttttgtcggtttcttcttggcatatcagccgcgcctgcggaacgtcaaatgaaaattccgttcagtattaaagcaaaaataccggccggattataataacagatcggggttaaaatacaggctgtattctgaatataagatattgtgtttgcggtttcatgtatggcagggtgccgccggatgttttctttggcatggtgtgttatgccctcaaaaatgtcatatggcatggcgccggcaaagagcatagggacggctgagggcacgcaggggctgaatgtatagaaacaatgcggcggctgacagattttttgccttgaaattgcctgcaaattgtattgttatgacgactaattttaactttaagggctgatttttataaaagattattacatttttacaaaatatcttttgtttttataaaattttgcttatatttgctttcggaatgctatagcttttaagaaacaacatgtataacctctaaatcaaacgcattatgaacagaaattttatctcccttatcatcgctgtattgttttcttcggcatcatttgcccagcagtatgaatataagctgaccggaataacatcgaagcacactaacgactattacaaatacttctacgacgatgccaacggccgtgtagacagtgcggtgcagtatcgcgaactggcaggctttatctacgactatacgctgaaatatgtttatgacgaaaacggaaacgaggtgctcgagaagggataccagaagttctcgggcgacgacttctatacatattctacgcaggtgagatacacttacgacgagaacggacgcatcttaagccgtgccaactataaccttaaccgcaagaagggcgagtttgaacttggcggtgtctatgagtatgtctacgaaggcgacaagctcgttaagcgcaacacctacgttgacgaggcgctgacggagaaattcgaggaggtgatctatacttatgacgacaagggacgtctggacgaggagaatgtctattcgtcgttcttcggcgatgagatgacattctcgagcggcacgaagtatatttatgacgacaaggaccgtatggttgagaagataagcaccattggcgacttcttcaccggcgcgaagatgccggccggaggcgaggtgtgcacgtatgatgaagcaggaaacattgtggaatggatgacatacagcgaagtgaaggagcagccgtcgagccgtgatgaatacacgcacgacctgtcgctcgagactgtcaacacgctttatcccgtggagaacgagtgggacggaacggtttatctcaactcgaagaacgccatactctcaaacatcgtttatcagacggacagaaacacgggcgagatggctgtgtatgacgagcttgtgatggaatatgctcctgtggcgtctactggaatcaacgtgatacgtccggctgtgaaggacatggtgcaggctgtttatgccgacggcagagtgcgcctgacgggcgtggctgaaaacgagcctgtaagggtgtacagccagacgggcgtgctgatggacatgaagaaatataactcgcaggagggtataagcatcagcagcatgccggcaggtgcatacatcatctctacaaggctgggctctgtaaaggtgtggaacagataggattatattagcaagatagaaaatacaacgtccgcagattctgcctgatgcagacatctgcggacgttgttttatttcggccggcttcagggccgtatgtgttctgtgttatgccgccgcttattgcggtgccgtggcattattgctgttgctttgctgctttgatgtgctcctgcgcgaagtgccacaccacgatgcctgccgttaccgacacgttgagcgagtgcttcgtgccgaattgcggtatctcaaggcatccgtcgctggcgtcaaccacctcctggcgcacacccttcacctcgttgcccagcacgacggcatagcgttggccggcgtcgggcacaaactcgttgagcatggtgctgccttcacactgctccacggccatcaccttgcatcccatggcgtgcagctcgcttacggcttcggcagccgtcttgaagtagcgccactcaacgctgtcctcagctccgagcgccgtcttgtgtatctctacgtgcggcggacatgccgtgatgccgcagagccacacagcctctacgcggaatgcgtcgcacgagcggaacaccgagcctacgttatacaggctcctcacatcgtcgagcaccacgatgagcggcatcttctcagaactcttgaactcgtctaccgtcagacggttcatctccgtaacctttaacttgcgcatcgattcaaattgagaattgataattgagaattgaaaattatgatttgaccaagaaggcggaaattatgaattgtgaattaagaattatgaattgtcaattcaaatgaattcttcactcttcacttttagctttttaattttgaacgccagcgcatacattctgatctgcttgaccatggccagcagaccgtttgagcgggtgggcgagagatggtctttcagaccgattcggtcgatgaaatagaggtctgtgtcgagaatctcctgcggtgtgtgtccgctcagcacgcgtatcagcagggcgatgatgccctttacgatgagcgcgtcgctctcagccgtgaaataaatctttccgtcctcatagtcagcctgcagccacacgcggctctgacagccgtcaatcaggttgctctccgtcttatacttgtcgtcgagcggcttctgttcgttgcccaggtcaatgagcaactgatatttgtccatccagtcggtgaagtcagaaaactcctcaatcacctcgtcctgtgcttcatttattgtcataatatcctttgttttttatgtgtttatttaattcgtatgtcaaggagaagccaatagcttccgtttctattccgtcgtcataagcagctttgtcatatttgctcttacgcaacaaacttaaacttctacgaagaaaagcatttgtcttttttcgctatgctcaaggaacttctccttaactccttaactcccaagaagaaaagtatttgactttaacttctttaactactctaactcctttaactcctaagaaaaatcaatatttcggctccaccttaaccagcttaaacagcttgtcgctcggtctcaccttgtcaggcacgcggaacgatactcgggtgcccttttgggctgtctcaacggcatgagtgtcgtcgtgaatctcctctacggttacatacatcacgcctgtggtaggacctgttataagcatcttgtcgcctactgagaattcgcacgcctcgcacgtaaactctgccacgccgagcttagagaaatacttgacgcccttgcccacgtaaactttgcgctccgtggcattagagccatagttcttgttccattcgccaaggcgctgtccctggtagtagccgtcccagaatccgcggttgaacaccgttgccaggcgctcgtcccactcgtccttcttctcctcggtgaacgtgccgtcaagcacactctgtatggcctccttgtagcatttcaccacggtgtagacatactcagcgccgcgcgcgcggccctcaatcttgaacacccttacgccggccttcatcatgcggtcgatgaagcgcaccgtcttcaagtccttcgggctcattatatatttgttgtcaatctccagctccgtgcctgtctccttgtccgtcacgatgtacgagcggcggcacagctgcatgcactctccgcggttggcagagcgcgacgcgttgtcaagactcagatagcacttgccgctgatggccatgcacagcgcgccgtggcagaacatctctatgcggatcttcttgcccgacggtccgcagatgttcatctgctcagcctgctcatgtatctttgccacctgttccatgttcagctcgcgcgccagcaccacaacgtcggcaaactgagagtagaacttcagcgcctcgatgttgcttatgttaagctgtgtagacaggtgcacctcctggcccaccttctggcagtaggtcataacggccacgtcgctcgctatcacggccgatatgccggcctccttggcagcgtcgataatctggtgcatcagctctatgtcctcgtcatagatgatggtgttcaccgtcagataagtcttcacgcccctttcgccgcacgtagctgcaatctcgcgcaggtcgtcaatggtgaacgtgcttgccgagtgagccctcatgttcagcttctcgatgccgaaataaatcgagtcggcacctgcctgcagtgctgcctgcaggctctcgcggctgcccacgggcgccattatctcatagtcggaaatgttagtgtccataacttattgtgaaatcttgttgtcaatacccatttgtcaaagcctttcggccattataaaaaatgcccgccgttaaaaggacgacgagccagcctcaatgttttcacaacggaataatccttattgtgatttgcttaaaattctgtctgcaaagatactaataaaatgctaacactcaaaacagttttttatatttttatcatatttgcccaagagcctgtttaacctttatcggtcgtaagccggtatcttgtttgtttctgcaggcagattgatgttttcatctgtctattttacatattgctgtcttgccgtctgctatttagcaggcataacgggctatgtctagaaaatagcggacggaaagatattcaatataaaacggcaatagggctatcttagcttcattcctataaaaataagaatttctctcccgattataaaaaacttaatatttagtcaggcattaaatcagattatctgtttgtcaacgtgtaatgtatagcaaactatctttccgtcggcattttttgacggtatattcaacttctccattaagatttagcccctttcgttgttcttcccatgttatttcttttaccggacggttgtttatggctatgattatatctccaatttcaataccggccttttctgctattccgcctttgtataatccgttcactatccatccttcataaatatccgtgcggtcaaaagttgccatatgggttacagatgattgcatgtacactcctttattcttgttgcgtttcacccacactgaagagttttccggatctaagacaatatcgtataacgaccatattttatttccaatcagacctaaatatggcttgccaaatgacagagcaccttttttcattaacagaataatctattacgatgtctttaagtgtatctgtcatacagaattgcgcggctcttataataaactggtcagagccgccgccaatgccgccggcttgtgtcctgaagtatgctttcggtatgtcatcaatattcagagaagatgctgcttcgttagtaagacagatagaggatccacatcctaaatccattctgaaccatccttccaaggtgttcttctcgtcaatctgaagtttggcctttacatcaatacggatttttctcaaatcgtgcgtcaagttttatatagtatcaagcaaatcatctttaaacggttttttaagctgttttatgtatccttcgctaaaattgatttccaaaggagatgtcagtaggtgagtgttgcctaacaagccgtcggtatgtctgccgagaatgtcacgcagcttaattataggagtaatcttgttttgatattccatatcaccgcagtgaatcttgacgggctcgatgaatatctctacgctttgaggtccgctgttgcctgctcccccgattttggccctgccttttctgccgaaagcattttgaagattatttactttcagataatcttggtctaagtatagaaaattcagccccggtgtcataaattagggtaacaggtatggtgtcattaagcgtacactgaaaatacagatgcctgtcaaagataaatggtattgccccttcaggaatggcgcaatgccttttaatgagaagaaaacaggaagagagaaacaaaatatagatttcttttcataggcttaaatatttaattagtattgtattaatctgagataagctgtctctattatgtgccgacgtggcgtctttccgttttaggcagccggcatggtcagtttgcaggcaggcttattatgtttccgttgaagttctccttcactcccactgcggtctcggcctgttccaccatctggttaagttccttgttgggcttcaccaatgctgccatgctcaggaaagttctgtagtaagccttctccatgtcgtgcttgcccacaagtccgtatgcctgcgccgtgttgaatatcgtggccatgctgttgcggttaagtttaagcgcctcacgccatgcgtatattgccgaccagtatttgccctgcttgtagtagccctcgcccaatgcgcgcttgacaacaaacagcaccgtatggtccggctgcatcagttcgattgatttttccagatagtcaatgccctcggccacgctgtccatgtcaacacatacgatgccgagccggtaaaggcatcccgcattttgcatcttgcttttttcggctgccttggtgagccatctgcgtgccataaggttcttgcccgtctgcatgtaggccatgccgagcgagtagaccgtgttgtaggtagagtcgcccagttcaagcagcctgttgtaagcatttattgccttgtcgtagtcgcgcatcaggaagttggcgtcggcatattcgcgcagcacgggcagacacgcagagtctgtctgcatatatctggccgtaatgtcataagccttctgcggcgacgatatattgtcgtcgctgttgtatatgtgtgccatgtatgccgtcacgatgccgtccattgggcacctgttaagcaacctgttgccccattcaatttgttttggccgtgttgtccatatatctgtagcagtcaaacaggcggcgcatcgtctccgcagtcagactgtctgtgcctttccttgccgtggtttcgagcattgccgcgcatttgcggtattcgccacgcataaacaggcagtgcgccattttttccctttatcgcgtctgagctgtctgtctgcagcgcctcgccgtaatatctcatggcgttgaacgtgtcgtttatcttcatgcaactgtcgcccatcgcttctgttgcgtcattgtcggctctggctgaggctgccgacagggtcattagcaatagtataagactgatgattttcatggcaatataatttttattttagcgatatattcttttctttatgcagaaggcaaatttctgttcatgttatgcaaatatagcgaaaatataagaatgtagtacagaatatatcatttttaactaagttatttagtttatattcatggtcttcattgtttgccgtgtatttttctttgtcatgatatgcagttaagcttattcttgtagcactcagcatgataatttttttttcatggcattatgtctgcatactgatactttctgttaaggctgtgatgcaaatacaactctttgtagaatagtcgtggcaaacatattttctaatcatggaaacggaacttttatagtacggcaataatcagaatacttctcttacaatcggtcttttcgatttcttgctcaaggagaacagtttagatatgtaaatagtaagaaaatggaatattacaacggcaaaactcataagcatatcattcctttttcctcgtacagcaatatcaaaaacatcaagaattttccatgcgccatttaccggatatgtggtaaaacttatgacaaaatagtttttcaatctaggaaacgaaaggtaaacgtatgttaaggaaacaataattggaatattatttcattaacatacatttacagatgaaccgacaaatgccactaaaatcagtcatttcttggcctgaaatcataagtttgagcctcagaagtggcaccttttcatccgtaactgggccactttttatgcgtaagtgggccggttatgttttttaaacatttctatttttctctcttatttgctgcaactccctgtcagtcagtgttttaacaaagtacccgttttttgcccttttctgcccaaaatcgcagcatggcgaagagcatgcgtgttctgagagcgtcaaacggtcgggaaacatgaagaaagtttacaaattagctgcgctatattcataagatttaatctgaaaaactgttatagtttattgcttcattaataatataattgtttataacgcggctcgtaaaaaatcataatttttaattgtcattgctctcgcttttcactatctttaaataagatagtattcggctcggcaaagccaagttaaaaaaccatagttttttaatttgtcattgctctcgcttttcgctatctttgtacattaacttaacttgcaactgatttaattgaagatgaaacatatattaggactagacctcggcaccaacagtataggctgggctttggtgaaaagtgaacaagattgtgacgatgttgagagaataaacggtattgaggctgccggaagcagaataataccgatggacgcagctgttcttggtgattttgccaagggcaacactaaatcgcagactgccgacaggacggcggcaagaggaataagacgcatgggtgaacggcataagctgcgccgcgaacgccttaacagggtgctcgacgtaatgggttttctgccagaacattattctgctgcacttacgcgctacggcaaattcaaggacggagaggaatgtaagattgcatggagaaaggacgagagcggtcaatggacatttgtctttgaagattcgttccgcgagatgcttgccgactttgtggctcatcagcccgaatggctggccggaggacgtaaggtgccttacgactggactatatattatctgcgtaagaaggctctgtcgaagcctcttacgaaacaggagctggcctggctgctgctcaacttcaaccagaagcgcggctattatcagctgagaggagaggatgaacaggccgacattaagggcaagcgtgtggaatattacgcgctgaaagtggtcggcgttgaggatacgggcgagaagaaaggcaaggacacgtggtttaacattatgctggagaacggtatggtttatcgtcgtccggctgccgaggctcccgactggataggcaagaccaaggagtttatagtttccaccgaccttgaaaaagacggaacgccgaagaaagacaaggagggaaacataaagcgttcgttcagaatgcctaaagaagacgactggactctgataaaaaaggaaaactgaaaacgacatagacaggtcgggcaagaccgtaggcgaatatatctacgatgcgctgctggccgatccaactcagaagataaggggcaagctcgtaagaaccgtggagcgcaagtattataaagaagagctgaaaaagattatcgactcgcagaagcgctttatccccgaacttaacgacaaggatctttacggcaggtgcataagcgaattgtatcagagcaatgatgcctacaggcagtctatatcctcgtgcgacttcacgtatctttttgtagacaacatcatcttttatcagcgtccgctgaagagcaaaaagtctttaatagacaactgtccttatgaggaacattcttataccgacagtaaaaccggcgaggtgaagacggctcccgtgaaatgtgtcgcaaagtcgaatccgctgtttcaggagttccgcctatggcagtttgtgcagaacatcaggatatttgaacggcagaagaagataggcgacagcgtgaagaccgacgttgacgttaccggcgagtttataaagagcgctgacgatgtggtgagcctgttcgactttctcaacgaccgaaaggacataacgcagagcgttttgttgggaacatatttcaaaataaagaagcccaagggcaaggacagcgattatccttaccgttggaactatgttgaggacaagacatatccgtgcaacgaaacacgcgcgctgattctgaaaggacttaaagatgccggcatagacgaaggcttcttggataaggacaaagaatatagcctatggcacatcctttattcggttgaggacaagcaggaaataacaaaggccatggaaaagtttgccgcgaaaaacagtctcggcggcaagtttgccgaagtgttcagctcgttgcctccgtttaataaaaattacggctcttattcagaaaaggctataaagaagctgctggcacttatgcgcacaggcaaatactggagtgccgacgccattgacaaacacacgcttgaacgtatagacaagataatcaacggcgaatatgacgagagcataaggactagggtgagagagaaggcgataagcctgacggatgtatcacatttcagaggcttgcccctttggctggcatgctatattgtctatgaccgccacagcgagtcgaaggatataacacgctggaactgtccggccgacatagaccaatatcttagccactttaagcaacactcattgcgcaaccctattgttgagcaggtggttaccgagactctgcgtaccatgcgcgacatctggcggcagtatggcaagatagacgagatacacattgagatgggccgcgacatgaagaatccggccgacgtcagggctaagatgtctaagcgcatgatagacaacgagaacgcaaacctgcgcataaaggctatgcttgctgagtttgccgatcctgatttcggcatagccggcgtgcgtccttattcgccgtcgcagcaggagatgttgaggatatatgaggaaggcgcgttggaaagtgtcgatgaagtgcccgatgagataaacgaaataataagcaagttcaaccagacagacattaagaagcgtcccactcacggcgagataatcaagtataagctgtggctcgagcagaagtatcagtcgccttacacagggcgcaccatatcgctttcgcgtctgtttaccgacgattatcagatagagcacgtaattccgcagtcgcgttatttcgacgactcaatgtccaacaaggttatatgcgaggcagaagtaaaccagctgaaagaccgcatgctgggctacgagttcatcaaggcacaccacggcgagaaagttctgctcagttcgggcgagacggtcaccatacttacggcggaggaatatgaaagactggtgcagcttaacttcagaaagaatcctgttaagatgaagaaactgctcatggacgacattcccgacaagtttatagagcgccagctcaacgacagccgctacatcagcaagaagataaagtcgctgctatctaacatggtgcgcgatgaaggcgagcaagaggatatatcaaagaacgtgatagcatgtaatggagcgataaccgacagactgaaacgcgactggggtgtgaacgatgtgtggaaccatatcatactgccgcgctttgaaaggctcaacgctgttacaggctccgaccggtttaccacgacaagcaccaacggccacaccatacccgacatgccgctgaacctgcaaaagggatttaacaagaagcgcattgaccaccgtcaccacgccatggacgccatagtgatagcatgcaccacgcgcagccacgtcaacctgctcaacaacgaggctgccatgtctaagaacaacgccgtgcgctatcagctgtcgcgcaagctgcgcagatatgaagacaccatggtgacacgaaacggcgagacgcgcaccattagcgttgcccgcgagttccttaagccgtggcctacgttcaatgccgacgttgagaaggctctgcgtggcatagtggtcagctttaagcagaatctcagggttataaacaagacggtgaacaaatatcagaaatttgtctacaacgaagagaaacatataaaagaaaagaaggcggtaagacaggaggagcacaacggcaagtatctccttgccatacgcaagccgatgcataaagacacggtgtatggcgaggtgaatctgaggcgcataaaggaagtgtcgctcaaggacgctgtggcaaatcctaaagctgttgttgacaaagacctgaagaagaagctaatggcaatgatagagctgggctacgatctgaaacagataaccaagtattttgaagacaacaaggacgcatggcaggatgtaaatctgaagaagataaaggtttactatttcaccaaagacaccggcgaccgctattttgccacacgctttggcaacgacctcgttacgctgttcagcaagataaccaaggctgatgacgccaaaaaatcagatagagcggataaccgacacgggcatacagaaaatttctgaagcgccatcttgaagtcaacggcggcgactgccaaaaaatgcattctcggccgacggcatagacgagatgaaccgcaacataacacagcttaacggcggcaggccgcacaagcctgtatataaggtgaggatatatgaaaaggcagataagtttgccataggcaccaaaggcaacaaggcagccaagtttgttgaggctgccaagggcaccaatcttttctttgccgtctatctgaaagaatatgaagacagcactacaggcgaaacgataaagaagcgggtgttcgacactattcctctgaagaccgttatagacagactgaagaacgggcagactcctgcccctgaagaaaaagacggagccaagctgctgtttgtgctttcgcctaacgaccttgtttatttgccaacggaggatgaagtaaagaacggaacgataaataggcctttggacaagaggagaatttataagatggttagctgtacaggaacggagtgttattatattccctttatagtagcttcgccaatagttgataaggtcgaatttttctctttgaataaaataggaagagctattaccggcgagatgataaaagaaatatgtattcctattaaagttgaccgtttaggaaatataaccgaggtaaacaacgaaaagatatgattaagcgcacactatgtttcaccagtccggcatatctatctctccaagacgcgcagctcgtaataaagctgcctgaggtggagaagagcgacctgccggacagcatgaagagagacagcacaagaaccataccggtggaagacatcggtgtggttgtgctcgacaaccggcaaataacgcttacgcacggactgctcgaggcgctgctcgaaaacaactgtgccgttgtaacctgcgactcgcgcggcatgcccgtagggcttatgcttccgctttgcggcaacacgctgcagagcgagcgcttcagtcggcagatagaggcatcgctgccgctgaaaaagcagctgtggcagcagactgtcaaggccaagattgacaaccaggcggcagtgctcgacaatatttcggggatagaaacaggatgcatgaagcggtggtcggccgatgtgcgaagcggcgaccccgacaatcttgaggggcgtgcagcggcttattactggaaacagatattcagggatgtttcagggctatcgggcttcacccgtggccgcgacggcatgccgcctaacaatcttctcaactatggctatgccatactgagagccgttatagcccgctcgctcgtgtctgccggcttgctgcccacgctcggcatacatcatcataaccgttacaacgcctattgtctggcagacgacatcatggagccttaccgcccctatgttgacagacttgtgtatgacatggcggcaggacacgacactgaagaatattctgaactgacgaagccgctaaagatgaagctgctctccatacctacgcttgacgttgtgattggcggccggcgcagtccgctgatgattgccgccacgcagacggcagcatcgctttgcaaatgtttcagcggcgaactgcgccgcattgcttatcccgaactctaataagagtatggcggctgggcattgacgaaatatgtttctaataatctatactatggaccgattcagcgaataccgggttatgtggatacttgtatttttcgaccttcccaccgacaccaagaaagacaaaaaggcttatgcgctttttcgtaagaacttgcgccgcgacgggttcaccatgtttcagttttctatctatgtacgccattgcgccagcatggagaatgccgcagttcacataaagcgtgtaaagtcgttccttcctgaatttggcaatgtgggcatcctctgcataaccgacaagcagtttggcaatatagagatattttatgggcacaaacctgtagagccgaatgctccggggcagcagcttgagttgttctgagacggatgtttttataacctcttacaaataaaaaattcccgtcgtaaggcgggattctcgttttatgcaaacatcattttttgttttctgattttctttgtatttgtctatgcatcagatatttacgcatatcgtgatgtttgttactatgcaaagataagaattttaaagcaaatcacaactggtaagaagccattcgatatttacatctggatgtttgttactatgcaaagataagaattttaaagcaaatcacaacgacagaatagtggtttctcttcttccgaaggatgtttgttactatgcaaagataagaattttaaagcaaatcacaacaatcaggaagtcggtcaggttgccgataacgatgtttgttactatgcaaagataagaattttaaagcaaatcacaacttacctcggtggtcaactttgttgactccggatgtttgttactatgcaaagataagaattttaaagcaaatcacaactgcttatcagcagtcagtaattgacaaaaatgatgtttgttactatgcaaagataagaattttaaagcaaatcacaacgaagaagggtttccagcagtatcagttaaggatgtttgttactatgcaaagataagaattttaaagcaaatcacaaccattattccccggggcgatataaggccatgcgatgtttgttactatgcaaagataagaattttaaggcaaattatcgatttaatgattaatattgtttgcaattaaaaatatccgcagcacttcaatgggagagggctgcggatagtaaattttcagatgtccatgcgaccgccgttggcgtggcggcccgccgtatgtgtctgtatgggctacattaagtccatgtcctgataggtgtcgctgccgaagtggtccgtcgcgttgtcgtcgtcgaagccgtcgctgtctgtcatgccgtcgtcagtcatgtcatggctgtcgctgctgtcgtcatacggttcgatgtcttcatagctgtaaatgtcgtcgtcttcgtctgccggtgatatgtagggcaggtcgaagtcggtgtcgagctcctcgggtatctcgtatcctccgtctacaagattttcgtagtagtcgtccacctggtcgttggcgtcgagtatttcgcccatggcggggtcgtcggcacacatgtccatgaaagcctcttcctcgtcgggcgtcatatttccgtcgagccatgccgaaaacatgttctcgtcaagggtaaagttgccgtagtcatccatgtcgcatttcctccgttcttagtgtctttaaaaattgttctttagccatcttgtgcttgttgtagaaggtgttcatgttcattcccatcatcatggccgtctcctcgttggtgtgtccgcatagatatcgcagccttatcagcctgctgtatcttctgttgggcatcagcctcagtatggtttcggcgtcgtcggcctgaagagatgagatgtctaactctatagatgcgggaatggtgtcgattcttacaccctggccgtcaaatttttcagaaatttgttctgtcggcatttttgtcctgcgctcatatctcttgtagcagtagaagaggcacacggcctttagccatgtgaagagcgtgctctggtatctgaacccttcgagcttgcattgtccgccggctttgtcgggagtcattatgtggacgtatatttcgcttataaactccatgcacgacgagcagtctgtgtggtagttgtcgtacacagacttgaagagcggatagcatttacggtaaaagaagtcccttgtgacccgggcgtcgcgctgcagcagtgcccggaccacttcacggtcagtgatattcatgtcagcttatgttgttcttacttcttgccgccgatgagagacttcagcgagaacggctttttctgatagatcatcagttcggctttctcatcgtagcattttacggtgagcacgcccgagcgttctccgtctgtcttgttggggtcggcggtaagcgtcagcttgttgccgtttttggtgacgtcgacccattccgggaaggtgtaggtccagtcgtcgtagttgcagtttaccgtcacctcgtggttgtcgctcttcttgcctgacgacttaaattctaccgacgacacagacaggctgagccttacggggtctttggccacctcgggcggaacggcagagtcggctttctcgagcacgacggtctcattttttcgtcacggtccttgtctttcgcgttatcagcttgatgttgctcctgcatattgcaatctggttgtcgcacatggccttcttggtgcttgagtcgtaggccttcttggctgcgctgaactttgcaatggcctgtttctgcgaacttacggtctgcttcagctgcagcttctgtccctgtgcaaacaggcggtcgccggcggtctgtgcgttggcctgaagagacaacacggcaatgacaacggttaaaagaagtttggcaatagtactcatagttcaaaaaaaatgattatggattataacttaatgcgtctgtaatgttcttaactctggtgtggaattctttggctatatcctgcatgtcgctggcctcaaagtctttagccttggcttccagttcggcctttgccttcagcagggcgtctttggccttgtcgcggttgaggcttatgttcttggtgtcaggcttgttctctgttatctttttggcaatggccagtgcctccatgtatttcttgtaggcgtcgatatagtggcgttcgtatccctcgtcgtgcctgtcgcccgtggcgaggctcttgtcggccgtgagggtgagtgtttcggtcttggtgcgcagcgagtcgttggtggcttttatctcgagagctatctgctcctgctccaccttcttgttgtgatatgacacgcctcctatggctattatggcaaccgctatggcagcgcaggcggcagctatggttattcttgtcgacttctttagctgtcgcttctttccgtcgaggttttctatagccacgcgcatctgtgccgctgtctgatagcgcacgttctggtctttgtcggtggcgcattctattatcttgcgcatgccgcggtctttaatctgtgcgagtggaattttcttgtgcagctgtttctcgagcactacgtgcgactgtccttcaaacggcacatggcccacgatgcactgatagagcagtatgcccatggcgtatatgtcggtggtctggttctggtgtttcaggtcgcctatggcaagctctggcgcggcatattcagccttgcccatgaaggttccggcagttgtcagtccgcggtcgttggtggtgagcttgttcacctgcttcgctataccgaagtcaatcagcttgatgtgtccgtcctcggtcagcatgatgttcgacgggtcgatgtcgcggtgtacgtatcctgcgtcgtgcagcgctatgagtcctgaaagcacgttgagcattatggtctttgcaaagtgtacggagtcggcctgaaactcttttagcagcttcttggcaaacggattctcgtggccgtcggcgtcggtgcacttgccttcaaagatgcttgacagcggaatgccgttaagcagctcgctgacaacgtggtagtgcttgcgtgtcatcgtgccgtgcttagtctcggtttcgatgaatccgagcatctctatcaggttgtcgttgcgcaggcgtattgatgcctcgcgccttgccctctctatggcgtgtggcggcaggtcttcataaagaaactttatggcgacggggcgcgatatgttggtcgcgatgtctatgcagacgcccttcatcaccttgcccatgcctccttcgcctattggcggattggcggtgtcaacctcaaaacatatgttttttcttttctcttcttctccctgtagtcttatttttgccatttttttattgttgttttttcagttctttgcttgtaaaggtgttgtgtgttaataaacaggcaggccgtacttgttctcctcgtcactgtcggtggcaagaagtattatcagccatattgtgcctatgagcggtatcagcgatatgaaataccaccatccgctgtggttagtgtcgtgcaggcgcctgacaagcaccgataagtatggcacggtgagcagcaggatgcataatactgaacagatagataatgatatcgtgcagccgtcgtagcctcccagcagatagcctatgacggagaatatggtgagcgaaacgatctgcacaataaatgtgaaaagccagaaccaccagaattctgacctcgatgcgcgcccgctgaaggtggcatatttgtttatgcatgatctgactgaatctgtgaatgtcatgacaatatgtattataataaaaaatgtgccggaaccgctctgaccgctacctgaggcgcagcatgcaacgcgttgctgctgcagcctggtgtacgggcaaatccggttctgacacaacgttgatgaaatgttattgattctgctgtgtgctaagttcagaaggagtgaacactacggtcatctcgttgccttccatctcgtagacatactgaagtccgatagaattgcgcgacagtattttttacaagtttctgcattcccggctctgtcagcttctttgacagcgtgctcttcaccgagtctgccgcaacgttgctgaagcggtcgtcgcttacctttatcctgtatgtgaagaggctgtcgccctgcttgtattcacattttgtcagcaccgttccgttagcaaggtctttgcccggctgtgagtttatctcttcaacaaagttctgcagcagctcaatgtctttgttcttttgcttgcagcttacgcacaaagccgccgtcagcacggctatggcggcaaatatgattagctttttcatgttgtgtgtgttttacaggatattaaacgtggtggtgtaaattacgtcgcccgactcgatgacttccaccttgtattcaccggccttccagaatccttctttaggcgagccgaactgtcctaactctatcatctggttcttcttcgacttctcgagtgttactgtcatctccgaggttactttctttcctggcatgcagatggttcttt

SEQ ID NO: 1279 - DNA, 19895 bp, synthetic construct
  variation 11288..11289: note = n is a, c, g, or t
  source 1..19895: mol_type = other DNA
  variation 12043..12052: note = n is a, c, g, or t
  variation 11437..11438: note = n is a, c, g, or t
  variation 12202..12203: note = n is a, c, g, or t
  variation 11741..11742: note = n is a, c, g, or t
  misc_feature 1..19895: note = Synthetic
aacggaacgaagtaagtggtgggtaaaaactcacactccacaggacagcggggtggctgcacgcctgtggagtgtgggggatatgggtgtgccgctggccatgggggctgcggcagtggggtcaatagacggggaaggcgatttcgcgctcgatgacttggtaggccacgttgttgcgatagatggtttggcgcacccagttgtcgtcctcgtcgtattcgaagacatagctgtgtttccagttgaggtgctcgtcgtagttgaaggaggagagctcgatgaggttgtcgtggtcgtcgtagtagtaggtggtgagggccacgaggaagtcgtcggcgtcgtagaagcgccattcgacgcggttgccgtggctgtcgtatttgtagaggtagcgctgggtgagctcgccgtcgcggtcgtagaattccatttcggagttgttgccggcggcgtcgtatttatagacgcgcttctcggtcatggtgccgtcgggggcaaagctctgctcttcgaccagtcggttgttctcgtagcgggaggtctcctttttggtcatgtggtcgcccatgaagacggtgcgctcgatgcggttgccgttctcgtcgttgcggtaggcggtgcggccggtgagctggcgagcacggttgtactcgttccagccgagggcgtagccatgcacgtcgaagtagtaggaataccatgtgtattcgccatccttggtgcggtatttgtcttggaaattgccgcgtttgtcgaaggtgatggagtcgatgcagatgagctgacggcctccgttgcggcctccgtggatgtcgtaggtgtattcaatcacgtagatggcattgccgttgatgcccatttcctggcgggaggatttgcggggtttattgccggcaagagcgctgccagccaccagcagaatcaacgataaaacgatgtatttcttcattttaaacattattgtgcactataaatgatgttgcaaagatacaaatttttctttacttaaaacgcacactgccgtaaaatattatgtcgcgatatgttttttgtgtctatgttggtcggtaaatgtgttgtcgttacttgggctaatactgttggcaggttccaaatttagggctgaggtcacggttccatgaggctgtgttgacgacaagaacatgcccttttgcaatgagttctctattccatcgtgcggggttggggattccggcgggaatctgctcgcacattttctttcggaggatggaattcatggcatcatcgaggtttgtgaggaagacgtagactattggagaatccgtcttctcttcgccgtatcggtagaggaatgtgtcgcggaatttgtatttgaggtagtttaggaggaaatttgtggccgagcggctgccttgatgggttttgctgttttcctttttgaattcggcaatttccgcaggcggatattctttgatttctatccagagttggaatgtggggaattcggcaagcacgtcgacggccttcatgggtgcgccgtgaaaggtgggcgaggaaggctgaggctcatcaaacttgaacaatgccgttgcgttagggaagtcgaaacggactttttcttcagtcaaatcgagtgtcataagtccgctatccccctcctgatttcgtcgtctaagattctgctgaaagtttcatctatcgcattggggtacaggctgcccaaatcggaggacgattcatggcggactattccttcatcgtctttataaagggtgtggtaaaggatattgtcggcctcggttgcggcaaggtcgaattctttcagcaggacgtagtcgtgtgttgcgatgaaaatctgcactcccattctttgcagttcgaggagtatttggactacggtttgggacagttgggggttgagattggcctccggctcgtcccagaagagcatggtgcctttggtgagtgtttcgttttggatgagcctgtagagcagtcccaactttctgtagccttcggccaggagggagaattccaattcgccggaggaattccgcatgtagaacgtttcgttcttttcgacaactcggcctgacatggctttgttcagaatgttgagaagcttgactctttcggggctttgctttcctctgacaatggggaggaaggccttgtcgatgatatctaaatacacctcttcgaaggccaatttcttttggctgaacagcgaacggaagcccggcgcattggccagcatgtctttcacagggatgaagattgattccgcctggttgctttctttccaaaggctgtggcttactgaagttttgttgagggtggtgatgtcgcatgtgatagaccgttccctgttatcgtcttcgttccgcctgtacactgttacgcggccggttcccctgcccttggagcgatggaccaaacgcccgatagactgcggcatgaacacgccgttcaatttctgggcgaaggtgcggtcctctttctcgctcatcacagaacaggctgcatacaggactttcatgaggtgggtttttcccgttccgttcttgccaataaagatattgactcccggagcgaaggagacatcaacctcggtgaatactgtaaaattcgatgtcttgaaccgtgttagcatattgccttgaatctgtcagggtgtgacttgctgttttgtggtattaacggcttttcggctcaattattgtcttacagtgaagacaataggtgggcctgagggccgatgtgggctgagggcggggattagtgttgttgttctttgcgcttgtttttgccggcccataggtagaagaggcaggtggcggcgagggtgatgacggcgccgatggtatagcccagccagcgggggatgacggagccaaagccttctttctcggcaacgaagaggaagcagcccgtgaccatggtcatgaacatggcggggaggagtgtgatgatgtagggtttgcgtttctggcaaaggaagacggtgatggtccagagggtgacggtggcgagcacttggttgctccaggcgaagtagcgccagatgacgtcgaagcctttggcatcgatgagggagtagaccaggacggcggcggtgatggcgaagatgggcagggcgacaaagaggcggtttttgatgggtttttgctcgtagtggaggaaatcggccactatgagacgtgcggagcgcagggcagtgtcgccggaggtgatggcggccgagatgactcccagcacacagatgacggcgatgactttggggaaccaggtgttggcgatgacgcccaccatggcgttgccgcccagggtggcgccggtttcggggttgacggtgaggtgctggagcatggggtcgtggtagaagacggtggcggcggcagcccatataagggctacgatgccctcggtgatcatggctccgtagaagacggggcgcgcctggcgttcgttggtcatgcagcgggccataaggggcgactgggtggcatggaaaccactgatggcgccacaggcgatgctgatgaacatcatggggaagatggggttgtgggcagcgtcgggatgctggttttgcaggccatcccagagttcgggcagctcggggcgatagaccaggaaggccactacgatggccacggccatgccgaggaggaggaagccgaagatagggtaaatcttgccgatgagtttgtcgatgggcaggagggtggcgatgaggtagtaggcgaagatgatgcccacccagaggaagatgttccagtcgggggtgaaattgttgttgagcagcacagccggggtgttgacaaagacggctcccacgagaatcatcagcaggacggtgaagatgcgcatgaactgtttggggccgttgccgaggtaggcgccgtggatttcgggcagcgaggcaccgtcgcgacggatggagatgacgccggcaatgaagtcgtggacggctccggcaaagatgctgccgaacacaatccagaggaacgaggccgagccaaactgggcgcccatgatggccccgcagatgggaccgacaccggcgatgttgaggaactggatgaggtagatgcgccacggtttcatgggcacatagtcgacgccgtcgggatgggccacggcaggagtcgtacggttggggtcaatctccactatccgctctataagcttggaataaagcagatagccaagcactaataacacaatagcaagtagaaatgataccatgatatttaattttttgaacctgcaaaggtacatattttttttcatatagcacacttttttctgttctgacgattttgaggggtggcggcaaggggtcgtgggcgaagataaatttgcacggtattagaaaaaaatgtaactttgcctgataaaaacaagaaaactttctcatcatgaaaaaaagcttatcaattgtagtcatggctgttgcgctgatgggcagcgtttcggcacaaacccctaaaagttctttcacgctgaacacccgcgcgtggtcaaccaattattggaccacaatcctctacggtttggcgcagggcacggtgacctattttgcctttgacggcaacgcgaccgactcgctcatagcccgcgccgtcatcccggcggccgactgggtgttccccatcgggatgcagaaagccggttttgccggccccaacgacatctacgggccttaccaccgggcgttcagcaacccctttaaacgtccgggcgactacggcatcgggctcgacgcatcgtggaaaccatcggccatcggtctctatgccggcgcctatttcaagagccaggaggtgtgcttcatggctaacgatgccagtctgcgcggctactatttccagccacgcgccggagtggtgctcggcgggaggaagaacgccattgaggctggcgtgttctacgacaaggtggtgggctgcggcggcacctgggaaccccgctcacaggatatgctgctgggcggctggggactggactttgcgctgtcacgcaccatggccaaaggccgccagaaaaccgtgctcatgttttccatgcccttgcacaacttcttcaaccccggctatgccgacggcagcctccggaacctaaaccgccgcgtgggctacatcatactcacccaccgcgtggtgctgtaaaaccacattcctcctgctttgagggggaaagggctcagaaaggggacatgggtgttgtcttcaggccacaacaccctattccacagacattcacatttggagagggcaaccctgcggcggccctctcttcttattttacccctgccatctgcccaactcacaggcaaagcacagcatcgaaaatattaaaactcctcggccatacatacttttatgcctgaatgtgaaaatatttttgtatctttgcactttcaaaacttgattaatctatggcaaaagttcttggtcttgacttaggctccaacagcataggttgggctgttgttgacaatgaaaggcattgcatcgaatctgctgggtcacgcataatacccatggacgcaggacgtttgggcgattttgaaaaagggaactctgtttccttcaccaaagaacgcacccagtacagaggtgcgcggagactgcgtgaaagatacctgctaaggcgagaaagactgctgcgggttttaagaattatggggtttcttcctgaacattttgcgtcacagctgtcgcgctacggcaaactgccggaagataaggagcccaaactggcctggcgcgaggggaaagacggtaaactggattttatattcaagtcctcgtttgaggagatggtcgaagacttccgtcaagcagggtctgacaacaagataccctatgactggacaatctattatctgcgccaaaaagcactcacccatcccatcagcaaagaagagctggcatgggtactgatgcaatttaatcaaaaacgtggctattaccagctgcgtggcaaggccgatgagggtgctgccgatgcagaaagcaagaacgagatacgctcttaccatgagctgactgtgacaagtgtggcaaagaccgaagaacatgacaagaaaggactaacatggtatgacatcacactggagaacggctggatataccgccgagcattcagtgtgaaacccgactgggaagggaaaacgcgaggctttatcgcaacctttaagcttgacaaagacggcaaccccaaagaggagactccccggctgagttcgcccagcgacgacgactggggccttcggaaaataaagaccgagaacgacatacatgaatctgggctcaccatcggggcctatatataccaaagtctgctccaccaccccgacagaaagataataggagatttcgtccagactattgaccgcgagctctacaagaaagaactactgcaaatattggagacgcagaaacagttcatccccgagctgaacgacgagcaactatatgccaactgcatagaggagctttacccttcgaacgatgcctaccgcaccagcatcgccaagcgcgacttcatctatttgctggtggaggacattcttttctaccaacggcctttgaagagcaagctgagtttgatagacgattgtccattcgagcaacgaaacagcaagcctgtaaaatgtgtggccaaatctcatcccatttatcaagagtttcgcctctggcagttcctgtccaacctgcatattctgcttgacgatgtcgacatcacccccaatctgttgcccgacggagacgcttacgccgacctctacgactacctgtctaccatcaaagaagtagaccaatccgcaatgctccgttacttcaaaatcgggaagaaagagatgccacgttatcggtggaaatatgtgccggaccggaaatatccggcaggcgaaacccgagccacactgcttggcggtctcagcaaggcaggcattgacaagggtttcctttcccccgaaaaggaactccaactgtggcatatcctctattccgtcgacgatcagcagcagtatcgcaaagcccttcgcacttttgcccacaaacaagggtgggacgacagccaaaccgaccgtttcactaaggccttcgaccgactgaccgtatacaaagagaaagactacggagcctattcggccaaagccataggcaagctgctgcccttaatgcgccgaggccgttattggaatccacaagacatcgactgccaaacccgacaacgcatcaatcacatcatcacaggagaggaggacgacaccctcacgtcctcggtaagagagaaattcgaggggcttgaaagcatcgagcaatgccaaggattggccccatggcaagcctgctacttggtctacaaccgccattcggaggccatagatgcccagcggtggactaagcccgaggacatagacaattatctgggccaattccgccataactcacttaacaaccccgtggtggaacaagtggtgacagaaagtctccgcgtggttcgcgatatttggaaaaagactggccacatagacgagattcacatcgaactgggacgcgaactcaagaaaacgcagtcggaacgccaaagcctctcgcagtcaatccttgaaggggaaaccaccaatcagcgcatccggctgctgttgaccgaactcatgaaccccgaattagaggtggagaatgtgcgtccccaatcgccatcgcagcaggagattctgaaaatatacgaagaaggggcgatgcagaacgctgacgagattcccgactacatcaaagacatccagaaacgcttctccgatgcaaaaaagcagcccacaccagccgaagtcaaaaaatacagaatctggctggaccaacgatacatatcaccctacaccggacgtcctatacccctcgccaagctgttcacccccgcctacgagatagaacatatcatcccccaaagccgctggttcgacgactcgatgtcgaacaaagtaatctgcgaagctgaggtgaacaaactcaagggtcgtgagctgggacacgaattcattgtccaccaccatggtgagtcggtccctctgagcctgggtggagaggtgaagattcttgaagtcgaggcctacgaaaaactgataaaaagcaacatcaccaacagcaaaaagcggcagaaactcatgatggacgacatccctgacgatttcacctcacgacaactgaacgacagccgctacatcagccgcctgatgatgcatctgctctccaatatcgtccgctccacagacgaggatggaaatcttgaaaacaccgctacatccaagaatgtcatagtctgcaacggctccatcaccgaccgcctgaagcgcgactggggcataggcgatgtgtggaaccgcatcatcttgccacggtttgaacggatgaatcgaatcaccgaaaccaccgactataccgccaccaccgacagcggccacctcatcccccaagtgccactccacatgcggcaaggtttcaacaaaaaacgcatcgaccaccgccaccacgccatggacgccatcattatagcctgcgccactcgcaaccatgtcaacctcctcaacaacgaaaacgccaaaagccaacaacgctacgacctacagcataccctacgcacaaaagagacctatgtcgacggacagggcaacacccgcacccgtccgggcgactttatcaaaccctggcccaccttcaccgaagatgtctaccacgtccttgaaagcatcatcgtcagtttcaagcagaaccaacgcatcatcaacaaaacttcaaaccactacaccgtcatccggaacggcaaacacaccggctgcccccaaaccaaaggtgacagctgggccatccgcaaaccgctgcacaaagagaccgtcttcggcgaagtaaaccttcagctaaaaaagaaaattaatctcaaagatgccatcaagaaccccaacacaatagtcaatcgcgaactgaaactgaaaatcaaagaacaactggacaagggctactctgccaaacagattattgattattatgacaagcgaaaagatgtatggcccgaagccgccgacggcaaagtggaagtatactattataccaaggacactaaggaccgctatttcgccacccgcaaaagccttatagacctttttaaagatactgctacacagccagctgctactaaaatcatcgaaagcatcaccgacagtgggatacgctccatcctctacgcacacctcgccaacgaagggaacaatcctgtcgaggctttctcggccgatggactggaacgaatgaaccgcaacatccgcaacctcaacggtggccacgaccacctgcccattaagaaaatccgcgtatatgaacaggccaacaaatacagcgtaggcgcccatggacaaaaggccacaaaatatgtcgaagcagccaaaggaacaaatctattctttgtcatctacaccgacaagaaaggctcgcgtggatacgccactgtcccactgaatgtaatcatcgacttgcaaaaacaatacgaaaaacagtggagagcacaccttgctgaaaggctgcaacaagacgaccttgcactgatgccatctgattcaaccttactatacatcctctcaccgggagatctggtctatgtgccaagcgaggaggaacggaagaacggcattatctctttggatttaaaaagagtatacaaatgcgtgtcagccacagggaagcagtgtttatttattccctgtcccgttgcctcactaatccaaaccggaaaagaattcgaagcacaaaacaaaatagagcgcgcactgaccaaggagatgattaaggaggtttgcatccccattcagatagaccgcttaggcaacatcatcagaataggacaatagccatgataaagcgcacactctgtttctccaaccccgcctacctctccatgcggaaccgccagctggtcgtccgcctcgaaaaggccgacggccagccctcgccagagactaccatccccatcgaggacatcggcatggtggtactcgaccaccgccaaatcacactcacccacggcctcatggccgccctgttggacaacaacgcctccgtcgtcacttgcaacgaaagccacatgcccgtaggcctcatgctcccactcgacggccacaccatccaaagcgagcggttccaacaccaactcgctgcctccctcccgctgcgcaaacagctatggcagcagacagtgcagcaaaaaatcctcaaccaagccgccctccttcgtcagctccatcaggccgaaacgggcaacatgcaacaatgggccaccgaagtgcgctcgggcgacagcaccaacctcgaaggccgtgccgccgcctactactggagccaaatgttcgccagcatccagagtttcacccgtgaccgagaaggcctatatcccaacaatttcctcaactacggctacgccatcctcagggccgtcatcgcccgcgcccttgttagcagcggcctcctccccaccctcggcatccatcaccacaaccgctacaatgcctactgcctggccgacgacatcatggaaccctaccgccccttcgtcgaccgcttagtagtgcaaaccatcgaccaacacccaaacacagctgaagtcaccaccgacatcaaacgctccctcctcaccatccccacactcgaagtgcgcatcggcggccaacgcagcccccttatggtggccgcctcccagaccacatcctccctcgcccgctgctacgctggcgaaagccgcaaaatctcttatcccgaaatgtgatggaccgcttttcagaataccgcatcatgtggctgctcgttttcttcgacctccccaccgacaccaaaaaggaacgcaaagccgccgccgacttccgaaagcacctcctgtccgacggtttcaccatgttccagttctccatctacgtgcgccactgcgccagccgcgagaacgccgaagtccacctcaaacgagtccgctctctcctgccccaatacggacaagtgggctgcctcaccattaccgacaaacaattcgccgacatcgaactctatgtatgcaaaaaagaagtgccacccaatgctcccggtcagcaactcgaactcttctgacaaccctccatccgcatagaaaaggaaaaacatccgccacaaataaaaaatcccgccacaaaggacgggattttttattccattgacatacttctggacattctatatcaattagatacgcacatcgtggtgtttatcgtaagtgtcaannctttttaagcaattcacaaccaaagaggtacacccgaaaaaataggctgtggtgtttatcgtaagtgtcaatgtcctctttttaagcaattcacaacacaaagatgaacacaaaactgaacagcaaaggtgtttatcgtaagtgtcannctttttaagcaattcacaacagcgtgtgagcgatatggtcaactacgcccggtgtttatcgtaagtgtcaatgtcctctttttaagcaattcacaactgttcaaagccatacatcgccgaatggtggggtgtttatcgtaagtgtcaatgtcctctttttaagcaattcacaacaggctcgattggctaatcattaacaaaaaggtgtttatcgtaagtgtcaatgtcctctttttaagcaattcacaacgggcagcagatgaggagggcagagcgatagggtgtttatcgtaagtgtcaatnntctttttaagcaattcacaaccgaacccgctactatatagcgggcaatacaggtgtttatcgtaagtgtcaatgtcctctttttaagcaattcacaactaaccatgctgtgatgtcgtggccgaccaggtgtttatcgtaagtgtcaatgtcctctttttaagcaattcacaaccgtaggcttccaatgcccgcatgatggccgggtgtttatcgtaagtgtcaatgtcctctttttaagcaattcacaacggcggtggcctcgccactgtagctgcccgggtgtttatcgtaagtgtcannnnnnnnnntctttttaagcaattcacaaccagaaaagtacgtaaagaggacaccccgggggtgtttatcgtaagtgtcaatgtcctctttttaagcaattcacaacatatgttcatgaaagctaacgccgctttcgggtgtttatcgtaagtgtcaanntctttttaagcaattcacaaccggccatcggtgccggtttgccatatctcggtgtttatcgtaagtgtcaatgtcctctttttaagcaattcacaacttgtgatggaacaggagggtgccgttggcgggtgtttatcgtaagtgtcaatgtcctctttttaagcaattcacaacagcctcgccgagaagtacgtaaagaggacaggtgtttatcgtaagtgtcaatgtcctctttttaagcaattcacaacctatcgcctcgacggaggtctgtgatagaggtgtttatcgtaagtgtcaatgtcctctttttaagcaattcacaactgaaagggtgtcgatggcgtatttagcaaggtgtttatcgtaagtgtcaatgtcctctttttaagcaattcacaaccaaggcggtgagcggcgtgagcgatgcagcggtgtttatcgtaagtgtcaatgtcctctttttaagcaattcacaacataaagatggatgacaacacggtatggtaggtgtttatcgtaagtgtcaatgtcctctttttaagcaattcacaactctttcatgatgtgttgtgtttttgggttggtgtttatcgtaagtgtcaatgtcctctttttaagcaattcacaacctgcttacttgggcagggtctcagagttggtcagttttagaaaaaggggacggagaactatgttccccgccaccttagtagttttcacaacggaataatccttattgtgaattgcttaaaaagtattgcaaaaatacgaagaaaaaacgacatacacaaaattattcaacaaaacactatgtaccagctattttctcgccgagcaccatacatttgcatcgccagagtttagtgctgaagaatctgtttggaacagtatttgaaaccgaagatatagcaacgggaaaaaggcatgaagacgcctccacataatcgaacagaacgtcctgtttgaccgtaaacgcacttgaactggaatcttcggcttactgattcaccttgtagccagcatggccagccacaaccgaagcctttgaggacaatcggaactatgtctcaacgcttatccgcagtgtacatgaccacgagatttgttctacataagttaagttgtgacggtatgggacggcgtgtggggttggggctttggtggtaggacgagggcatgggctgcgtttctatcgacttaagatgggggatgggggacgaggacttcggggttgcaggtggccgcttatatcggttgtcctttgttctttattcctgttttgattctcttttatttctgaataagaagtcaaatgggagccaatacctatagacttattggaaaagtatgggaacgagggtatcagtgattattggttgtcttaatgggcggcctaaggcggtccgatagcaggtttggctgtggagtgcctggctgagcgaggttgcggagagggagaagagggcaggcggccaaattgcggaactggagaagactttggggcgacgtgggtggggctgagggggttgcatttgtttggtcttttccttctccgcgccactggggttggggcggggtgtgggtcagatgtattttgaaaagaggttctgtaccagttcttggtcggccgggagccactggacggtgggcagttggtcggcggtgagccagcgggcggcgaggtgttcgttgagggtgaacgagggggtggtgaggtggcagaggtagcagtgcatggtgaggtggaagtcggggtaggtgtattgtaccgtggtgaggagccggaggatttggatgtcggcgtcgagttcttctttgagttcgcgggcgagggcttggtggtgcgattcgccgtttttgatttttcctccgggaaattcccaccagcctttccaggggccgtagccgcgttgggtggcaaggacggcggccccctgctggcacacagcggccactacctcgatttggggcagggactgcgcaggggcaggggttgaatcggactgattggtcgagggggtgttcatgggttgcagtggtttggaaaaaaatgctccgccaacccgtggcggagcacaaaaacaaaaattatgaaacaaatgctattgtatatcgtttttgtcgaggggttgggacaggagacctgtgaagttgccgcccgagtcgaactccatgcgggtgtatttgagtttgttgcccagaccacggactttctggcttatgaccacgtaggtgtagggtttgggttttttgccgtcgacacgccatttggagtcgtaggtgtagactatcatgcgttcgattttgtagctctcgcctttgtatttctgttcgaggtatttgacgatggcggcggtgtagtggtttttgtcgagcactttgccggacatgacatgggcgtcggaggccacgtcgtatacttcttccatttcgacgccttggcggttgatgtagtaagccacgacgaggctgggcacgcggttgacccattcggggccttcgaccactttggagggcgggcagattttggcgaagtgggcggtgatggtgggtgtagtgtcgatttggatgacttcggggacgtcctcgacgggagcgggacgtttgccgcctttgttgcttttgaggttgcggagatgctcgtcgtcgacatcgtcgtcggggttgttgagggtgtagaactcacgctttacggcgtcggggtcgggggcgttgcttttctgcaggcggccgcgggggtcgaagataagctcgttgtcgtcgtatcccacgccggtcttgacaatcatcatgcggtagtatacgtcgccgtccatctgctcaacatagtcgatggagcggatgcggtagccggggtagttgtcaataaagtagcggttcatggcggtggggcagtcttcttgtttggtggggaaggagctgtactgccagtcgccgttgtgggtgaagaaggcacggccgtgctgcccgtcgtagacgaattcggccacatattgtccgggtgaacgataccaggtcttcaccttgtaggagtcgtactttctgtccagggcgttcaaaacggatttgggcacctgggtctctttaatcttggtctgagccattgtggccaatggcaggaccagaaggagcaaaagaactatctttttcatttattcaaaatattttgccctcaaaacgagctatttgtttttttattgcctcaaaagttaaaaaaatattcgccggcgaacacaaagtgttggattacagcctgattccatgccatattggatagttgacgggctatttgaagagtacgtctttgcggtcggggctgatggagacggctttgacatgtacaccggtggcgatttcgatggcgtcgaggtagttgaggaggttttgggggagtgctttgtattcggtgataccaacaaggctttgtttccatccggggaaagagcggagttgtggcttgatttccacctcgttgaattcgaagggaatctcctgggttgtgaggccgtcgatggagtagttgacacacatcttgatttcgtcgaagtcgttcatcacgtcgggtttggtgacgaagaggtcggtgacgccgttgagcatgcaggcgtagcggagggcagggatgtcgatccagccgcaacggcggggacggcctgtggtggcgccatattcgtggccgatgtcgcagagttgtttgccggtttcgtcgaagagttcggtggggaaaggacctgcgcccacacgggtgcagtaggctttgctgatgcccatgacgcgtcctatgcgtgagggggctacgcccagaccggagcagacgccagctgtgatggtgctggaggatgtgacaaagggataggagccaaagtctatgtcgagcatggagccctgggcgccttcggccaggactttcttgccttggtcgaggcagtggttgatgaagtattcgctgttgatgagctggaattgcttgaggagcgtgagagagtcgagccattgcttctcataatcgtcgatggccatgccgtcgattttgaaggaggcgatgtcgaaattgagggtgtgagcggtctggaggtgctgacacttgaggagttcgtatttttcgcggaagtcgatggccatgatgtcgcccacacggaggccgctgcgtgcaatcttgtcggtataggcggggcctatgcctttgagggtggagcctatttttgcattgcctttggcctgttcgttggcagcgtcgaggagcctgtgggagggcaggatgaggtgtgccttcttggagatgaacaggtttttggtggcgtcgacacctttctggcggagagcctcgacttcgtgtttgaagatattgggttcgatcagaacgccgttgccgattacgttcagtttgtcttcgtggaagataccggaggggattatgtgcagaacgtgcttggtgccgttgaattctaaggtgtggcctgcgttgggaccgccctggaagcgggcaataacatcatagtcgggggtgaggacgtcgacgattttgccttttccttcgtcgccccactgaagacccagcagaacatctacattgctcatagtgatatgtctttttgcgttgttagtgtttcaatatcgtatgcaaagatacggtttttttttcaattagagatattttttcttcagcgggtgcaatgccttggttttatgtactgatttatcagcctgttatcttgttggtcttggggtcacagctacagggtgtggatgctggcgcgcttgcataagcgggtggcagcttgtctggttcacacatttgggggcaattgcactgcggggtcacccattggctttgtcccgctgttgcttgaaccattccacaaattcggggaggtcgtcgagcggacggaaaccggccttgaagggttctttgggcatgggacagagctcgacatagccgatgagggtggtgcagtcgaactcgccgatgagtgcctcgatggtgacatagacgccaaccaagaggtcgtcgtcaagctggtcggggcggggactgatgccgttggcaaggtcgggcaaggccacgcgcaagcctatgatgtctggctcttcttcgttttcgagctgcatgaaggccatcttggaggtctcgaaacggtatttgtcaaaaagcactttgagggctttgcctttgggttggcggaaggggacgaactcccaccagtcgatgtcgggagcattgtcggtgagttcgacaacatagcggaagaggtcgaaatcgccttcggcgctgatggtgagggtgcggccttgggcggtttgctcgcctatttcgaaggtgaggccgccgcagtaggcggaaagctgttgctgcatttggtcgatgagttgctggcgggcaggttcgtcaaggtcgttgagcatggtgagacgctcgctgttggctataaaccagttccagaattgttcgggatgtttgtcagtagggttcatgggatgaagtttgtttaaatgatgattgcttctttttcgagggtgacgccgtagaggcgtttgacgtcggccgtgatggcgtcggccagggcgatgacttcgctgcctgagcagccgcccagattcacaagcacaagagcttgcttctcgtatacgccacagcgtcccagggtgcggcctttccagccggcatgttcaatcagccaaccggctgcaagtttatagccatcggccacgggataggccacaatgtcggggtggtgggttttgagttgctcgtagtgctgagaggtgacgatggggtttttgaagaaactgcctgcactgcctgtttcgtcggggcgcggcagtttgctccatcggagtgaggccacagtgtcggccagctgacgggccgtcgggtggacaagccccgcggcggagagggcgtcggacaatgctttgtagttgacctggggggtgaaggtggagctgagccggaaggtgacggaccagactatgtactgcccttgaagggactgtttgaaaatgctggagcggtagccgaactggcattcggcattggtgaagactttttcttgcccggtggctgtgtggatggcgcggacggaatggatgatgtctttggcttcgagaccgtaggcgcccacgttctgaaccggggctgcccctacagtgccggggatggcggccaggttttcggcgccatgccagctgttggtgatgcagtgctgcacaaaagcgtcccattgctcgcctgctgctgcctcgacgaggagagtgccagaggtggagtcggtgctgagcagatggattcctttgttttcgagatgcaggatggtgccatgatagtggcccgtgaagacgacattgctgcccccgccaaggacgaagaaaggagcgctggacagtgtgccttgcgctatcaggtcgagcagctgctggcggtccgtcacttcaatgtagtggtcagcggtggcgggaatgccgaaggtattgtatatcatagggcgcagaacgggttagaaaacatatccgatattgaggtaaaggcttgccctgtgggtgaagtcgttccagttgaagtcgagcgatacggggcccagcgggctgtcgtaggccgctcggagggcgaatccgaagttgaagtggtgcgatgcatcaatacgtctgggccagtcggacgagtagatgacgttgggcatgaaatagaggtagactttactgaacagctgatagcggaggtcaacgcgggcaatggcggcgaaatcgtctacccgaatgggcctgatgagacccatgaaagccaactgatggtcgaggtaacgcccagggacgctgccgcccaccaagttgtcgtaccatgcggaacttttgctcaccaccagccgtgaattgagctgggggataacggtgagagtgggtgtgacttgcaaataggtctgtgcggagatgttgaagtcgagaaagctgaggtcgagctgtcggaaaaggttgttgttgtccacatgccacccgatgtcggccaggccataaaagccgcgtgtggcgaaataggcattgtcgagattgtcgaaaaggctgtggaagaaagccccgaagaaccctttggcattatcgaaatggaacatgccgtcgtaaagcacgttgtcgagcgagaagctgtggccgttggagtagaagttttcgtcgataccaaaggcgaaagtgacgtcacgcaggtggaactcggacaggaaaaggctgaagttatggtggtttactttccacacggagtagcgggacgtgtcggacaggctaaggttgagggtgcagttgtggtagcgataggcgaagttgatgtcgccgagacccatattgcaccatgacaacttggtgccaagacggatattataattgaggttggcgtcgatacccaacttgaagcctgacagccgctgctcgttgatgccgagatggaacaggagggcagccttttcctgcgagtcgtagcggaagcctaaggatagcaggtggggctcggccggttcgaactggatgagcagacggtaagtgttgagagaggtgtcgactggtgaaaccgtgtcgtcgggcagcagtttgtataggatgctggcataggactctgtgcccatcagaatgccgatagcttcctgtatctcgtcgatggttgacacggtgccgctacgcaatccgcttttgttgatgagccagtgggca

SEQ ID NO: 1280 - DNA, 19745 bp, synthetic construct
  source 1..19745: mol_type = other DNA
  misc_feature 1..19745: note = Synthetic
tatgtcggggatgttttccgtttgggcaggatgtcctccggagcttattgatgtaacatgttttaatatgcgccgtcgcttcggggctgtggaaaatttgcaaaaataggagctgaatgttgtggaaattttgggctttatctgtgtgaatacgcttgtttatagatttttatcagcttcaaaattgtagcaaatgtgtaaacaaatcgtgtcggaaatgtatcgtgtgccgtcttttcctttgtttatgtaacgacaagaaccgctacatcccgatggacatctttccggccgacctgctggacaacgagccgcaggtgttcaccgacatctatgatgctgtgttcagcttccatcccgcgtcggaagggcggggcagcatcgccaacccgaacacctacatctcgcgcgaagacatcctggcgtagtatgcacaggccaagctggagatagccaggctggagatattgggaggcgttcgcatcgagcgcacccgccaacgctatgagacggtgatggatgagagcttcgagggacggacgggtaatagccgctataccgatgtgctccccgcgctgcacctgaagtatcggttgaccgacaagcagaacctgcgctcatcctactacatgtccatcagccgtcccggcttcttcgaggtaatcaattaacttcttagaccatttggattatgacaaagaaaccgtttattctcttccttgtgatgatgtttgccctggcggcccatgcgcaattacactggccgtccgtcactcagacatctgacagcacgttggccgctcaggtcaatgctgcttatgcatccgactgccgctggcagcgtgtcaccttcgcacagaaaagtgtcgactatcttcgcacgctcagcatgggcatccccgcctatggccgtgagccggacggggactatcgccggggtgtcttcctcgtggaagcagccattcatacggtggtggacagtgccggtctgaaagcggcatatgaagaatgtatttcgcgtgtcggaggtatccgtcttgctatgcctgaagaaggagaatgggtcgttgtgggttgcacggaccgcagtcggttggggggggagaagtctgccgccgacgtgagtgaagtgtttgtcaataggcagtttgtgcttacagaagaagccggctgctatcgcacgttgtcacctttatatgtctttgaccattcgatgatgggagtcgtcgagttgaagttccgtcgcgatgtgccagctgaccgtgtggctgaggctgcggcaaactatgtgcgcatcttgtcccagtgtacgccggactacggtgaactgatgtctccctttgatgaggggtttcgtcccggtgatatgctttgccagaaaatcaaccagatggtcctggcacggcatcctgagttgctgatatactccttgcacatcgttgacccggcagacccgaaacgggaaaaccgtcactatgccatcaaccggcccaattttcataaagagtccggcccgcttacgcttgacacggaagtgacgggcaaggtatacgttgtcatgttaccctattcgcatcacatggaaatgcacttgccgttgattgacaagcgcggacgttttgtgggagtcatcgtgtgtggctacttgtatgattcgttgaaggagggcgtagactgttttgcccgttcgttctccctgatggatgagaccacgcgcctgatgcccgacacctttgccgacctgttcaagccctgacttcagagcgaatagaccacacctccgatagccccgcagatgacgatgagcaggatgggatgcaccttgaacttgtaggacgcgacgaatgtgccgacaaagagggtgatgctcaatacgaactgcaacatcgacgtgtcgggggtgctgaagttctccggagtcatcagcaggagagctgaggctgcaagcagtcccaccacggctggacgcaagccgcggaatacagactcaactgtgggatgtttctgaaacttaaggaagtatttgctgatgatgagcatcaagacaaacgatggaaagcagacggcaaacgtggcaatggcgctacccagtacgccgagagccggagaataacctgcttggacgatggctgaatatccgacgtaggtggccgaattgatgccgatggggccgggagtcatctggctcagtgccacgatgtcggtaaactccgagctggtgagccaaccgtagcgggccactacttcgccttgtatcatggacaacatggcatacccgccgccgaagccgaacaggccgattttgaagaacgtatagaagagttgaaggaatatcatgcttgcttgtttttatatttttcatagcgtccccagaggaagcctccgatgcccgcaatgacgatgacatagataggcgagaatccccaagcccatatcaggagtgctcccaagaccggaatccagacgttgtaacggttgattttgcttgatttggctacggtgaatgtcggggcggcaatcagtgccacgacgcccgggcggatgcctttgaagatgttttccaccagagggtattccttgaagttatggaaaaagagtgcgatgagcaacatgatgaggaaggacggcaggatggtgcccagtgcgcatgcgtaactccccttagtgccccgtagcttgtagccgatgaagatggcaatgttgaccgcaaagatgccgggagccgattgcgccacagccatgaggtcgacaaagtcttcacggcttatccaccgacgccggcggatgagatcttcttcaatgagtggtatcatggcatacccgccgccgatggtgaacatgccgattttgaagaagagcaggaagaattgcaaatagatgttcatagggagattcattagaaaaaaggtgcgacagagccggatgctggtttgcgaatcctacatgtgcatccggttatatggggatatagatagaaacaaggatgtgccagtagcagcacatccttgtcataaacctaattataaaccattaacacctttgtgggattccacccaacgacgggcgttcacgaaagcttcaaaccaaggagtgatttggtcggaatgcatgcgttctgccgggtagtaggcattttgccaggggaagaatgcacgttccaagtggggcatgatggcgatgtggcgtccgtcggcgctggccagtgcagcgacggaatagtcggagccgttcggattgcctggatattcgtcatagctgtatttagccaccacgttgtacttgtcttcgtcgtagggcagtgagaacttgccttctccgtgggccacgaagatgcccagcttgcatccgctcagcgaaccgaacatcacgctgcggtttgtcgggatggtcagtccgacgaaggctgactcgaacttgtgcgagtcgttgtggagcatgtgtccgcgcttttcaaattccggattgataaggttcagttccatcatcagctggcaaccgttgcagacgccgagcgaaagggtgtccttgcgggcgtagaacttgtcaagcgcttctttggctttggggttgaagaggaaggctccagcccagcccttggctgaaccgagtacgtcggagttggagaatccgccgcagaagacaatcatattgacgtcttccagtgtttcgcgtccgctcacaaggtcggtcatcgttacgtccttcacgtcgaatccggccagatagagcagataggccatttcgcgttcgccgttcgttcccttttcacggatgatggcggcgtggatgcccgaaggtgtgcggcggtccgggtctacgccatactgtgagaacttgccggtgaagtctttgttgaagaccatttcaagcggttgctgcttgtagttctcgaaacgcttcttggcgcagccgttcatgctctgcttgcagtcgagcaggtaggaggagtaataccacacgtcgcgcaggtagtcgatgccaaactggtacgtggcgtcgttgtgttcgacgaggatgtggcgttcgtctgtgggcgaaccgagtttgacgtagcccacgccagcctcttccaatatcttcttcacttcgtccttgtgcttgtcgctcacctggatgactacacccggattttcggcaaagaggattttcacgaggtctttctctttaatcttgttcaggtttatcttgagtccgccttccacattggcaaagcacatttcgaggagtgttgtgatgagaccgcctgcagagatgtcgtgtccggccagtatcaagcctttgttcacgagttcttggatggccatgaaggcatcacggaagtattcgggatttgtcaccgtcggcacgtcgtcacctactttgtagagcgactgtgcgaaagccgagccacctaagctcaatttgtcaaagctgaaatcgacgtggtagagcgtagtcttcggattgttgaccaggacgggggagaccactttcttgatgtcggacacttcgccgccggctgacacgatgactgtgcccgggctgatgactttttctccattgggatacttctgtgtcatggagagggagtcttttccggtcgggacgttgatgtgtaagtcgcagcagaagtctgacagggcctttacggctgtgtaaaggcgtgcatcctcgccttcttgtgagcggcaaggccacatccagttggccgagagcgagatgctgtccatgccgtcggccatcggtgcccacacgatgttggtcagggcctcagctacagccaacacggaaccggctgcagggttggcgagagcggcttgcggagcgtgcccgagcgaggtggcgatgcctttttcgccgcggtagtcgagggccacgacaccacagtcgctcagtggcaactggatttctccctgacattgctggcgggcaactttgcctgtcacggaacggtccaccttgttggtcaaccagtctttgcaggccacggcttccatctggagcacgttgcgcaggtattcattgagtttgctttgttcgtaggtcacattctcgtagtgatgttccacggtgttgtccaccatgtaggttttcggtgaagaaccgaacatctggtcgactgccaggtcgaagggacgcacgccgtcagcctgttggaaagcgaagcggtggtcgcccgtcgtctcgcccacttcgtacatcggggcgcgttcgcggtcggctatctttttcacgtgttcgatggctttttcgtcgatgagcaggcccatgcgttcctggctttcgttggcgatgatttctttggccgagagtgtgtggtcaccgataggtagcttggacatgtcgatgagtccgccgcagtcttccaccagctcagacaggcagttcacgtgaccggccgaaccgtggtcgtgtatggagacgatggggttcgtatcctcttcgcacaaggcacgcacgacgttgtaggcgcgtttctgcatttccgcattggcgcgttgcacggcgttcagctcgatgccggaggagtagcggcctgtgtccacggacgacaccgaaccgccaccgaggccgatgcggtagttgtcaccgcccatgaccacgattttgtcacctgcttcgggagtgcctttcaggcagtcgcgctgtgtgccgtagcccacgccgccagcgagcatgatgaccttgtcatagccgtagaacacatctttttctttatgttcaaatgtcaggaccgagccgcagataagcggttggccgaatttgtttccgaagtcggaagcgccgtttgaggctttgatgaggatttgttccggtgtctggtagagccatttgcgttcgggcaattctttttcccaggcacgtccgggttcggtgcgcggataggaggtcatgtagacagccgtgccggctatcggccatgaacctttgccgccgcccatacggtcgcggatttcgccgcctgttcccgtcgaagcgccgttgaatggttccacggtcgtggggaagttgtgagtctcagccttgagggagatgactgtcttgatgtccttgatgacgaagtagtcggacgtcgagtggtcagccggtgcgaattgttccacgacaggtccttccgcgaaggccacattgtccttgtaggcagagattatcttattggggttttcggcagtggttttcttaatcatctggaagagtgatgactccatctctttgccgtcgatgatgaatgtaccgccgaagattttgtggcggcagtgttcggagttgatttgggcgaagccgaacacttccgagtcggtcagcttgcgtcccaggtctttttctactttcagcaggtagtccatctcttcgcgtgagagtgccagtccttctttctcgttgtattcttcgaggttgtcgatatacacgatgggctgcggcttgatgttggtcgtaaagacattttgcgtcagcccgtgatacaggcgttgcaacatggggtcgtagtcggcatgttcgtccttgaccgggaaatattcctcgattcgcgcaatgcccgtcaggcccatgttttgggtgatttcgacggcattggtactccaaggagtaatcatttccttgcgggggccgatgaaatatcccgtcaggttctcttctttttcaagagttgcgtcaccgtagagccagcacagtttccggatgtcgtcagcattcagttcgcggttggcttcagttgcaatcacagagttagtggatgttctgaaaaatagaatcataatagatatatattggtttttattgtcctttggaattttgcattttatatgtccgcaaaagtaggcaaaatccgtgaggtggcaataagaagctgttttgaatttctacaagaaagttgtccaagtccttccaagtcctgtcgtgtttcggctttcgtatgctctttgagcggagttaagggcgtccgacctaggtatagactcggcccggggacggaaaggaggccgcccgaccaccgagtctatacccaggtcggacgccctctatgcccggacggaccgtctgaaaatgagtcgtttgtcttgcagggtgaaaaaacaagaataggcaggaaacaaaatcgcttcctgcctattcattatatgccaataacattgatttcaaaagaaacaagcttgccctgtcattttaagggcttcttgttttttacttattcccggggagaaagttccccgagaatctcacaatctcgtttactttttcacgttagtctgaacgacggcaataacactcaaaactgtgaatactgctacgatagctaacaaaatagaaacttgtgctgtcataatcttaaaaaattaaatctttttacctttactaattatcctatttacttgttatcccttgtaactcatcaactgaattacgctgcaaatatagggggtattttcttcttgtcaagggaaaacatgttttaaagcataaatatggcctttttcttgatataggtcaaagaaaggcgaggttgttgtaacgtgtatgaaatgtcaggataattgtaggaatcgcctggggctggcatagtgggtcggttgtgaaaaccacgtttcagaatatgtgacagagccatcgtcaggaggcgatgacgctttcctgcgatggctctgtttttatgcggtgtcggccgggcttatgaatgaggccgttgcaacgcggccggttgtcgcttggccgctgttcagttgcttttcagcacgcgccagactccggcactgatgccggctcccagcatgggggctacgatgaacagccataattgtgcgacggcttgtcctccgtcaaataaggccgggccaatgcttcgtgccggattgacggaagtgccggtgatcgggatgcagacgatgtggatgagcacgagtgtgaggccgatggccagtccggcaaggttgccagctccttttttctcatcggtcgctcccaggacgacgaggacgaagataaacgtgaatgctgtctcggcgataaatgcctgccatgtctcgcccgagtcgaacgtgtttgaaccggtcattgtcggaccgtcatgtcctcccgtagccaccagtatggcgaggatgagcgagccgaggatggctcccactacttgaaacagcatgtagaacatggcgtcgcggctgccgatgcgtcgtgacagccacatgccgagtgtgatggcaggattgatgtgacatcctgatatattaccgatggtgtaggccatggccacgacggccaggccgaaagccaatgccacgcccagtgtacccgttccggctccgactgtctgagcgatgcctccggagaagacggcacttccacatcccatgagcactaagaccatggttccaatcatttctgcaaaatactttttcataggctcttatgtttttatggttagatatgtcagtcagttgttggggcggaatgccgtttggcccaaggtttcctttgaaaaacgtgaggaaatttagcgaaaaaaatcagaatcacaatattttggaatcaaaatcaacaaattgttggaaaaaagtagtggaaggataaacttttttgtcggaaaagagtccaatatagaattgatacaagattaatatatgaaacgcacgttcttatccttattcgcgctggccttcctcttggggagcggctggcttatgcccgtggaggcacaaactcaaaaagattcatctgtttccgtttctcgttgggatgatgcgaatgcagcccggtgggatgctgactttaaagtggtggacatcccctcaaagacgggcggagacccgcagaaggcttatatctacaaggcaagcgaggcaaaacgtccgcttatcgtgagccttcacacgtggagcggtgattacaggcaggctgacccgttggcggcagaagccaaggcgaaggactataactacatccatccggactttcagggtgccaacacccggccggaagcgatgggcagcgaactggtggtgaaaaatctccaggaagccatcgagtatgcggtgaaagcgaccgaagccaatccgcaggaagtgcatgtcatcggtgtgtccggcggtgggatggcagctcttttggcctatatgaatgtcacttgcgccgtgaagtcattttccgcatgggctcccatagctgacttggaagcgtggtattgggaatcgaagacgcggggcaacaaatacgccgaccacatctggaaggccacgtcgtcgtccggaacgacttttaatgcagcggaagcccggcgccgttctcctctctatggtgtcattccccgcaagcagcgtcgcacgtcccacctttatatatatgaaggtgtgcacgatggatacacaggttctgtgcctgtgacgcatgccatcaatatgtacaatcgggtggtcggtgactggaaatacgggctgtcgcagtcggaagctgccaatcggcaggctttcgtgcatgccgacatggtgtcggaggatgagatagtccgcctgctcagccttcgttgcgaaccgaaagcgaaccctgaaaaaaaattaggtgaccgtcagatacatttggagcgcgaagcatccaatacgcatctggtgatatttgaaggaacgcatgagatgttgccgtgtgcgcttgaattgttgcccatcggcgaataaagcagaacgacagagacttgtagtgacaatcatagctgtctgatttgcattaagcatgtagcttccagatgcagactgtagtctgggagtaggaatggaggcctgaatccggtgaaaggattcaggccttttttacatacagtccggttgccttcacgcagagtttttttgcgtgtctttagaccgggagtcatggcaaaaaaaatcccccgttaaaggacgagggaacctaatgttttcacaacggaataatccttattgtgatttgcttcaaattagtggggcaaatataaatagaaaagattaaaatgcaaataattgaaagaaaaatgatagatttgggaaaaatttgaataaatatggaggaaaaacacattttaggcttagatctgggtaccaatagcatcggttgggctgtgattcgtgcattaagaaatgaggatgggatagagacgttgagcaaaatattgggtgctaatagccggattatcccgatggatgctgctgtcttgggtgattttgacaaaggaaatacaaagtcgcagacggctgagcggacaagccgccggactgtgcgcacactctacgaacgcagccagttgcgtcgtgaacgtttacaccgggtattggccatcttgggctttttgcccgaacactacctggctcgattggaccgttatggcaaattcatagcccatagtgaacctaagctgccgtggaccacggacgagcagggccgtccttgttttctgtttcaagagtcgtttcatgagatgttggctgattttcgccagaatcagccggacctgcttgcgaatggtagaaaagttccctacgactggactctatattatctgcgaaagaaagccttgacgaagaaaatccggaaagaggaattggcctggatacttctgaacttcaaccaaaagcgtgggtattatcaacagcgtggagaggaagaggataagaaatcatccaagacccggcaattttttgacagccagaaagtcacagatgtcatagacaccggacgggtctataaaggcttgaaggtgattacagtggtgttggctgacggaataaaaggcaagattttcaaagcggaaaagcccgactgggtggggcagaaaaaagacatttttgcggttgtagaccttgacaaagatggcaaggacaagcttgatgaaaatggagagccgagtgtccgctttaagataccgacggaacaggaatgggaggagcaatggaaattgataaaggtaaagactgagaatgacctggatgattcgggcaagactgtcggggcttacatctacgacaccctgctgcagatgcccaggcagaagatacgtggcaagttggtccgcaccgtggaacgcaagtattataaggatgagcttgcacggattctggaaacacagagtagatttcatccggaatttcaagaccggtcgctttatgaagcatgcataaatgagttgtatccgcaaaatgacgctcaccgcaatttgataagttcgcgtgacttgtcctatttgttgtcggaggatattttgttttaccagcgtccgttgaagagcaagaagtcgttgattgcagactgtccctatgaaggctacacctgcgtagacaagcataccggtgaagtgaagtcctatcatttgaagtgcatagctaagtcgcatcccttgtttcaagagtttcgtctatggcagtttctgtccaatttgcggatataccagaaagaaaaagtagtggatgggaagtcttgttttgatgtggatgtcaccgttgagtttttgaaaaatgaagatgactatgtctgcttgttcgattggctcaataatcggaaggacatcaagcaggatgcattcttcaaatatccggcttttggattaaagaaggatgcgaaaaactatcgctggaattatgtcgaagataaagtctatccatgtaatgaaacgcgtgccgtgatgctggcgcgtttggaccaggcgaaagtgtctgaagattttctgacgagggaaaaggaggaagccttgtggcatattctgtattccatagcagacaagggagaactgcggaaagctttgtctacatttgcggcaaaacagggtttgggcccggagtttgtcgagaaattccagaccacgcctccttttgagaaagactatggttcctattctgctaaagccatcaagaaactgttgcctttgatgcgtaggggaaagtattggagcgcagatgccattgatgcccagacgcgtgaacgcatggcaaagattctatcgaatgagtgtgacgacaggattcggtcgcgtgtgagagagaaagctatacatctgacagacatgtcttctttcagagggcttcctctttggttggcttgttatgtggtctataatcgccattcggaagccaaagatataagaaagtgggaaactccttcagacatagacgcctatctggcaggatttaaacagcattcgctgcataatccgattgtggaacaggtcatactggagacattgcgcaccgtgcgtgatatatggaagcaggtggggcatattgatgagatacatttggagttgggacgggagatgaagaatcctaaagatgagcgtgccaagatgacccggcagatgcaagagaatgaaacaacgaatctccgcataaagtccatgctcctggagttcatgaatcccgagtttgaaatggagaatgtacgtccgtattctcccggccagcaagatttgttgcggatatacgaagaatctgtgttaaacagtgtggagaatgtgcccgacgacatccgtgagattatcagtaagcttggcgagagtgatttaaagaagcgtccgacgacttcggaagtgttgcggtataagttatggttggagcaaaaataccgttcaccttacacgggcgaagtcatatcattaagcaaactgtttacaccggcctatgaaatcgagcacataatcccgcaagcacgttattttgatgattcacttagtaataaggtgatatgcgaggcagaggtgaataaattgaagagcaatatgttgggacatgaattcataagcaagcattacggagagaaagtcctgttggcaggaggcaagtgcgtgaagattttttcagtcagtgactatgaaacgtttgtgaaggacaattatgccagaaatcctgtgaagttgaaaaagttgctcatggatgacattcctgaacaatttatagctcggcagttgaacgatagccgttacattagtaaattagtcaagtctttgctttctaatattgttcgaaaagagaatgagcaagaagatgtctccaagaatttgattgtctgtacgggaggagttactgaccgattgaaaaaggactggggtgtgaatgatgtctggaataaactgattttgccacgtttccttcgtttgaatgaacttacaggcaccacagattttacggcattgaatgccaatagtaaaatggtgcctactgtaccgttgggcttgcagaagggctttaacaggaagcggatagatcatcgtcatcatgcgatggatgccatcgtcatagcatgtgcaagccgtaatatcgtgaactatttgaataacgaatcggccagtaaaaatgcaaaagtgactcgcttggatttgcagcgtctgttgtgcgacaagcaaaggattgacgataagggaaattatcgttggtttattaaaaagccatggcctacgtttactcaagatgtgtctgtcgctttgcaaaacgttataatcagctttaagcagaatttgcgtgtgattaataagacaaccaattattatcagcgctatgtggatggaaagaagaaattcgtaccgcaagaaaaaggcgacaactgggcgattcgtaaatcaatgcatacggaaacgttttatggggaagtaaacctgcgtgatataaaaactgtttctttgaaggaggctttgaaaaatccaaaagctgtagtagaaagggacttaaagaaaaaattgcaggaattgctttcgcagaatctgaatgaaaaacagataatagcttactttgaagccaacaaagacatctggcacgacatagacttgaagaagatacaggtttattatttcacgaaagagacaaccaaacgatattttgcatctcgtcaatcgctggatacaagctttgatgaaaagaagattcgggaaaaagtgacagataccggcattcgaaagattttattgcgccatctggaagccaatggtaatgatgcgaatttagctttctctcctgagggtatcgaacgtctgaatgaaaacatgcagacactgaatgatggaaaataccatcagccgatttacaaagtacgggtctatgaaaaggctgatagatttgctgttggccagacagggaacaaaaagtctaaatttgtagaggctgccaaaggcactaatctcttttttgcaatttacgaaatggagaaggtggataaagagacaggtgaaaagacaataaagaggatttatgagacaatcccattgaatgttgtgattgagcgtcagaaacgtggcttgtcttcagttccagaggacaaagatggtaatccattaaggtttgtgctttctcctaatgatttggtatatgttccgacacgagaagaaatagaaagtggccatatcatttatccattggatcggacgaggatttataagatggttagttgtacagggaatgaagggcattttattccaaattatatagcaaatcctatagtacaaatattggaattagggagcaataataaggcgcagcgtgcttggtctggtgaaatgataaaagaaatatgtattcctataaaagtagatagattaggaaatctaatgcaattattatgataaagaaaacgctttattttggaaatcctgcgtatttgtctttacgcaatgcgcaacttgtgataaagttgccggaagtggagaatagcgcttcacttccggagaggatgaagctgcagtcagaagtgacgaagcctattgaagatttaggagtcgtggtgttggataacaagcagataacaataacatctggagtgatagaggctttgttaggaaataattgtgcacttattgcatgtgacagtaaaagcatgcctgtcggattgatgcttccactctatggtaatacgacacaaaatgagcgttttcgtaaacagttggacgcatcattgcctttaagaaaacaactatggcaacagacagtccaagcaaagattcgcaatcaggcggccgtgttgtctgcatgcacgaatggggagaccaaatgtatgatagcatgggccggcgatgtacgtagtggtgatccggataatctggaagcgcgtgctgccgcctattattggaaaaatctgtttgctgaggtcccgggctttgtccgggatcgtgaagggattcctcccaacaatttattgaactatggttatgccatattgcgggctgtagtagcccgtagtttggtcattagcgggttgttgccgacattgggcattcatcatcataatcgttacaatgcctattgcttagctgatgatattatggagccttatcgcccatacgtagatgaattggtctatgggctttttaagcaatatggaaatgaggttgcattgactaaagaagtaaaattctcattgctttctataccgacacttgaagtgcgtttaggaggcaggcgcagtcctctcatggtagcggtcggccagtccacagcttctttatataagtgcttttctggtgagcttcgtcgaattctttatcctgaatattgatggatcgcttcagtgaatatagggttatgtggattttggttctctttgatttacctacagaaacaaagaaggataagaaagcctatgctgaatttcgtaaaaaattgcagcgtgatggttttacgatgtttcagttttctatttatgtacgccattgtgcgactagtgaaaatgcggctgtgcatataaaaagggtgaaatcctttttaccggaatttggccaagtcggtataatgtgcatcacggataagcaatttgctcaaatagaattattctatgggaaaaagcctcaaggggtaaaaactcctgggcagcaattagaactcttttgaaataataaatcccgttctgaagagcgggatttatttatggaaacaaccatttttttatttctgagcttattcctaatctattgatattaagagaataatatagattaggttgtttcttatagctcaaagatactaatttgaaagcaaatcacaacgatgttgatgtgggtgaatggtgcggaatggttgtttcttatagctcaaagatactaatttgaaagcaaatcacaacggtcattgcgtgtgccaatggatgcgatgcgttgtttcttatagctcaaagatactaatttgaaagcaaatcacaacgcccaaagggcaggttggtgatattaccggttgtttcttatagctcaaagatactaatttgaaagcaaatcacaacatctcttcccttccgtgcttatgcattgatgttgtttcttatagctcaaagatactaatttgaaagcaaatcacaaccatttcgccaattttcagattgttcacggagttgtttcttatagctcaaagatactaatttgaaagcaaatcacaacgtgaagggtaaggcgctggtaaaatagtcgttgtttcttatagctcaaagatactaatttgaaagcaaatcacaaccactggtggtgaatctggaacagacgtaccgttgtttcttatagctcaaagatactaatttgaaagcaaatcacaacccacgctcgatatttaagagttgcacataggttgtttcttatagctcaaagatactaatttgaaagcaaatcacaaccagctttccacgctttgggcctaactgactgttgtttcttatagctcaaagatactaatttgaaagcaaatcacaaccgcgcttcgtggaacatcttaatgccttctgttgtttcttatagctcaaagatactaatttgaaagcaaatcacaaccagcaatacacaaactgcccgacacaacaagttgtttcttatagctcaaagatactaatttgaaagcaaatcacaaccaactattccatcatttacaagttcattcagttgtttcttatagctcaaagatactaatttgaaagcaaatcacaacggtgtgcatgaatcgctgtataaatacaatgttgtttcttatagctcaaagatactaatttgaaagcaaatcacaacagaacaccgacggggagaagaccatcgcggttgtttcttatagctcaaagatactaatttgaaagcaaatcacaactgtactttgttgctcgcccaaatggagagggttgtttcttatagctcaaagatactaatttgaaagcaaatcacaactgtccactgtgatattagcagagatatacgttgtttcttatagctcaaagatactaatttgaaagcaaatcacaactctacgatggtagttgtctgtggggctaccgttgtttcttatagctcaaagatactaatttgaaagcaaatcacaacgtaccttcgactgcgtgcagcggatgagcgttgttttttatagcccaaagatattaatataaaagctaatctcttctttatcattgtagaataagactaggaattagcaataaaaagtaaaagagtggctgcgggatggctttcgggggggcggaaatgaaaaaaatccccgtaacatttccgttacgaggattttcttatgtatgttgagatagtctctaaattacttgttcagagccagggctacgtttacggcgcaagccactgtacatccgaccatcgggttgttgcccatacccaggaagcccatcatttctacgtgggcgggaacggacgacgaacctgcgaactgagcatctgagtgcatgcggccgagtgtatcggtcataccgtaagaagcaggacctgcggccatgttgtccgggtggagtgtacgtcctgttccacctccggatgctactgagaagtagggtttgccagcgagcacacgctctttcttataagtgccggcaaccgggtgctggaagcgggtcgggttggtagagttacctgtgatggagacgtctacgttttccttccacatgatggctacgccttcacgcacgtcgtcagctccgtagcatttcaccttggcgcgcggaccgtcagagtaagcgatttcattcactactttcagttcgcccgtatagtaatcaaactgagtctgcacataggtgaagccgttgatgcgggagataatcatggcagcgtctttgcccagaccgttcaggatgcagcgcagcgggttcttacgaactttgttggccatctcggcaatcttgatagcaccttctgcagcagcaaacgactcgtggccggcgaggaaagcgaagcattgagtttcttcgcggaggaggcgggcagccaggtttccgtgtccgaggcccactttgcggtcgtcagcgacagaccccgggatgcagaatgcctgcaagccgatgccgatggcttcagctgcgtcggcagcatttttgcagcctttcttcagtgcgatggcgcaacctaccacgtaagcccattttgcattttcgaagcagatgccttgcgtctcctggcaagtcaagtaggggtcaaggcctgctgcgtcacagattgcgttagcttcttcgatgtctttgatgccgttttcgttcagagcagccaaaatttgcttcatacggcgatcctggctttcaaattgtactggtctaatcataatctgtgtcctccttattctttacgtgggtcaatatatttaactgcgccttgttcaggtttgaagcgtccgtaagtgccagtgacagctttcagggcttcgttggcatcaacgcctttcttcacttgttccatgaatttgcccatgtggacgaattcgtaaccgatcacttggtcgtctttgtcgagggccatgcgggtgatgtagccttcggtcagttcgagataacgggtccctttggcttttgtgccatagagcgtaccggtctggctgcgcaggcctttgcccaagtcttccaagccggctccgatcatcaagccgccttctgagaaagctgactgagtgcgtccgtagacgatttggaggaacaactcacgcatagctgtattgattgcgtcgcatacgaggtcggtgttcaatgcttcgaggatggtttttcccggaaggatttcagatgccatggctgcagagtgagtcatgcctgagcaaccgatggtttctaccaagcactcttcgatgacaccgttcttgacgttcagagtcaatttgcaagcaccttgttggggagcacaccaacccacaccgtgtgtcaatccggaaatgtcaacgatttctttagcttttacccattttccttcttcaggaataggagccggtccgtggttgggacctttcttaacaacacacatgtgttctacttcctgtgaataagtcatatcaattacgttttatagtatgaaaataatatgtaaccactgtttggatgccgaaaggcttgcatgcctttcattttcgtgcgcaaaattacggtttatattcattttctgcaataaagagcttccttgttttacgatttttattatatagagagaggctgtgtccttgcttttgccggcttcatgccggggggcttgtggattcttgggaagaaatgtgtctggattggagcaaacctgctatatttatggggcatagaacgaagcggttttttcaatggtcagggaaaatgggcgaaaggctttgaaaaccaaatggtttagacatgttcgggaaaatgggctgaatatttcgaagcggttttttcctttacatgggcttacatctgctttacgtttgaggggcttttctgcggatcttcgggcgattgctttacattgggcttgcagatggggttaaaacggcctggaagggctttattctcggctgtgtggccgttttatggctgggttgatggattttgttatatgatggtgt

SEQ ID NO: 1281 - DNA, 19735 bp, synthetic construct
  misc_feature 1..19735: note = Synthetic
  variation 18038..18039: note = n is a, c, g, or t
  source 1..19735: mol_type = other DNA
  variation 19546..19547: note = n is a, c, g, or t
  variation 17839..17840: note = n is a, c, g, or t
  variation 18379..18380: note = n is a, c, g, or t
  variation 5743..5744: note = n is a, c, g, or t
  variation 18743..18744: note = n is a, c, g, or t
  variation 4917..4918: note = n is a, c, g, or t
  variation 16349..16477: note = n is a, c, g, or t
  variation 2396..2397: note = n is a, c, g, or t
tgccaaacgttttgcctgtaattcggtaaccattcccaatgtacagcacacttcaagatcaagcgcatgcacgcttttcaccatatccacaactttatcaaaatctttgttgtcgcgcacatttctccatgctgcacccatacaaacccgcgaagctccattggcctttgcatttttggcaagacttgtcacctcatcaacatccatcagtttatgcacttttaccttggtgttgtaacgtgcagcctgggggcaatatgcacaatcctcaggacagcctccggttttaatggaaatcaatgagcttacctgaacaactgagggatcgtgatgtttgcggtgcatcgtggcggcttcatagagaagctccatcaacggcttgttgtaaatagcaagaatttcttccttggtccagttatgtcggatatcgctcatcttcgggtaggtttatgcaaatataagcggtaaatgctttgcccaaatccccaacccgagctttaacggatcttctctttgtagagaaatttcttttgtgcggattcaaagggacgatagatataataagcatatccccctctgattttcagccgctccgggtatttataggtgagtttgtacacgtttttcacttccccggtagatgtatttaattccttgaggtaatatttacctcccttcaaatagaccgcatatattacttgttcttccacatctttcaccagcaattcttcccattcctttttgtcgggaccaatatgataactgatatccagcgaatcaatgggttcgttttcggcattgtagcggaataatttattggtgtaatgatcaaaaatcaaaatggtatcattctgcacaaacatgggtgcataaagcggatggtaatacaatgaattgggaaagcccgaccaaatggcaatccagatttccttatcaacaccggtagctttttgtgcgcgataggcttccagtttttcgcgtcccgacacatatttatattgggcacaatacaattccatcaatggtttgtcgatcactgttcttatttttttaaacccactatccttcgcactccaactgaaataatcgaattcgggataataccatagataattggaaaaataggccttgctctccgttgtatctacccatggacgaatttgtctgtcgaaatgatctgcttcaacgggaagcaaacgaatcatcgcatcacgaatggtaacctcatatactttcgatacgcaaatcaggtaaatgcgtcctgcaaaatctttgtacaattccttggcaatatccggaactgtgaacgaagaaagtagggttccgtcggctgatgtatagatgactttactgcctttatcgatacgcttttcatagacaagcatcacaaaattatcgccatgaaactgaaaatcggaaacacttacctcagcagaaccaaatacggtatcaggtgcagcggatacttcaacggtaggaagggtaacaaaatcgagtactatatcaatccgcagtgtatcgccacctgacttacgcagttcactttttttgatctcccgcttctgtaaatcgtgcagcattgaatggaaaacaatcacaggccgcacatcatctgtgtattccacatttaggatataccttccattacgatttgtatacactaccgattttggttgattttctacataaacttttacatcacgcaagggacgtccttttgcaccattttcaggcacttcagtaactgtaccggtgataacaatacgttgctgagcctggattttcagcgccagtaaagtgaaagcgatatagaagatggtccgcaacatttcaattcagatgcaaaaagcattccgattccataaaaaaaaatctaccaggtcagatcatccttatcaaaccattttctgtgcacctttagaacctgttcaatcacatcgcgcacacagccctgtccgcccttgtggggagaaacataagtggcaatcgatttaatttcctcagcagcatcgttcggacaagccggaattccgactttacgcattacatgaaaatcaggaagatcatcgcccatatacaaaatggttgaaggatcgatattattggaagaagtataagattgaaaaacctccattttatctgctgcttttagaaagacatcctttactccgaggtattccatgcgttcccttaccatttcattattgcctccggttattaccgcaattctataccctttacgaacggcatattgaatcgcataggaatcgcgaacatgcatggttcttataaaatcttttggtggcaggagataaaccacgccatctgtcagcaccccgtcaaaatcaaaaatgaaagtggtgatggaattcaatttcaatttgtaattcatagcnnagaatttgacatgcactaaaaccaaattacttgaaaacaaggcatttcgaaaaaaaatgaaccaaaacacaaaaaggttgtacagcatcaaaactgatcactatgtttcgactgattctaaaagaaccaccggtttttctgcgcgatgcgagaaactttcagatcctttttctttctacattcttactgttcggtatatggaatttaggatgggaaacggatatcctaaaaataggagtgatactagcaaccggattggcagtacagtcgatcggcatcatgtggtcgggcgcaccctggcattcgctgaaaagtgcattaataacctgtttgggtttatcattattgttcaaagccaactcctacagcacgattgcactttgtgtatttcttgccattgcgggtaaatttattattcggttcaatggaaaacatctctataatccagccaacttcggaattgtactaaccatacttttaaccggcgacgcatggatctccccgggtcagtggggaagttcggctgtaattctttttctggttggatctgcaggattgatggtggtattgcgcgcaggacgactcgatacaagtattgcattcttaggaacattgttcttccttgaattttgcagaacaatcgtttaccagggatgggattacgattttctgatgcacaaattcacaaacggttcattgctgctgttcacctttttcatgatcactgatccggtcactactccaaaccatccgatatcccgcttattatgggcatccatgatcgcagttctcaccttcttccttggtaactgggaacaaattcacaccgctcccgtttgggcacttttcttcatcactcctttcaccatcctcttcgataaattgctggtagcaaaaaaattccagtggatcaacgcttaatcttaccgaatatgaaacgacttcttttagtaacgcttttcatctcctcaatcggaatattgcaaagcaaagccttctgtggattttatgtcgctacagcagatgcaaaactctttaataaatcctcacaggtaattcttgttcgcgatggaaatcatacggtcattaccatgagcaatgatttccagggaaacgtaaaagattttgcgatggtagtaccggtacctgttgtactgcaacgcaacgatattcgggttgttaaccaatcactttttcaatcgctcgatgcgtattccggcccccgtctggtggagtattacgatgaaaacccctgttatccgaactatttgtacgattcggcaatgccgacattgtcggaatcggtgagctcaacccgtaacgaaagtcgaaaaaaatctgcagaaggttcaggagtgaaaattgaagccgaatacactgtaggcgaatatgatattctcattttgtcggcaatagaatcaaccggattaaaaacatggttaacggcaaatggataccagattccgaatacagcagaagaagttttggaaccttacatcaaaagcaacatgaagttctttgtagtgaaggtaaatctcgataacaaaaaagctcttggattcgataatcttcgtccgcttcaaatcagtttcgattcaccaaaatttatgcttcccatccgtttgggaatggccaatgccaacggcgatcaggatatgatcgtttatgcgttcaccaaaacaggtcgcgtggaatgcaccaactaccgcacggtaaaaatcccaacagacagaaatgttcctctgccggttcgccagaaattcgggaaattttatgttgaccttttcgaaaaggaatacaaataccagggaagaaattgtgtttttcttgaatatgcatggaacgttactccaagctggggtggaatgaaatgcgatccctgtgttggccctcctccactctttactgacctctcacaagccggtgtaagctggtcgaattccggcacaccggttttctttacccgattgcatgttcgatatagtcgcagcaaattcccacaggatctccagtttcaggttacacccaataccgaacattttcagggacgttacatcttaacaaatcctgcttatggcgatttgagttgtgatgcaggacaagaataccttcgcgatctgtcgttccgcagaaaacgtgaagtggaagaacttgccgtactcaccggttgggatccttcttcgtattacagttatattactgaatacaatcacatgatcaagcaaaacaacatccgtaaaaacgaactaattccagttgttcctgttaacgatcattctgacggacccggtggtagcggtaaactgatctttaccctgctttttattacggtggtaggatcgctgtttattttgctgcaacgcattccggttaaaccggtttctgcatgataccctagctaaaaataaaaatgctcaatgaaatcattgagcatttttgttttttaatatgatccttaattctgaattatggtaaagttcacacaacggttacgaccattatccgcagcagaaccactgnnaacaggctggctcgaaccaaatcctttgtacttcattctcttttttggaatacctaagtcaaccagataatcgtatacagccttcgcccgcttttccgaaagtttttgataatatttttcagatccatttccttttgaggaatgtccaccaataagaataaccgcatttggattggcctccataaacaagaccacccaatgcaattgtgctttcgagtgatacaacaactccgatttatcgggttcgaaatacacattgttcaattcaatagtggtattccgttcgatgggtttgaggtatacaaccaattctttttcgatggattctgttactcccgacatatccacactcacgcgctcccccaggtaacccggataacttacatcaatagaataacgaaaaccttctttaaggatcatggaaaatcgtccatcggttggtgttgcataaatttttccgagcatggaatcggtttccagaatatgaaaagttaattccccaatcataggttcgttagtcttggcattgatgatggttccttttaccacacatgtaggttttggctttgcttgctgcggaagcttgaaacgaaatatatcggtacgaccaatcgaattttcagtggaaaccatatagccccattcccctttggcatcggtagagaaataggcatcccactttgcggtgttaatggttggaccaagattaaccggcgtgctccagttggtccaagtatcatctaaacgaaccgacataaacacatcggcatctccataaccgggatgtccttctgaagcgaaataaacggttttgccatccccggnngcaatgaagggtccgatttccgccgcaaacgagttgattactccaccacaattcaccggctcggaccatgaaccatccgacatttttttcgaaacatataaatctttatcgccataggaatcttcccgttcaatggcaaaaagcaaaacatcgccatccggattgatgcaagcttcctggtactgattgttattgtagaaattcttcacttcaatatttacaggattattccaaccgctcccattgcgatgtgcaattgaaaatccttgtttggaatattctccattggaatcgtattgccccttgagcataatccacgaattatctcgtgcaaccccaatacaggaattgttgtttttattgttcaccggcctaccgaggtttatggctttaccaaataaaccttcattgcctaattccgcataccagatgtcatcgcttttgtcgtccccaaaattttgcggatcatcgctgcgggtaaaatacaggtgtttaccatcgtgagaaatagtaggctttttttcaggataagcagtgttgatgtttgcacccaggttttccttttttaccacacccagatccgtacctgttacagcgtttattgtccctctatcctgaaatacctccagataatctacctgaacgttgatggtattctccacaaagaagcctacacttttatcaaaagcaaatttgaaaaacggaacctgacacagctgcacatcatccagaaaaaacgtgtaattgcttccatcgcttttaagtttaagtacatgattggtttccatctgtacttttttcgctgagggcgtccattttaccttgtaatcgtacgaaccttctttcgtttcaaataaaccatgtttaccttctctcgaaacagcaaatgtgtaattgttcttgtcgtttttcacattccaggcaatgccaaaatgtcctgtcttcgaaacacctttcaacgtgaatgaggcatgaattgcgaagggtttggagggattgatggtaaccggcttccatatccaccaatacatcccctcctttttgaggttgattgcataagcaccgcctgtaacctcagcggtatatgtaccttccttatacaaaggccaggctcctgaattggtggtaaaatcttcgcgatacaacgattgatattgtgtaaacgactgatttacaagtattaaaataaaaaagcaggagaatagtgttttcaacatagcctccaaatttacctgaaaaaacgatatttttgtcgcagcaattcaagcgaaaaggttttttttacgactctatgggggacaaatgaaaaaatcttcgtactattgcagccctaaaaaatgataagtcatggatcgtctggcaacaatcgcaaatgaactgaacgaaagcaagaatcactctaaattcaaggctggtgacactgtcactgttcactataaaattaaagaaggtaacaaggagcgtatccagcagtaccagggcgttgttattcagcgtcgcggtgcagggatcactgaaacctttactgttcgcaaaatgtcgaacaacatcggtgttgagcgtatcttccctgtaaactcacctttcattgataaagtggaagtaaacaaatcaggtgtcgtacgtcgtgcacgtgtattttacctgcgtgaccttaccggtaaagctgctcgtattaaagaaaagaaacatgcggttaaggcttaatcctcaacctcttttgatacagaaagccgtcctaacagacggctttttttttgctcaacgttgtgttatttcagtaagaatatttgaagtgaaagttccctaattgggaactttttaatttctatttcgtaaatttgtataaacttgaaaataatgcgagtcatttcgcgaaaaactcttttactgttttggaaaatacaccctgatgcagaacaagctctaaaatcatggtatgatgaggctgataaagcgaaatggatttcaccaaatgacatcaaaaaaaactatccatccgcaagtatcctttctgacaacagaattgtatttaatataaaaggaaacaaatacaggttaatagtgaaggttaattacaaacaccaaatggtctggattcgttttgttggcacccatgctgactatgataaaattgatgcggaaataatttaagcgctatggatttcaagattttaaagactaaaaaagattacgaaaatgctctcaaacggcttgaaaaagtgtttgatgcaaaaccgggaagcaaagaaagtaatgaattggaattgctggcgatgctaattgagcgctatgaaaaagagcacttcccaatagatgcccccgatccggtagaggcgattaaattcagaatggaacaattgggaatgaagcaaaaagacctggataaaatcatcggtggtaaaaaccgggtaagcgaaattttaaacagaaaacgtaaactaagcctcgaaatgattcgcaacatccacgcttcattggatatccctcttgaatcgctcattcaggcttattgacaaaaaaggtactcagcaatgcgttcttacaacaacaacttcctgatccgcaccatcgggccgggacaaaattgctggtgacaggtcaaacaggaagtgacggtagtattgaaaatctcctgcgcattttcagggcgctcacggagttttccgacattaaacaagtaggcatcggccatcccggcaaagacatccgttttaacggtaggatcggttggagtagctgttttgagagtagaataatccattgataaatccagcgaatcgattcttcccttttcaagatgctcacgataaatgcgcatatctgcatccattttacgcatcagatcagcaagttcagaggctttgtattcatcaaatacaggtttttcacaggctgcaagtgaatctgccttgcgcttttctgcatccgcttcctcctctcccgaactgcaggccacaaggaccaaaatcagtccgagaaccaggagcgatttatttcttgccattgctgttgatgataacaccattggcaacaaacgaccattcggctttcgcttgggtaatcgcatcgatttcttctttggaagcaccttcatcttcgaggtaatgtttttgcatatctaccgaaatggtatccacgaaagcccaaccctggaaggtcgctttcattccatcagcattcttgggaacgaaaaatccgtaatctttaaacgttacacgcatctcttctccgttttccatatcaactgtcatccagcatccttttttcttacaacactgattaatggtagcagtaagtttcacttccattgagtctttgccctgaatggccttaacgaattcagtcatgctaattgcaccatccggagtgatggaactgtcgccatagatctccacctgctcttttgcagtagtatctccggcaggttcttctgttttggtctctcctccgcagctcattgcaaaaaaggacatggaaacaaggtaaagggcaaggatctttttcattttttcaaggttttatgggggcaaatatagtgattgtaggaatccacctacgttaaggcttcggcggacaagtgtgggagtgtgcgaatgtgggaatccgttctcgttcccattcccgttcttttatcaaatacatccataaaacgctaattagaacgcagatagcatgcgtagcgacgactatatattggccgcttgtaagctattgctcatgaatgaaacgaaagaaatacacgatgccattcaatcttgcttaaaagttctgatagaacttaaatggggcgatggctaccattgccggaaatgccaacatgggaattgggtaaaaggcagaacatggtattacaggcgttgcggctcttgccgatacgatgaatctgcaattgcgcacactccactacaaggaaaacgactaacgaagcaatcctggcttctctcacttcgtgaccaatcgtttgaggaacaactgaaaattgtacgtgaacatatagttaagtaaaaatatgtatcaacattcattccctaatacgaattaaaaaacataataaataaaggagaatgcgaaagaactcgtccagaaaaccgagaatttcatccaaaatatttggatgaaatgataaaatactggaaattaagggcatgaaaaaaggcgagttgccccgccttaaatgttttcacaacggaataatccttattgtgatttgctttcaacaccaaatataatataaatactcaaactataaaaaaatggcaaagaaaattttaggactggatctcgggacgaattcaattgggtggagtttaattgaacaagaagttgaaaaaggagaaggtaaaatacttggattgggtagtaggattatacctatggacgaagccaaaaaaaatgattttggaaaaggtgcatcaatttctcaaactgccgacagaacaggctatagaagcgcgaggcgtttgcgcgaacgtcatcttttacgacgtgaacgtttacaccgtgttttaaacgttttgggctttttacctaagcattatgctgctgaaattgattttgaaaagaaattaggtaagtttctaattgataaagaacccaaaatagcatggaaaaggaatgaagacgggcaatttgaattcgttttccaaaactcatttgccgaaatggccaaagaattcgaaggaaagaaaataccgtatgattggaccctatattatctccgtaaaaaagcgctagaacgtaaaattgaaaaagaagaattagcatggttgcttttgaatttcaaccaaaagcgtggatattatcagctaagaggcgaagaagcagaggaaaacgaaaacaaattagtagagttttactctctaaaggttataaacgtgtcgaaagatgaacaaaaaggcaaaaaagatgaatcatggtattctttagaattggaaaatggatgggtttatcgacgctcaagtaaaacaccgctttttgattggaaagataaggttagagatttcatagtaacaaccgaattaaattcagacaaaactattaaaaaagataaagatggtattgagaagcgaagtttccgtgcaccaggagaagatgattggactttactgaaaaagaaaacagaacaagatattgaaaattcgaataaaactgtaggagaatacatttatgtttcacttttaaaaaatcaaaaccaaaaaattaaagggaaattagttcgtactgtagaacgaaaattttacaaaaaagagcttagggaaatcttgaaaaaacaaatagaactacaacctgaattgtttgcaagcgacaaatacaataattgtatccgagaattatatagaaataacgaatcacatcaaataactttgggtaagagagattttgttcacctatttttggacgatattattttctatcaacggccattacgaagtcaaaaacattcaatcgcaaattgcggattagaatatcgcgaatttaaaataaatggagaaactaaaaaggaatatttaaaaaccataccaaaatcgaaccctttataccaggaatttagaatttggcaatggattaaaaatttgagtatatatgataaaatcgacgataaaaatgttacagccaatttcgttgattccatagaagggaatgaaaaactttttgaattcctaaatagtcggaaaaaaattgatcaaaagagtttacttaaatatttaattgatcaaaagctaccaaaacttaaatcaaaagagttaaatgcagaaattgaaaaatatcgatggaattttgtggaagacaaagaatacccatgcaacgaaacaagaaatgtaattgcctcccgtttagaaaaagtatcaaacatatcgtctaattttttaacccaagatatcgaacaacacttatggcacatcatctattccataaccgataagattgattatgaaaaagctttaaaatcttttgccaaaaaacacaatttagatcaagcctcatttgttgaaaattttaaaaaaataccaccttttgatagtgaatatggggcttattctgaaaaggcgataaaaaaactattaccattattgcgaatagggaaatactggagctgggaaaaaatagattctaaaacgaaagagagaatagaaaaaatgctaaccggcgagtttgatgattttattaaaactcaggtccgggaaaaagctattcatttaaccaaagaaaatcagtttcaaggattacccctttggctagcgagctatattatttatgacagacattcagaggccgaaagtattagccaatggaaatctgtaaatgaattagagcattacttaaaagaattcaaacaacactcccttcgaaacccgattgttgagcaagttattacagaaactttacgagtagttaaggatatttggaaaaaatacggaaatggaactcaaggtttttttgacgaaattcatattgagctcggcagagaaatgaaacaaactgcagaacaaagaaaatctgacacctataagattacagaaaatgaaaacaccaatcttcgcattaaggctctaataatggagcttagagagaattctgataataaattggttgtcgataatgttcgaccttattctccaacacaacaagaagcgttaaaaatttacgaagacggagttttaaactctaacattgaaataccggaggatatccttaaaataagtaaatcagcacaacccacaaaaaacgagttaactcgttataagttatggcttgaacaaaaataccgttcaccatataccggagaatctatccccttgagcaaattatttacatctgattatgaaatagaacatattattccgcaaagccgctattttgatgatagttttaataacaaagtgatttgcgaatctgttgtaaacaaacaaaaggacaaccaattaggattggagtttatcaaacatcattcaggtgaaattctgacctctaattttggaaaaaaaatcaaaatactcactgaagaagaatacgtcagttttgtaaaggaacattatagcaaaaatcatcgaaagagaaacaacttattactagaagatatcccggataaaatgattgagcgacagcttaatgacacccgatatattagtaaattcataatgtcattgctttctaatattgtccgtgaaaatataaacgacgatggtataaactcaaaaaatataattccttgtaacgggaaaattacttcccaattaaagcaagattggggattgaatgatgtatggaatgaattaattttacctcgttttgagagattaaatacattgacaaattctcaaagtttcacatcaaaaaattctaatggaaagataatccctgtagttccattcgaactgtcaaaagggtttcaaaaaaaacgtattgatcaccgacaccatgctctggatgctttggtgattgcttgtactacccgtgatcatgttaatttattaaacaatcaatcagcaaagtcagatactaaacgatacgatttacaacacaaattaaggaataaagaaaagtggttagacaacaattacaaggagcgagacaagtttactacatttaaaaagccttggattaactttaccgaggaagcaaaaaatcgattagaaaaagttgtagtaagctttaaacaaaatttacgtgttatcaacaaagcaaccaatttttatgaaaaaattcaggatggcaaaaaaataaaagttgctcaaaaaggtgtgaattgggccattcgaaaacaaatgcacgaggcaacagtttctggaattgtaaatttaccatgggtaaaacttggaaaaggagaaattactaccgccacaagggaacgaaatgatttagtgtcaatctttaaagatattacaaccaaagaaaaagctgaaagtaaaatcaaaaaaattactgatactggaattcaaaaaattctgctaaattaccttgatagcaaaggtaacaagcctgaggcagctttttctcctgaaggaattgaagaattgaataatgatattgctaaattcaataagggcaaatttcaccagccaatttttaaggtgagattatacgaaaaaggaagtggtagatttaagctgggtgtgaaaggaaataataaggataagtatgtacaaggcgcacctaatttatttttcggtatttatttagatttaggtggaaatagaagtttcgaaacgatttcattagacaaagtagttgaacgacaaaagcagaaattaagtcctgttcctgaaaagaaagtaatagaggtaaaaaagaaaaacgaaaaagaaattcacgaattgaaattggaaaattatttatctccagatgattgtatatatattccaacggatgatgaaaaagaaaatatccatgatattgatttcaacaatttgacaaatgagcagttaaataaaattttctttgttaatgatttttcaggcaccacttgttattttagaccaaatcgaatagcgaaagcaatcgcgcctaaagaaatcgatatgaattttgaggaagaaaaaaacaaattgatgggttcatttgatacaaaaacagcaagttttgaaggaaaacagataaaagatagatgtattaaactaaaagtaaacaggcttggcgacatttcactagcgtaaaatttctaacttattatactaatgatcaaacgcaccctccatttcggcaatcccgcctttctgcatcttgaaaatgcgcagttgatggtaaagcgcatggaagagggtattgaaaaaaaacgcagcgttcccattgaggatattggtgtagtcatcctggatcatcctcagatcagcatcacgcacggagcaatggctgccctgctcgaaaacaattgtgcggtgattaccagcaatgcgaaatacatgccttccgggctattgctgcccttagacggacacagtctgcaaaacgaacgtttccgggcgcaattggatgccagcgagccccttaaaaaacaactttggcaacaaactgtgcagatgaaaatcagaaaccaagccaccgttctggaaagtaccgggcaggatgccactcccctgcgtgtgtgggccaatgaagtaaaaagtggcgacaccgaaaaccacgaagcccgtgctgcagcctggtactgggcccgcttgttccgcataaccggctttacccgcgaacgaggcgggcaatcgcccaacaattacctcaactacggctatgccattttacgggctgtggttgcccgcagccttgtcggaagcggactcctccctacccttggcattcaccatgccaataaatacaatgcttattgccttgccgacgatattatggaaccctacaggccatttgtggatcgtatcgtagtgaacatgtgggaagaatatggccccagcgatgatctggacattgaactgaaaaaacctttgctgcaaataccggcaattgatgttcagctcgacaaagaaaaaagtcctttattggtcgcctccatgcggactacagccagtctggcacgatgttttgagggaacacaacgaaaaattctttatcccgaactctaaccgcgatccttatgttggaccgcctgaacgcttatcgcatcatgtgggtgatggtaatgtatgacctcccaacggaaaccaagaaggaacgccggatcgcttctttgttccgcaaagccatattggctgatggttttaccatgtttcagttcagtatgtatatccgccattgcaacagccgggagaatgcagaagtgcacatacggcgggtgaagaagctgctacccgaacatggttcaattggtattcttactgtaaccgataaacaattcggggaaattgaactcttctatggccgaaaacaagccgaaaaaccggatacacctcagcaattggagttgttttaaggaaaatcctccccacctgaaacaaaaaaagcgaccacaattggtcgccttttttaagcatctactgattttttttgatcctgaatatgcactacaacccttgtcagctctacaaaaacatccaactaagttgtaacaaatatcagtagatcaaagaatgaaagcaaatcacaacaacgatccacctattcctccaaccgtgtaagttgtaacaaatatcagtagatcaaagaatgaaagcaaatcacaacggaaaacctgacacaacaaaataaatcaatgttgtaacaaatatcagtagatcaaagaatgaaagcaaatcacaacaaatactcgttgaaatatatcgtgctgaatgttgtaacaaatatcagtagatcaaagaatgaaagcaaatcacaaccggtgacaggcaagtgatcgctgttgcgaagttgtaacaaatatcagtagatcaaagaatgaaagcaaatcacaacggaaaagaagagtttgaaacgcctcgcaatgttgtaacaaatatcagtagatcaaagaatgaaagcaaatcacaactgattttactttcatttgtttttaaattaagttgtaacaaatatcagtagatcaaagaatgaaagcaaatcacaactcaatctttgcagcttcctccgatgccttggttgtaacaaatatcagtagannnnnnnnnnnnnnnnnnnnnnnnnnnnnnnnnnnnnnnnnnnnnnnnnnnnnnnnnnnnnnnnnnnnnnnnnnnnnnnnnnnnnnnnnnnnnnnnnnnnnnnnnnnnnnnnnnnnnnnnnnnnnnnnnaatgaaagcaaatcacaacaggcaaataaactcactcctaataggagtggttgtaacaaatatcagtagatcaaagaatgaaagcaaatcacaactttattagaacgttagggtcgtaaatattgttgtaacaaatatcagtagatcaaagaatgaaagcaaatcacaacaaggtttaggaggaaataaacaatgaatttgttgtaacaaatatcagtagatcaaagaatgaaagcaaatcacaacttaccaaagttcatctcccaccacatcagagttgtaacaaatatcagtagatcaaagaatgaaagcaaatcacaacaaaagtttgaatcagcctgtaaatttaccggttgtaacaaatatcagtagatcaaagaatgaaagcaaatcacaactactctggatgtctacttcctttttaacaggttgtaacaaatatcagtagatcaaagaatgaaagcaaatcacaacaggccaaaccaaagggtggtgaaacgtatcgttgtaacaaatatcagtagatcaaagaatgaaagcaaatcacaacttaccaaagttcatctcccaccacatcagagttgtaacaaatatcagtagatcaaagaatgaaagcaaatcacaactctacccgggatcgtgtggtgatgcgccaggttgtaacaaatatcagtagatcaaagaatgaaagcaaatcacaacatcgaacacgcaaactcaatttggtgtgtggttgtaacaaatatcagtagatcaaagaatgaaagcaaatcacaacatgatttaaaaagatcagtagtgaccttccgttgtaacaaatatcagtagatcaaagaatgaaagcaaatcacaacccaaacagcagaaaatcggtagagtaaagagttgtaacaaatatcagtagatcaaagaatgaaagcaaatcacaactaaccttgtcttattagttaaacaataacagttgtaacaaatatcagtagatcaaagaatgaaagcaaatcacaacttttcgtcggtatccgtttccggtgtttcggttgtaacaaatatcagtagatcaaagaatgaaagcaaatcacaacagtaatcttccatccatccatccatccatctgtaaaaccctcacttactcttctccgcttccatttcgcgtttgcggcggcgttttacttctgtaagatcgaattcacgaatgatcaatcgcattccgcggtcggagctgaagtagtttttagtccagttgataaaagtcatgaagcgattgcggaaaccaactagcgacatcaggtgcacaaacatccacatcatccatgcaatggctcctccaattttaaaattgcctacctccaccactgcacggtnntgatcatacaggctacatcaccaatggcaaatacatctgaataaccttgcacgcgattgtattcatctacaagatatctcccggttttggtaatgagtttgggatcgagtccgtcgatgggattgcccgttacacctgctgtccagatgagcgtacgtgcaataagatcgtttccggtattggtttgcacgtagtctnncggagagcatgggtaaaacacgatcgccggattgaacgaggtaaatattcatcttccccaaatcgagttcgggatagtcgcgggggaaaacgtgtttctttaattctcccaatgcaccggctaactccacaccagttggaccggctcctgcaattacaaagttcatataactctgttttttgcgttcgttggtgatggttaggatcttttcgaaattctgaaggatcatactgcgcaaatcgagtgcttcaggaacacttttcattggcatagaagaaatggtgagtccttcgtttccgaaataattggttttagcaccggttgcgataaccagataatnnttctgaaaaaaacattcttcgatttaccaaagatcttgcggataggataggcaatggaatccgcttcgagtcccgcagtggctacctgatacaagagcggttgaaaagcgtggtaattgtttttatcgatcagtacaacctgaacatttttttttgaaagtgcttttgccaggcgtatgcctccgaaacctcctcctattactaccacacgggctttgcctgaatttggaatatcgatcagcatagttgaataatttatccttccattacgccggacctaactttttcattaagccggtcgacgagcgttcgggtgagtgaattaaaatagcgtttcattttgtagctgctcacccattgccnnttttgcggattgagtgaacattcgtacacttttattttgtgttcgagggcaagattaatgatctgcatgcgcatcacacctgcaaggcatccatcggaaagtgcgggagtatataataccccgttgcaaatgatgaacaaattactgctgctggcttcgatgatgtttcccttgtcatttacaatgagtgcatcatcgagtttattctgcttggcccaaagtgcagacatgatgtacaagagggaattggctgttttgtagatggaaagtttattaaccggcttccggatctctgtataaagatctacggttaatccatcctcgttcaattggtaatgatgatgaataatgggcaatgcttcaattacaaatcctgcaccgttatcctgcggaaggtaaaatccgccactgttgcgatacaccgccagtcgcaaccgggcaccatcggtgatgccgttggcctttagtaattcattgattttttcagcgaaaaatgaaagggaaaaatagtcgggaatctccattttcagcatcgccataccctccaataaacgtgcaatatgactctcaagaaatgcgggtcgtccctgcataacgcgcatggtctcaaaaagaccatcaccgtacctgaaggaccggttttcagcagtaagataaggctgcgatgcctcaaccagctgaccgtcgcacattgcaaaacggaatggtgtcatgcctcaaatttgctctaatataggcaaaagcggagaattactctcaattaaaatccccttaaccccggcaccgttagcggccactacanntaaccgatatgcccgcatctatattaaaccgggctatcgccttttcgagcagtaaagaacccggctttcggcaaaggcatttacccgttgtggggtgatgcggacaataataaacttcctcaaaaaagagattttccccggcaagcaaatcggcaatgtattgctcaacttcaaggtattctttggtg

SEQ ID NO: 1282 - DNA, 19710 bp, synthetic construct
  source 1..19710: mol_type = other DNA
  misc_feature 1..19710: note = Synthetic
ggtccaacacccagaacataggcagcttcgtcttgcgggaataaagccatattgctatcaatattcctattgccccaccgtgtgaagccaagccttgataacctatgaaattccaaccctccgccgtgctttttatcggcaacaacatctcaatcgggtgcgtaagatagtaggaaggttcatagaaaagacagtgtccgagccttgctcctatcaaaacgccgaggaagacatagaaagccaaacggtcgaggtaagaagccggaactttttccttgtcaaacaccactgtcttcaaaatgcagtagcctgcaacaaaagccaaggcgaacaaaaggctgtaccatctcaattccaacgaaccgagagagaaagcaacggggttcatgtcccataaaacggctgcaatgttcatttccgtagtgtattaaggtaaacgcttgcaaagttagtaaatttaatccgattacacggaaagagtcttttcaagcatgggagaaagcaagaaagcaaatgcttcttcactttcccgcttttgaggcatttgtttcccaatcaaagttctttaccgttttatttgtaccgtgtcgaaaatagttgtaattttgtcgtttcaaagaggaaatcctccttctcgcagcagagaaaaacgaaacgccgtttcaatcggaacgaaaggccgaaagaattttgccgaacgccgtttcgattttctaaaacggcgtttcattggaggctatttcaagagcttgaaaaacagaatagaacaaataaacagtataaacaagatgataacaaacaattttgcacaccgtcacaacggtccgcaacctgcagaggttgaaaaaatgttgaaggtcatcggcgtgaagagcgtagatgaacttatcgacaaaaccattcccgaaaagatacgtttcaaaaagcctttgaaccttccggaaggaatgaacgagtatgaatatttcacaatgttgaaacgcttggcagcaaagaacaaaatatacaacacttatataggacaaggatactacaacaccattacacctgccgttttgcaaagaaacatcttggaaaacccgggttggtacacctcttacactccatatcaggcggaaatttcccaaggtcgtttggaaactctgtttacttttcaaacggttatttgttcccttacctccatgcctttggcaaatgcgtcattgcttgatgaggcaacagcgtgtgcggaagccatgttgatgttctacggttcccgcagccgagctcaacaaaaagaaaatgtatgtaagtttttcgtaagcgaggatttgttcaagcaatccatagatgttatcaagacaagagccctgcctcgcggcattgaagtggttgtgggaagcgaaagcacggttttggacgagactttcttcggagcaatactccaatatcctaaccgcaaaggcgaaataaaggattacaccaaattcgcagccgatgcaaaagcaaaaggcatattcgttgcagtcagtgccgacataatgagtttggctctattgacacctccgggagaatggggtgcagactgtgtttgcggttcaacacaaagattcggttgtccgatgagcttaggcggaccttcggcagcatatttcgcttgcacggaaaacttcaagcgtacgatgccgggcagaataatcggcatgactgtggacgcacaaggcaacaaagcctttcgtcttgcattgcaaacaagagagcaacacatcaagagagagaaagcaacctccaacatttgtacggcacaagccttggttgccataatggcgggacaatacgcatgctggcacggacaagagggtataagagagatagcggaagacataaacaataccgcagcaaccatagccgcagccgcagaggcttacggatacaagcaaaagaacgaatactatttcgataccattcgtttgacctgccctgttgccgcagaaaaagtttgcagtttggctgagaaaaacgagatgaacttcttgtcaatcgattccgagacaataggaatttcaacggacgaaacaacaggttgcaaagagattgaacgtatattgaaagtgttggcggaagcagccggaaagacatataaagaattcgagtgcaaaaaagccgacagcataccaagcaatttgaagagacaaacgccttatctgacacaggaaatcttcaataaatatcacagcgagaccgaaatgatgagatatttgaagaagatggaggtaaaggatttgtccttgaatcgtgccatgataccgcttggttcttgtacgatgaagttgaacgcagccatggagatgattcctttcacatgggcggagttcacgagcattcacccgttcgttcccgcagaacaagccgcaggatactatgagatgattgccgatatggacaaaatgctttccgaaatcacgggcttcgcaaaaataagccttcaaccgaactcgggagcggcaggagagtatgcaggtttgaccacgataaggaactatcagagagcaaacggacaagagaacagaacggtatgccttatccctgcttccgcacacggcacgaatcctgcttcggctgcaatggcgggaatgaacataatagtcatcaagaccactgccgacggagaaatcgacattgcagacttgaaagagaaggcggaagccaacaaagagaacctttcatgcctcatgataacctacccttcaactcacggagtattcgaagaaggtatcatagacatcataaacatcattcacgagaacggcggtttggtttacatggacggagccaacatgaacgctcaaataggtttgacttctccgggttacatgggggcagacgtatgccacttgaaccttcacaaatctttcgcaatgcctcacggcggcggcggtccgggagtaggtcctatcggagcgacagccaaattggcagactaccttcctacgcactcgattgtatccaccggctcacacaaaggaacgcctgtttcagcttctcctttcggaagtgcaggtcttttgccgataacttacggctatttgaagatgtgcggaagagaaggcttggaacaagcaaccaaatacgccattttgaacgccaactacatgcgtgcaagaattgcaacggcatacaacatcctttacacaggcaaacacggcatgtgtgcccacgaatttattatggattgcaaccaattctcattgagttcgggagtacaatgcggcgatattgcaaaacgattgatggactacggcttccacgcaccgacggttgccttccccgtacacggaacattgatgatagaaccgacggagagcgaaccgctttcggaaatggatcgtttgtgcgatgccttgattgaaatacgcaaagagataaaagaaatcgaagacggaaaagcagacaagcagaacaacgtcatcatgaacgctccgcataccatgcaggtagtttgctcagacacttgggacagaccatacagcagacagagagcagcattcccattgccatacgatgataaatattggccaagttcttcaaaggttgacgatgcctacggagacaggaaccttgtcgtaagctgggaagcgtaagcagaaaatacagctgatgattttacatcaaaaagaagaggcaaaccatcatcgtttgcctcttctctttttataattccataagtcaaagactttactttcctgcattcgacaatcttatggtttcagggaagcgaaaatctcgtcgaacaagtctgtgaaatgttttttatttatcgccttatctgaaaaggcttgtacgaatttgctattgcattctatcatttcggcggtatcacaagtcaatgctttatccaagaaatcacaattcccgatttcttcatcgctcagcattattgcttgcaaaccgtttttcctaagactttcataagcaggcagattactcaacacaggtacgcattccgcactcacggcttccataagagaggcaggaactccgtcgcttatcggaatggacacataaactctgctcttggcatagttttccgcattttgcgaaggagaaagccatgctgttatttcaactttatcctctatcgataaggctttagccaaatcagaaaactccttttccctgccgcaacctgccactataagtttccaatctgcatatacaggcttacgaacaaagttggcaaaagctctgattatgaactccactctgtaaagctccgaatgcagacggttggagtatataatgttttgtttctccgtcgccttaacaggcgttattccaaggttggcaatcatgatgcggctgcccataggacaatactgctgcatttgagaagcaagataatcactgcctgcattgtaatgtgtggaatgcgaaagaatatagcgtagcattctcttaaaaacaaaattacgcttcggcataagcagaacatcgctacccactcccacggcaagaaccggaatatgacttttgtttgcaagcaaagtaatgaaagcggtaagattcagctgatataatatgataatatccggtttgaactctgccaactgccgccttgtttgcaaaatagcggagaaaaaattccttatgccgaaatttatgtctgccgaaacttcggtatcggaaaaataacctcctataagacttctgaaattttgcagatttatgcttttaggattgcctgcaatgaatgccttattccttttcattcttctcgtcaagcacttcgtatatactgttattgcttttgaaagtggagactaagcgttttatatttttcactattgccatgtctctgtcctcttggtcggaagagagaatttctgccaattcgcttatacacttttcaacctcctgagaatccacttcctcttgttttgcaatgaatatcttctcatgatatgtcggaagagtgttctctttccgtgtgagaagctcttctctaagcttttcacccggacgcaaacccgtatattttatttcaatatccttacccggttcaagtcctgaaagttttatcattctttcggcaagggaacggatttttaccgattcgcccatgtcgaagagaaaaatctcacctcctttacccataatggcagcttccaaaaccaaacggcttgcctcgggaatggtcatgaaataacgagtgatttcagggtgagtaaccgttacaggaccgccatgaagaatttgagccttgaaacgaggaataacgcttccgttcgagcctaagacattgccgaaacgagtggttatgaacttggtctcgccacgagagttcagttgctgtatatacatttcggcatatctcttgcttgcacccatcacattggtcggattgaccgccttatcggtggaaatcattataaacttctccgtttctgcttccaaagcagtatccgcaatgttcttggtacctataatattattatatgcagcctcataaggcgaacgttccatcatcggcacatgcttataagccgccgcatgaaaaacgatttgaggacgatactttgcgaacacctccttcaaagcattcttatcgctaaccgaagcaatgacaatatccttttgaacattcggaaacttatcgttcaattcgttttctatgttatagagcggtgtttcggcagcatccaacaatataagttcgacaggaaaatttgccaactgccttacaatttcgcttcctatgcttccggcagcaccgcttatcaaaatccttttaccggataattcaccatgaataagattacggtttatttttatctcctttctgcccaaaaggtcttctattcttatttcctgaatctgattttctcttaattttccatcagtccacgtgcttattggcggcacagtaagaacctttactttgtttgcatggcataactcaaagatttcgttctttctttccgtgcttatcctgtttgtggcaattataagttggtctatatctttatacttaatcaaaaactcctgcttttccctcggataaattttctgacccattattgtctttccgcaaagattggggtcatcgtctatgaagcctttgatataatattttctcgaagcacttgcaagcgtatttgccgtagcagtacctgttctgcccgcaccgaaaatcacaacctgcgtattcaattccgtattgactcctgccttatatgctttctcaaatagccatcgcacaaacatacgaaacataaacagaaacatataactgatgcaggcatctatcactataagttctttgggaatgtagtccatgtccacattgagcttatacacggcatttattaccaaaagaacaagtgtagatgaaagcacggcaaaaaatatccgcatcatatcgctgaaagaagagtatcttataacgctgcgatgaacattaaatactctcaaagccaatataagcaaaacacttgtaaggcagataaatcgcaaagagtaagcgtcaaaagggaaatggaaccacttctctttaacatcaagaagcaatcccgagataaaaacagacaaaacaacaattacggcatctatcaaagagacaacccatgtcggaatatacctgtctgacatgaatctgtctatcaatgccaacattttatgataaaggcgattcattatttctattgtttgatttcaatgcattatatagtatttctatcgggtgcagagcctctcgtgaggtaaaatgtcttatttgctctctgcaacttgtgccgggggctgcgacaatggtatctttcgatgcattctttatcgcaggcacaagaacactctctgcaatccgtttactcatctcgtaatgtcttttctcgtatccgtaacttccggccataccgcaacaagccgtcggaagaacttccactttgtaatttttcggcaaagataacattttttccatgcaggcagttcctatcaatgccttttgctgacaatgtccgtgaagaatgatatgctcttccttatcggtgaatgaggaactctttattctgttttcatctatctctttcgcaataaattcatcgaaaagatagacatgatgattcatttccgccaattcgttgtattctcttgccaatacaggatattcatctcgcaaactcaataaagccgatggctccaaaccaaccaagggtgtgtcttttgaaatcacggaaagtaaggcttctatattcttcttcgcaattttttttgctcttttgagcattcccttgcttattgcaattcttccgctttcgcatataggagctttcttcactctgtaacccaaagccgcaaataatgccactgctttcttcgccacctttgtatcttgaaaacgagaaaattcgtctatatatatgtatatggtagatttatctgatttttcaagactttcattcagtccgacttcttgtttaatcagtttatcgaagttgcaggattgaattgtcggcagttttctttcttccgcaaagcccatgacagacttcaacacctctgaggtaaagtcgtttgaaacaaagaaattatacaccgacggcattaccgcagctattctctgcattcgtggcaaactattcatcaacaatacgctcaaaggataagcatgtttatcgtaataatgctgcaaagcttcgcttttcaacttgcttatatccacattggaggaacattcccttttacaagccttacacatcaaacaatcgtccaatatctgcttcacttccttgcttcccaaggggtctttctctttggaaaatgaaagcatttccctaacaatgttcgctcttgcacgggtactctcctcttctttgccgctgaccttgaaagtcggacacatcaaaccaccgattatgctgctctttctgcattctgccgctccgttgcactgctccgctgcacacaagactccttgttccttggtgaaatcataatacgtatgcacttcactccgtttcgtcccctcgtaccgcaaattgtcgttcatggcaggagtgttcactattttacccggattgaaaacattatccgaatcccaaacatgcttcatctccctcatcaggtcatacactctttcaccatacataaggggtatccactcaccacgcaatcttccgtccccatgttccccgctcagacttcctccatatttctttaccaacaaagcagtatcgtatgcaagcattcggaacaactcgacatctttcttttctttgaggttcaatacaggacgcaaatgcaactctcccgttgcgatatgagcatgatatacacaactcaaaccataagcgtcaagcatattttgaaactcccgcatgtaatccggcaatttttctaccgccacagccgtatcctccaccacagatacaggtttcaaagagccgggaacattggtcagcagtcccaaacctgcttttctcaaactccacactctcttcgtatcctctccataaacaatactgaaatcatatgccttaccctctgccttgaaatcctgcacaagtacctctgcttgctgttccagctcctctctttttgcagctgaaaactcgacaatcaatactgccttaggcttaccttttatgaagaaagtattctctctttgttccaaattcctatatgcagcctctattatattgttatccatcagctccactgccatgggattgtgccgcaaagctgtcagatttccataaaaactgtcttgtaaagatttgaagtgtacacacaccaaggctttctcctttggtggtaaaggaagtaaattcaatttgaactcagtggcaaaagccaaagttccctcactgccgcaatacaaacgggcaagatttaagggaaagccctccgtcaaggtatccaaagcataaccgttattccgccttgtaagacttttatcggggaatgcttcttcaacagccctctttatctcacaatccgaataggtatcaagtatatatctgtatatcctaccctcagaagttggcttctctgccttttctcgacactgcttctcatcacatcttcccagcaccgtttcctctccgtctgcaagaattaccttagcctccaagatatgctctctcacacttccataaaccaaggaatgtaaaccgcaggaattattcccaaccattccaccaatacaacatcgatttgctgtcgatgtctcgggggcaaaaaataaaccataaggtctcaaaaagatattcaactcctccaacacgacacccggctgcaccctgatccaacgttcctccttatttatctcaattatctcttttaagttcttactcacatcaaccacgataccctctcccacaacctgaccggcaagagaggttcctcccgcacgagggataagcgacactttattatgcttacaaaaatccaaaagcaatcttatatcttccacacaatctttgcacggtacaaacacagccaaaggcatttgcctataagccgatgcatctgtagaatacaatatacgacttactttatcaaaatgcaactcaccttttaagcgagatttcaaactttccaaaccttctttcaccatcgcagaacactgaaaaagaaatgcaaaggtacgaaaaaatatccccaagcccgaatcccacagaaattcgcagtcccctattgatagaactgccattttacaaaacaatcttctattaaatactgttctgcaaaagtagaatcataagattgataaacacacaaataaaacgaataaaggtaatgcttcaaaagaaaacttctttcagaaataatggtaaacaaagaaaaagcgacgattccgtccgaagaacgaaaccgccactcttaatgttctcacaacggaataatccttattgtgaattgcttcaaattagtgctgcaaagatacaatttttctcgaaaccacacaagcttttcaaagtttttttgtacctttggcaactaaaagagtaaaatcatacagctgatgaagaaaatattaggtttggatttaggcacgaacagcataggctgggcggtagtaaacgaagcagaaacagaagataataaaaaggaacttgtaggaatagagtgtgcaggaagcaggataattcctatggacagcagtattatcgggaattttgagagcgggaattctgtttcacaaacagcagaacgtacgcaattacgtggaaaccgacgcttacgggaacgttgtatattacgccgtgaacgcttactcagagtattgaatctacttggttttttaccggaacattttgcaagagaactgaatcgctacggcaaattcacaacggattctgaacccaaaattgcgtggagaaaaagctcaaatggaaaatttgagtttattttccaagactcgttcaatgaaatgcttgaagattttcataagcgtcagccggaacttacagctgatggcaagaaagtgccatacgattggactatctattatttgcgaaaaaaggcattgacgcaagcaatcacaaaagaagaattggcatggatactcctaaatttcaatcaaaagcgaggctattatcaattacgcggcgaggaagaagatgaaaaatcaaataagcaagtcgaatttttcgcattgaaagtggtttctgtcgaagatactggagaaaaaaagggaacagatacttggtacaatgtccatttggaaaacggctggatataccgacgcccaagcaatgttccgctcgattgggttgggaaggtcaaagaattcattgtaacaacggatgtgaacaatgatggaactccgaaaattgataaagatggtaatgtaaaacgttctttccgtgccccaaaagaagacgattggactttgctgaaaaaaaagacagaaaaggatataggctcaagtcaaaaaacagttggaacatttatctacgattcaattcttgcaaatcctcaacaaaaaatcattggtaaattggttcgcacgatagaacgcaaattctacagagacgaactgaaacaaatcttggaaaagcaaaaagaatttcatgtggaattgcaagataaagagttatataccgcttgttgtaaagaattgtatccgtcaaatgatgcgtatcgtaacagcattaacaaccgcaatttgaaagatttacttttggatgacatcatattctaccaacgcccactaaaaagtaaaaagtcgctaattgcgaattgcccctacgaagaattgtcttatatggataaagaaacaggggagttaaagcatgcgacaatcaaatgcattgccaaatcaaacccactgtttcaagaattccgactatggcaattcgtgaagaatttgcgtatttatcaacgagaaaaagaggtaaatgggaaactacaaatagatgttgatgttacagcagaattactgaagtcagaagatgactatacagaactattcgattggttgaatacacggaaatccataaagcaagacactttgctcagttcatacttcaagttcaaaaaaggcaaaggcaaagcagaatatccctatcgctggaactacgttgaagataaagaatatccttgcaacgaaacaagagccgaattactttcaggactgaaaaaatgcggtgttgatgaaaaagttctgacttctgaaatggaaatgtcgctttggcatattctttattccgttgatgataaaatagaaattggaaaggcattgaaaaagtttgagaaaaagcacagtcttcccgaaacgttcgccgacgtctttgaaaaagtaaaacctttcaaaaaagactatggttcctattccgaaaaggcaatcaaaaaactgttgtcgttgatgcgcatgggcaaatattggaattatgacgtcattgacgcaaatacaaaagatagaattcaaaaaatccttaccggcgaatatgacgaaaatatcaaaaacaaggtacgcgaaaaggcgataaatctgactcaaaactcatattttcaaggcttgcctgtatggcttgcctgttacatcgtttacgacagacattccgagacaaaggaaatctcaaaatgggcatcgccagcggacattgattcttatctaaaaactttcaaacaacattcgctacgcaatccgattgtagagcaagtgataacagaaactcttcgaacggtgcgagatatttggaagcaagtcagacaaattgatgaaatccatgtggaactcggtcgcgagatgaaaaatccggcggacaagcgtaaaacgatgtcggaaaatatcaagaaaaacgagaatacaaatttgcgtatcaaagcgatgcttgccgaatttgcaaatcccgctttaggtattgaaaatgtacgtccatattcgccgagccaacaagacattttacgtatttatgaagaaaatgctcttgacaacctttcgaatgacgacaaggacttcgagtttgtacagaaaatttcaaaatcggctcaaccaacaacatccgacatcattcgttacaaggcatggttagaacaaaaatactgttcaccttatacaggaatgcctattccgctttcaaaacttttcacacctgcctatgaaatcgaacacgtcataccgcagtctcgctattttgacgattcattcagtaacaaagtgatttgcgaagcggaagtaaacaaattgaaagacaatcaactcggctttgaatttatcaagaatcaccctggtgaaaaagtgcaattgagcgaaggcggtgtcgttgaaattctatctgttgatgcttacgaaaagtttgtcaaagaccattattcgcacaacaatgcaaagaaaaagaaattgttgttggaggatattcccgaagaatttattgcccgccaacttaatgacagccgatatatcagcaaagttgtcaaaacgcttttgtcgaatatcgtgcgagaaaaagatgcaaatggcgaatacgaacaggaagctacttccaaaaacctgattgtatgcacaggcaatataacagacaaactgaaaaaagactggggtatgaatgatgtatggaatcgaatcattttgcctcgtttccaacgcttgaataagttgacgggaaaagactgctttacaactcaaagcgcagaaaagcatactattcccgctatgcctctcgaactaaaaaaaggattcaacaagaaacgcatcgaccatcgtcatcatgccatggacgcaattgtcattgcctgcactacacgcaaccatgtaaatttactgaacaacgaagccgctaaaccacaaaataaagaaaaccgctaccaactatcccataaattgcgccgctacgaaaaggttatgattaatggcgaagaacgttctgttcccaaggaatttatcaaaccgtgggaaacttttacacaagatgcgcacgctgtcttgaataacatcatcgtaagtttcaagcaaaatttgcgagtcatcaacaagacagtaaattattatcagcattttgaaaacggcaaaaaggttttcaagaaacaagagaaaggcgataattgggcaatccgtaaatcaatgcacaaagacacgatatttggcgaagtcaatttacgtttcaagaaaactgtttcgctcaaagatgcattgaagaatccaaaagcaattgtgaacaaggatttcaaagtaaaaattatagagttacttgaagcagggcgtgatgctaaatacatcaagaaatacattgacgacaacaaagacgtgtggtcggatataaacatcaaaaagattgatgtttactatttcaccaaagaaaccaacgaccactatttcgctacacgcaaaccacttgacacttcgttcaataagacgaaaattaaagaaaagataaccgacacgggcattcaaaaaattctattgtcacatttggcagcaaaaaataacaatccccaattggctttttcgcctgacggcattgacgaaatgaatcacaacatccagaaattgaacaacgggaaaaatcaccagccaatatcaaaagtacgagtttacgaacaatccgataaaaaatttgccatcggtaccaaaggtaataaatcgaaaaaatttgtagaggcagccgataacacgaatttattcttagctatttacgaatctacttctatcaacccgaataacagccgttcctatgtaaccattcgattaaatctggtgattgattgccaaaaagaatttggaaaagattggaaagataagttggattctctattgaaagaaaaaggaatagtagcaaacgatgcccatttgctgtttatgctttctccaaacgatttggtatatttgccaaccgaagagcaaattatgaatggtatcgatatcattgacagaacaagaatttacaagtttgtgagttgtagtgggaacatggctgattttgtccctgcaacttccgccaatacaattttctctatgactaaaaaagagcaagaaaaaaagtttgaccaagagggctactttaatatacaagacgagtatggtgttggtagtccaaagtctaaaaatgaacgagcaatcactggcgaaatgattaagaaaacttgtattccgctcaaagtggatagattgggcaatattgtggaagtaaacggggtgaaattatgattaaacggacattgtgtttttcaaatccagcatacttatccttgaaaatgaagcaaatggttatcaaactcccggaagtagaatgcaatacttcacttccggagagtttcaaaaccgagatgataaagacaatacctattgaggatatcggcattgtacttttggacaataagagaattaccctaactcaaggtttgcttgaaaaactccttgagaataattgtgccgttataacatgcgatgagagccatttaccaataggcatgctcttgccattaaatggaaacagcacacaaaccgaaagaatgagataccaaattgaagcctcactacctttgaaaaaacagctttggcaacaaacaatagtagccaagatacaaaatcaggctgcaaatctcaaacaagtcagaggaacagaagttcgcaacatgctcaaatgggcaaacgaggtgaagagtggagatagtgaaaacatggaagcacgagcagctgtctattattggcagaacgcctttccttctgtacctaacttcgtgcgaacaagagaaggcattactcctaataacttactaaattatggctatgcaattctcagagcaatagtggcacgagcattggtatcaagcggattattaccaaccctcggaatacatcacagaaacaaatacaatgcctattgcttggctgacgacatcatggaaccataccgaccatacatcgataaattagtcatggaattgtttgaccaaaaccagaattgcgaagaactaaataaaaaattaaaatcacaattacttcaaatacctgtcattgatgtaaccatcaattctcaacgcagccctttgatggtagctgtcagcactaccacagcctcattacagaagtgttactcgggtgaagctcgtaaaatcatttaccctataatgtaacaaatgcaacgtttcagcgaatataggattatgtgggtaatggtactttttgatttaccgacggaaaccaagaaagaccgggcagcagcggcaaagtttcgtaaaatgctcttggaagatggcttcacaatgtttcaattctccatctacataaggcattgtcccagtaaagaaaacgctaacgttcacatcaaacgagtaaaaagttctttgcctgaacacggaaaagtaggcatattttgcataaccgacaaacaatttggcgaaattgaaatttattattgccgcaaacctgaacgctcaaacggttgcacacaacagttggaactattctgaaaactctattttttattttctaattacctttataaacaactgaatccgagaaatttactcggattcagttgttcgtgcactgcaaagatactaatttgaaagcaattcacaacataagcctgctgtattattgccacgccctcgttgttcgtgcactgcaaagatactaatttgaaagcaattcacaacatgttcctactggttctatcgaggctttgcgttgttcgtgcactgcaaagatactaatttgaaagcaattcacaacaatatattattgaaaaataattttgttgccgttgttcgtgcactgcaaagatactaatttgaaagcaattcacaacaggctccgaacaattcggtatctttgcagtgttgttcgtgcactgcaaagatactaatttgaaagcaattcacaacattatcaccactcttgccgaacgttgccttgttgttcgtgcactgcaaagatactaatttgaaagcaattcacaacggacgcagagttgtattatcgcaatgagaagttgttcgtgcactgcaaagatactaatttgaaagcaattcacaacaccccaagtttgccatccgttttatgcctagttgttcgtgcactgcaaagatactaatttgaaagcaattcacaactgatcagtatcagcaatttgcttgcctacagttgttcgtgcactgcaaagatactaatttgaaagcaattcacaacgtaacgccttggagtattttttttattgcgttgttcgtgcactgcaaagatactaatttgaaagcaattcacaacacctccttacttcatcgcttggtgtatcagttgttcgtgcactgcaaagatactaatttgaaagcaattcacaactagtcatgtagattatatagtctacgatcagttgttcgtgcactgcaaagatactaatttgaaagcaattcacaacgtttttgttgccggtatgtttattcgcaacgttgttcgtgcactgcaaagatactaatttgaaagcaattcacaacccttgtttgtcgtaggagcaatctacgcttgttgttcgtgcactgcaaagatactaatttgaaagcaattcacaacgacgatgagtatgaggtactagacgtagaagttgttcgtgcactgcaaagatactaatttgaaagcaattcacaactatcttccacagataatggaatatacagcagttgttcgtgcactgcaaagatactaatttgaaagcaattcacaactagataacgtgctgttgcacaagtggagaggttgttcgtgcactgcaaagatactaatttgaaagcaattcacaacacacgaaaacattggacaattggatgtgaagttgttcgtgcactgcaaagatactaatttgaaagcaattcacaactacgcttaccatacaacccgaggttagtaagttgttcgtgcactgcaaagatactaatttgaaagcaattcacaacagtttggcatgaggcaacggatagttcgacgttgttcgtgcactgcaaagatactaatttgaaagcaattcacaacaaatcaagcaagaggaattacccgaatgtagttgttcgtgcactgcaaagatactaatttgaaagcaattcacaacccgatgaggtcggcaatgcgtcaagaaattgttgttcgtgcactgcaaagatactaatttgaaagcaattcacaacgcaaggtctctcgcagtatcttcgattgcagttgttcgtgcactgcaaagatactaatttgaaagcaattcacaactacttctcatctatgtctaatgtataatcgttgttcgtgcactgcaaagatactaatttgaaagcaattcacaacgggaagagatacaagcagagacgttgaagcgttgttcgtgcactgcaaagatactaatttgaaagcaattcacaaccactctctgatataatcttgtatcccttaagttgttcgtgcactgcaaagatactaatttgaaagcaattcacaacttcagtttgtttatttcgacagttaattcgttgttcgtgcactgcaaagatactaatttgaaagcaattcacaactgtagatgaggcacacggagatttccgaacgttgttcgtgcactgcaaagatactaatttgaaagcaattcacaaccatacaccaaagaggaattgatataaaccagttgttcgtgcactgcaaagatactaatttgaaagcaattcacaaccgcagtcttgttgccttttactgtcttcgcgttgttcgtgcactgcaaagatactaatttgaaagcaattcacaacgtaagatgcagtaccgttgcattttagaagttgttcgtgcactgcaaagatactaatttgaaagcaattcacaaccagcggcaaatatacgctaaaatatgtagggttgttcgtgcactgcaaagatactaatttgaaagcaattcacaacatgatagcattaggtttgttttttctgtagttgttcgtgcactgcaaagatactaatttgaaagcaattcacaacgtgtacttctcgtttaattcgtttatcgtcgttgttcgtgcactgcaaagatactaatttgaaagcaattcacaacaagggttgtttaagaatttttgattttgcgaaaagcctctttgatagcgtctcccaatccttcaaaactgtaagcaatacctgcacagatggcgaaaataacgccaatgatacaagcgaggctgaatacaattcctatgagttttagcatgtggcaaagataaggaaaaatggcgacacacgagataaatttcaactttaatattagttattcgtgtactgcaaagagtatcaactttggcatccctccttatcttcggtgctggtcgcaagtgggtcagcgacacctcagcactcggagcatacttcttattgtagtcgaaggcttcggcggtattcctgctcgaaagggttacctgacctttgacttcgcgtttcttgtcatcgacaactttctcggctttgcttttcagcttgttgccgagatcattgaacctggttcttgccgatacagtagtcgcgttcatcatcagcaagaccatcagggcgatgctgctgttcctttttaagcgtactcataatgtttttaggttattattcatttctttgccttgaagccaaaccactggcggaatacatttttaaggttggaaaacgaacggatttttctaatcacagttacattgttccagcgatagataaaccagtcagccacttcgttgggcaaagcatttatgaagatgtttcttgccctgttgacaacgatgctcttaactgaagacttggctgtattggatacaacgcctttaattatttcactctgagtcggtgtgccttcaggcaacttgacatatttagcaaacctggtaaacagttcgctgtattgcatattgagcggagagtcggcgagacgcttctcaaactccgcttgatcatggctttcatcggcgagatgtctcatgccgtcaaaaacctcttccgcctctgctttagcctgcgggggtagattgaaattgtcgtagaggctgttctttctgacagcaatccaattttctttattcatatattcatattatttgtgcactgcaaagatactaatttgaagcaattcacaagagaacaattcgaagaaatgaagaaagggagtgaaacactcccttttacttgcaggcgagggtatgtatcttacgtatcttcccccccatctgcctgcaaagatacaaccaaagcaccactcctgtcaagtctttgcatgttaaatattg

SEQ ID NO: 1283 - DNA, 19642 bp, synthetic construct
  source 1..19642: mol_type = other DNA
  misc_feature 1..19642: note = Synthetic
cttggggcggcggggaatgtcctgaacgtgtaaggggcctttctgtaaacagcggaagaggcgatgtcgccatacgttatgttattattccaccgccactgtttcgtctctttggtgaatatgcggtagcggtatctgcaatcgggtttcaggccggtgatgcgtacccggtgcagcgtgtcggcggctaacttccgcccgcgcagcgtagcgtaatatttccggcgttccctgccatagaagtggtcgttgccttcttcggcgatttccacccatgacaggcccggcttgtcggtaaaccagatgatggtcgtagacgttgagtccatatcgctgatgtatgggccatgggtgattttaatagcaaatgttgatgcggtcaccgtcaacatagccagcaatgggataattctcataatagagtaaggttgttgtcgtacatttaaagttagtatgcattttagggtgacacaaagggtatatacctcatgtctattagtgaatacgcaataattcaaggttggtactaaatgaaagacatcttttttttgcgcctcaccgaaccgctgccggtaagaagcgggaatggtaaggagcgggaagaaaatccgtacaagcatcttgtaggcttgttaccagatgcttgtaatcgggttaccaggtgcttgtaatcgggttaccaggtgcttgtaatcgggttaccaggtgcttgtactttttggattagggattaaggattatggattagggattgatactgttattcaggataaggttgccactgcgtgtatctccagccaatatggcataatcttccaaaaacgtttgttgttttcagcgattcttcgtatatttgcagcaatatcctaatgttaatatgaaaagatgaatcggatactgacaatactaaccagccttttctgtgcgcatattctgtctgcagcagttgttcccgacatgaagttccgccgcttggacacgcgcgacggtttatccaattcccaggtgaactgcatattcaaagacagtgaaggctttgtgtggataggtaccccatacggcctgaaccgctatgacggctaccgcttccgcatcttctattcgaacgcaaacgacacgactacgctcaaggacaattacgtagacgagatatatgaggcctacgacggctgcctctggataaagcaaggcatgaactactcggtgtacaaccccgttaccgagcagttcgaccgccgccccgaccgctggctggcccggcggggcatcaagggcggaatcgaccgcatctacatcgacagccaaaaatgtttctgggtgaaaacatacgagaacgggctgtattactttaatccgtacacaaacaagctgcgcctctttaaacacggatacggccggcatgaaatccctgccgacttcggcgtatcttctttctcgcagttccgcaacagcgtgctcgtcgtgtcgtcctgcggcgatatgatgtgctttaatggcgaagaagggcgcgtgtcttggcgcgacaactacatgcgccgccatggcgggccggagaaccaaagctataggctttacgttgacagccagtgcaattattggattgtcaccacgggccacacctttgtatatatccagaagcagcaaaagtggtattcgtcgttgccccagctgctgcgttccttcggcatagggaacgtgcccgacgagatactggcgtgggacgtcaacttcgacaccaagggccgcctttggattgccaccgaccacctgggcttgcttgtggcagacttgaagacggggcagatgcgccagttcaccaacgacaagaacgacgaaaccagcatcagcgacatcaccatcaagcggctctaccgcgacgggcagggccggatgtgggcgggctcctataagaacggcgtaaacctgtatacagagagcctttccaatttcgagtcgatagagctgggtgacatcaacacaatagccgaagaccgttccggcaactattggctgggcaccaacgacaagggcatcatctgttataaccccgttacgggcgggcaggttttctttaacaaggaaaacggccacctccctaccaacgtcatcgtgagcagccatgtggcgcgcgacggctccatctggttcggcacctacgagggggggctgctccactatgccggcgggcgtttcggcgtgtaccgtgcgacgggggagcccggctcgctaatcaacaacaacgtatgggcgataaccgaggaccggcggggcaacctgtggataggcactctcggcggaggcatccagcgcatggacgccaagacaggcaagatggagacttacaacacgaagacttcggccctcacctccgactatatctcgtcgatacagctcaatcataaagggtggatcatggccggcacgtccgattattatacattgattaatcccgtgaaccgcaaggttgtcaatcaaaagattccgcaggaccccaacaccagcgtagtcactccggcaacatcgcaagtgacgcttgacagccgcggccttgtatggcaaggttctgcgtcgggcatggttgtatacgacgcggcgaacaagcgtgtaaccttgctcgacatgaaatcggggttctatggcaccagcgtgtgctccgtcatcgaagatacccgccatacgatgtgggtcgttacggaccacggcatctccaacgtcatcccgcagaaacaggatgacggtacgtggaactataccgtgcgcagctacaacaaccgcgacgggctgcaacaggggcctttcaaccagcgttccgtatgcattacgcgcagcggattgctggtggtgggagggcaggacggtatcgacatcatcaacccgctctatctcgggcagggaaagacgcaggaaaaacccatcttcagcgggctcaagctcttcgaccgggaagtagaggtgggcagccggtacgacggtcgcgtggtgctcgggaaagcactcaatgtgtgccgcgaggtggtgctcaaccatgatgaaaaccagtttaccctcctgttggcgtccaataacggctcaatccataaccgcacgcgtttcatctaccggatagagggctttagcgacaagtggattaagacggaggagaaaacacccagtatctcgttcatgagcctgccgccgggggattataccatccgtgtcaagatgctcaacgacgacgggacggtaggcacggtggaaggcacgctcgaactcaccgtccgtccgccttactggcgctcgtggtgggcggtgctgttctatgtcctcctcctttcggcgggcgcccggtatgtatggcgttacaagcagcgccgcctgttagagcagcagcgccgcgagaacatccgccgggaagaggaaaagaaacatgagatagcgcgcatgaaaaaagacttgttggagaatctgaccaaggaattgagcgaaccgttccatgacactttcgaggccctcaacgatatcatgagcaacgaaaccgacgagcagcgctacgagaaggagcaagccgtgtacagcggcgtggaacgcttgcttacccaagccaacgaggtattgaaacaaggcaggaaacgctataagctggcaccgcaggtagaggaggtggaggtgacgtcgctcgatgagaaactggtaagcgatgccacgaaatatgtagagggcaatttatcgaacgccgacatcagcgtggagacgatgagcgaggccatgggcatgtcgcgcgtgcatctttacaagcgccttctttcggtgacgggcatgacgccgagcgagtttatccgccgcatccgcctgctccgcgccgagcagttgttgcgcaagagccagcttacggtgagcgaggtgtcttatcaggtaggtttcaacaacccccggtatttctcgaagtacttcaaggaaatgtatggtgtcatgccatcgcaatactccggttcggcacgcggcgaggcgccccgcgaggcgcagtagcggcagggtattgccatgttgcgatgcacctttaacgaaaccggcaccgtttgataacattttatacccccgggttaacaaaccgactataataggaaacaaatggtaacagggcatatccgtttttcttagtaattttgcaacgtcggaaaataactaaaaacaacgatatggagagcattaagatttttgtgtctgcacttttgttgctgggggcggtcccggcagccgcggcaggctacatcctgaaaggcaacgctgttacggtgaaagtggggcagccgtcggaaaacggggctaaactcgtaaggctgcaggtaatcaacgacaacatcatccgggtgcaggccacctgcgaggaggtgctgcccgataaaagcagtctgattatcgtcgggcagaaggcaggtgcgaagcccggcgtaaccgaagacgcttcggccgtgacggtgaaggcaaagaacgtgaaggccgtagtagacaaacagacggggaaggttactttctacgacgcagcgggaaagctgctgctgaaagaggcggagggagggaaggcattcgccccgttcgccgtacccgaacgcgaaatcggcatcggcacgttgaccggccagcagcgcaacggcctcagctggcatgcactgttcgatagtcctgccgacgaggccttctatgggttggggcagcaccagtcggaagaactgaacatgaagggaaagaacgaagatctcttccagtataacacgaaagtgagcgtgccgttcgtgctgagcaacaggaattacggtctgctgtgggattcgtacagctattgccgctttggcaatcccaacgattatatgcagctgaaccgggctttcgcgctttacgacaagcagggcaggcaaggcagtctgaccggcacctatacggacaaggacggccaacggttagtgcgcggcgaggactcaatttattttgagtacggcctgcccgaggcatccgagatttgcaaggccaccgataagggcggtatacagaatctgccgaagggcttcaagctcaacggggccagcgtggtgtacgagggattcatcgaagcccctgaaaccagcaattatcagtttatactctattacgccggatatataaaggtgtttataggcgggaaggaggtggtggccgagcgctggcgcacggcttggaacccgaatagttataagtttacggctgctttgcagaagggcgagaaaacccagttgcgcatagagtggcagcccgacggcgacgtgagctactgcggactgcgcgtggccgagccccgcagcgccgagcagcaagggcagctgagcatttggagcgaaatgagccgcgacatggattattacttcattgcgggggaaaatctcgaccaagtcatctcgggctatcgcacgctgaccggcaagtcgcccgtataccccaaatgggtgctcgggttctggcagagccgcgaacgctacaagacctcggccgacatcgaaggcacgctggcagagtttcgccgccggcaaataccgatagacaatatcgtgcaagactggaactactgggaggaagacgcttggggcagccatcagtttgaggccgcgcgcttccccaatccgcaggccatgctcgactcggtgcaccgcatgaacggcaggttcatgatctcggtatggccaaagttctactgcaccacggccaactataaggagcttgatgccaatggctggatgtatcgccaagccgtgaaagacgaaatacgcgactgggtggggccgggctacgtaggctcgttctatgatgcatatgccgagggtgcccgcaagatgttctggcggcagatggacgaaaacctctattcgaaatataagtttggtatcgacgcatggtggatggatgcttcggagcctaacgtcagggactgtacgccgatgtggtaccggaaagcgctcagcggccctaccgccctcggctcgtctaccgaatacttcaatgcctattcgatagtgaatgccgatgccatctataacgggcagcgcgcagtgaaccccaatcagcgcgtgttcctgctcacccgtagcggctttgccggcgaacagcgctattccaccgccacgtggagcggcgatataggcacccggtgggaggatatgcgcgcacagatgacggcaggcatgaactactcgttgtcgggcatccccttttggggaatggaccaagggggcttctgcgtggagaaccgttacgtggaggcacaaggcgaatacgacaggacgggcgtggagaatgccgaccttgccgagtggcgcgaactgcaggcacgctggaaccagttcggatgcttcacaccgctttaccgcacccacggccagtggccgctgcgcgaggtgtggaatatcgcccccgacaatcacccggcctaccagaccatcgtgtattacgaccgcctgcgctaccgcatgatgccgtacatgtattcgttggccggatgggcacatttcaaggactacacgctgatgcgtgcgttggtgatggacttcaacggcgacaagcaagtggaggacatccgcgaccagtggatgttcggcccggcgctgatggcgtgcccggtggggtattataaagcccgcaaccggtcggtttatttccccaagcagtgcggatggtacgacctttataccggggcgcatgtagagggaggccggcagatggtagtggatgctccttatgataagattcccgtctttgtgcgcgaaggggccatcgtgccgttcgggccggagatgcagtggagcgacgagaagcccgccgagcttatccacctttatgtatatacgggtgccgacgccgctttccagctctatgaggacgagggcaccaactataactatgagaaggggaagtatgccaccatcgacatacactacgatgaggcttcgaagacacttaccttcggcaagcgccggggcagtttcgacggcatgctgaaaaaccgccgcttcaacgtggtggtggtatcgaaagacaaggcgcagccgctgaatctggataaccctgaaggcaaactggtacattacagcggaaaggccgtaagcgtacaattataattaattcgtcaatatggcacggatggcgcggattgaacggggacgggggccttgcaatccgcactgtccgcgccatgcaatatttagctttatttatgaaacgattcttttttacggttttcatcctctgcggcatcgccgtttcttcttcagctgtgcgggaaaggaaaaactttgaccgtggatggctgttcgcgctggccgatacggccaatatgtcggcaaccggttataacgatgctgcatggcggcggctcgacctgccgcacgactgggccatcgagggcgatttctcggccgacgccaagtcgggagccagcgggggggcattgcccggaggtatcgggtggtaccgcaagcattttacgctgaacgattcgcatgctgcgtctaaccgttatttcatcgggttcgatggcgtttacatgaattccaccgtttacgtcaacggtaaggaagtggggcaccggccttacggatacagctcgttcgagtatgatattacgccctatgtcaatctgcagggcgacaacgtggtggctgtacgcgtggacaacagcgaccagcccaactcgcgttggtacagcggttgcggtatctaccgccatgtttggtttacaaaaaccgccagtgtacatgtgaagcactggggcatgcaggtggtgcccaaggtcggcgagaagaagaaacgggcggcggtagacgtcacggtgacgctggaaaaccatcggggaacaccggtgaaggcaagcgtgaggcagctgttgctggatgccggcgggaacgtcgtggctacgcggacgggcaatgacgtgaccataggcaaggaagccgacgtaacattgtcgctgccggtgaagtcgccccgtatgtgggacgtaactgacccttatatatataaggtgaaaacagaggtgatggtgggcggggtgctggtggatacctgcacggccaccacggggttccgcacgttccgtttcgatgcccggacgggtttctggctcaacggcaggaacatgaagataaacggtgtgtgcgagcatcacgacttgggatgccttggcgcagccttcaacgaagatgctatgcaccgcaaactggtgaagctgaaagcgatgggggtcaacgccatccgttgctcgcacaacccgccggcacccgagctgctgaacatgtgcgacacgatggggctcatcgtgatggacgagagcttcgatatgtggcgccgcagaaagacgaagaacgactatgcgcgcttcttcgaccagtgggccgagcgcgacttgggcgatatggtgaagcgcgaccgtaaccatccctcgattctgatgtggtcgattggcaatgaggtgctcgaacagtggtcatcggccgatgctgatacgctgacggccgaacaggccaaccttatattaaatgccgggcgcgatgcctctgcgcttgccaaggacggggaactgagtatcaactcgttgctcaccagccggctggccgccatcgtgcgccgtcatgatgctacgcgcccggtaacggccggctgcaacgagccgtcgccggataaccatctgttcaagagcggtgcccttgatatcatcggcttcaattaccaccaccaatggataaaggatgtgccggagaattttcccggacgcccgtttatcttgaccgagagcgtgagtgccctgcagaccacgggcaactatatcatgccgagcgacagtattatctctgcgcctaaggagtggtggctgccgtatacggacccgtcgttcatgtgctcggcctatgacaacatgcatgcgtcatggagctctacgcacgaggaaacatgggatgtggtgaagcatacgccttacgtcggcggacagtttatctggaccgggttcgactatataggggagccaactccctatgggttcccggcccgttcgagctatttcggcatcattgacctgagcggttgcccgaaggatgtttattatatgtatcaaagcgagtggacggataagcctgtgctgcatcttttccctcactggaactggctgcaggggcaggccattgatatgtggtgctactacaaccaagctgacgaggtggagcttttcatcaacggaaagagccaaggcgtacgccggaaggccgacggtcaccagtatcatgtggcatggcgtgtcgtgttcgaaccgggcgaagtaaaagtgatagcccggaaaggcgggaaacaggtggctgagcaggcaatccacacggccggacagcccgaccgcctgcgcctgacgacagactataagggcagaaacaccacgttcgtagctgttgaagtggtcgataaggacgggaaccggtgtccatgggctgagaatcaagtgttcttcgaagccgatggagccgaaatcattggtgtagacaatggcaaccaaacctctatggaacggttcaaggacaaaaagcgcaaggccttcttcggacggtgcatggtggtattgaagggagaagggaagctgacagccaaggcgataggcttaaaggaaaacagcatagaactatgaaaatgctcatggcttaaatttgagcggaggaaacttgcaaatcaacgggtaagggttaacgggataacggttaatccttaccctgtatgaaactaatttaaataaaaagggtgactctcgccacccggaatgttttcacaacggaataatccttattgtgattagctaaaaattcgtcttcaaaataacaactttttttttgattaagcaaatattttaaagttttttattaaattccttctgaataaaatgttatttcttgatgtaattggcgtaaattccaagaattttatgtaagtttgcatctgtaacataatttttatattaattggcatgaaaaatatattaggattagaccttggtacgaacagtatcggatgggcattagtagacggggagaatcataaaataataaaatcaggcagccgtattgtcccgatggacgctcaggcgatgagtgattttcaaaaaggcaacctccagtcttcggcatcgtcgcggactggattccgcggagcgcggcgtttgtatcaacgtgcagaactgcggcgcgaacggcttctgcgagtgttgggcaagctgtgcttccttccggaacattttaaaaacgaaatagattttgaggaacatcccggcaagttcaagaaccatggtgagccccttctgccttatcgcaaaagtggcagcgggaaaaatgaatttatcttcatggattcgtttaacgaaatgttggccgatttcaaggaaagtcagccggagctggtggaaggcggtaagaagataccttatgactgggttatctattatcttcggaagaaagctctttcaagggctgtgaagcgggaggagctggcgtggataatattgaatttcaatgctaaaaggggatattaccagttgcgtggagatgaactggaaacagcggcggagaagaacgaggaatacatgatgctggaagtggccagagtagagaagatggatccggataagaagcggaggggctacgactggtacctgataacttatgagaatggagccacacagcggaagctcgggaaaattgcgccacgcaatgtaggggataaagtggaagtgattgtgacgacgacgtatgataaggatggcaatgtagccctggataaagatgggcgtccgaagataaagctccgctccccgagagaggacgactgggcactgatgaaaaagcggacagagcacgacttggagcaaagccagcagtcggtaggtgcgtatgtctacgattcgttgttggccaatcctgcagggaaggtgaggggtaagcttatacgtacaatcgagcggaaatattataaggatgagttaataagcatactgaacaagcaaaaggagtttattccggagctcaatgaccgttcgaaatatatggactgcgtgcgcgagctgtaccgcaacaatgaagcgcatgtgggttcattgtcggacggcgatttcacaaggttgtttgtggatgatatcattttctaccagcgtcccctgaaaagcaagaagagcactgttgccgactgcccttacgagcagtatcattatgtaaataaggaaagcggtgagattgtcaacatgccgataaaggtaatttctaaatcgcatccgctctatcaggagttccgcctgtggcattttatccgcgacttgaaaatctatcaaagggaggggaatataaatggaaaattgaagacggacgtggacgttacagccgactatatcaaagatgagaatgatgtggaggcattatttgaatacttgaatgggctgaaagaggtgtcgaatgacacgttgctgaaacatttcggtctcagtgccaaatcgcaccgttggaattatgtggagagtaaggcgtatccctgcaatgaaacgcggtggagtatcaaccgtgacggatgcctggatgtatgtggggaaatcgcgttgtggcatatcttgtactcggtagacgaccctgtactgttgcgcaaggctctgaaggctttcgctgtcaagaatgggatggatgaggagaagttcgtggagaagtatattcacactaaaccgtttgagagcgactatggcgcttattctgaaaaggcattgaagaaggtgctcccactgatgaggacggggaaaagatgggatgccggagcaattggcatgcatacgcttgaccgtatccaggcgattatagatggaaggggtgaacagtatatctacgagagtgcggagaagaataggttcagtttgaagcaggtggatgatttcaaggctctgccgctatggtttgcagaatatgtcgtttatgggaagaaagaagaatataccgtttggaagtctcctgcagacattgattattacttgaggttctgttttaaacagcattcacttcgtaatccggttgtagaagctattctcggtgaatcgttacgcgtggtgagagacatttggtcggtttatggcaagatagacgaagtgcacgtggaaatggggcgcgacttgaaacaatcggctgacaggaggaaggatgatgcagagaagatgctgaagaatgaacgtaccaatcaacgcatacgtacactcctgcaggagtttgccaatcctgattgcgggatagaaaatgtacgcccgcattcgccttcgcaactcgaactgctcaagatttacgaggcggatatcctttgtaatgaagacgtgcccgaggaacttgtagatgtattcaataatcttggcaatgcaaccaagcatgttgcccacaatgatgtaatgaggtataagctctggctggaacagaaataccggtcgccttataccggcgatgtgattccattgagcaagctgtttaccccggcttatgagatagagcatattatcccgcagtcgaggtattttgacgattcgctgaacaataaggtgatttgcgagagcgaagtgaataagctgaaggacaacagtctggcttatgagtttatccaaaataagcacggccagattatcggcgggcacaaggttcttgaccagcagcaatacgaggattttgtaaagcagcattatgcaaacaaccgcccgaagatgcgcaagctactcatggaggatatcccggcagattttataaatcggcagcttaacgacagccgttatatcgcaaggaagaccattgagattctttccaatgtagtgaggcagacaacagccgacggtaaagtggcagataatgacaagggggctgtatcggttaatgtcatcgcatcgaatggggcgattacggaccggttaaagaaagagtgggggattacacaggtgtgggaccacattatcactccccgtttcgaacgcctcaaccggataacgggcacgggcaatttcgggcagtggatgaatgccggcggtaagcgctatttccagatcaacattcctattgagcagtctgccggattcagcaagaaacgcatcgaccatcgccatcatgcgatggatgcgatagtgattgcctgcgccacacgcgaccatatcaactaccttaataacagtgctgcggctgcatcggcgaaaaagctgaggtacgaccttcagcataaattgtgctttaaagaaaaaacggacgggaatggtaactatgtatggaagtttaataaaccatgggatacgtttactcaggatgtggaggctgaattgcggcgcgttatcgtaagtttcaagcagaatctccgtgttatcaacaaaatgaccaaccacttctggcactatgagaatgggcggaaagtattggcaaaacagttgaagggtgatggctgggctgtccgtaaatcgttgcataaggccactgtttcgggagcagtgcggttgcaggggataaaaaaagtaagcttgaaggaagcactcaaagactggcatcagattaaggacaaaaatatccgtaaggcgataaagggactcatagcagggtataaaaagtttgatgagactgtcatcctaaggtatttcaaggacaggaagtatatgctggatggtaaggacatcagcaaagtagaagtgttcgtgttgccgaaggaagccgatttgtcggcagtgcgttgcgaacttgacatatcatttgatgagaagaaaatcgcgtcagtctccgacagtggtatacgctctatcctgctcaattacctcaaggagcatgataatgaccccaagatagcattcacccccgaggggataatggatatgaatagtaatattcgtaagtataacggaggaaaagaccataagccgattcttaaagtgcggaagacggaggctttaggtcttaagttccctgtgggtgaatgtggtaataagaaatctaagtacgtggaggccgacaagggaacgaacctgttttttgcaatatatgcagataaagaggggggccgttcatataccagtattccttttaatgaggctgttgagtgtatgaaaatgggtctccctgtcgctccggaatatgatgggaatggtaatgaactgttgttcgttttgtcgccaggtgatttagtgtatgtaccggatacagatgggaaaatagagcctttgcaggtggacaggatatataaattggtgtcgtcgacgggtaaatgcggattctttgtcccatgtaacatttctgccccaataatggatacaatagagcttggatcaaacaataaagcagaaaagtcatggacaggcgaaatgattaagaatgtttgtgtccggttgaaagtaagccgactgggtattgtgacaaaatatgattagcctatgataaagaaaacattgtattttggtaatcctgcctatctgtcattaaggaataagcaattagttgtaaagttaccagaggtggaacgttccgatgacgtctctgaagtgacacgcaaggagtcggtgcgtacggtaccgatagaagatatcggcgtgatgattcttgaccaccagcaagtcacaatcactcatgcactgattgccgcacttcttgataatacggtagctcttatcacatgtaatgacaagcgcatgccgatgggcatgctcttgccattacacggtaacacaacgcataacgagcggttcaggaatcagatagaatcgtcgctgccattgaagaaacagctttggcaacagactgtaaaggcaaagatagagaatcaggctgcggtattgcagcagtatacattgaaatctgtggccaatctctatgtgatggcaagggatgtcaagagcggtgatccagataattacgaagcacaggctgcagtatattactggaaaaacatattctcggacaaaccggattttgtccgggagcagaatggggaaccgcccaaccatctgttaaactatggatatgcaatcctgcgggctgttgtagcgcgggcactcgtagccagcggtctgttgcccgtatcgggcatccatcaccataaccggtataatccatattgtttggcagatgatatcatggagccttaccggccttttgtagataaacagatattggaaatgatgatgcgttacgatgaaatccccgatgtattgtctcaagacctaaagcgcgacttgttgtcaataccggtgatggacgtcagaatcggaggtaagcgtcgtccgctgatggttgctgtatcggagacgacagcaagtttggcaaagtgtttcagtggagaaatacgtaaaatctcatatccttctgcgtatgttcccaaaactatgtgaatacagagttatgtgggtattggtattctacgatcttcctaccgataccaaaaaagaacgtaaggtagcagccaagtttcgcaatgaaatcatggcggatggttttacgatgttccagttttccatctatgttcgccattgtgcaagtatggaaaatgcgcaggtacatatcaaacgggtaaaatctttattaccggagttaggtcatgtaggaattttatgcatcacagataaacaatttgctgatattaagatcttttcatgcagaaaagaaaaaactccaacagctccatatcagcagttagagctattttagaaaatgggattctacatattttgcagaatcccatctcaatactcgattgttttttatttgtaaaacatgtagtaaacctctgttttttagcaggttacttaaatcggggttgtctttgctgatgcaaagatacgaattttttagctaatcacaacgttactccagttacggtgtgtgtcgatctcgttgtctttgctgatgcaaagatacgaattttttagctaatcacaactcgctgtcagtggtgccgtgtgccgtcttcgttgtctttgctgatgcaaagatacgaattttttagctaatcacaacgtgaaacggtgaaattttagagagcctatagttgtctttgctgatgcaaagatacgaattttttagctaatcacaacatgttttcccgtcatagcctttccctgaaagttgtctttgctgatgcaaagatacgaattttttagctaatcacaacacaagctgttgccttacgttaatgagcagagttgtctttgctgatgcaaagatacgaattttttagctaatcacaacctttattgtgtatgctttgttgcgattattgttgtctttgctgatgcaaagatacgaattttttagctaatcacaacttagcgtgcttaaccgtatttttttatgaagttgtctttgctgatgcaaagatacgaattttttagctaatcacaaccatttttccatgtaaaagtttttttaccggttgtctttgctgatgcaaagatacgaattttttagctaatcacaacacagccacgtggcattcccgtgcgacacatgttgtctttgctgatgcaaagatacgaattttttagctaatcacaacaaatctgttggatgatatacgctcacccaggttgtctttgctgatgcaaagatacgaattttttagctaatcacaacataatgaagtttaaataaaaaaaatatcggttgtctttgctgatgcaaagatacgaattttttagctaatcacaactgcaccggatgaaaataattacccgttttcgttgtctttgctgatgcaaagatacgaattttttagctaatcacaactgccttgggggtaacataggcattagcaagttgtctttgctgatgcaaagatacgaattttttagctaatcacaacacatttttccatgtaaaagttttttaccgttgtctttgctgatgcaaagatacgaattttttagctaatcacaacgttatgctgggcatgatgtattagcaggcggttgtctttgctgatgcaaagatacgaattttttagctaatcacaacctgtatatttgccatcaaaattagcagtaagttgtctttgctgatgcaaagatacgaattttttagctaatcacaacatcagatagtatgtttgttttttttctttagttgtctttgctgatgcaaagatacgaattttttagctaatcacaacctccacctccctctcatcacttcgcaagtcgttgtctttgctgatgcaaagatacgaattttttagctaatcacaaccaaagcaccattgagcattacacgaattaggttgtctttgctgatgcaaagatacgaattttttagctaatcacaacactgaaccacagtttaggttcacgtggatggttgtctttgctgatgcaaagatacgaattttttagctaatcacaacttacttttcatcgacattgtatgttagtattgttgtctttgctgatgcaaagatacgaattttttagctaatcacaacgtgggcatctttgtaggcttggaggcggcggttgtctttgctgatgcaaagatacgaattttttagctaatcacaacacagtacaaagatactatttattttaatagttgtctttgctgatgcaaagatacgaattttttagctaatcacaactcacatcctcggcattctcctcggtaatgggttgtctttgctgatgcaaagatacgaattttttagctaatcacaacagcagatgcgtggatattggaggttttaaggttgtctttgctgatgcaaagatacgaattttttagctaatcacaaccactgatagccgtggctattgatgaagattgttgtctttgctgatgcaaagatacgaattttttagctaatcacaacgtaatcagttcgaaatccctaagaattcatgttgtctttgctgatgcaaagatacgaattttttagctaatcacaacgatggctattcagcagggagtgaaactcggttgtctttgctgatgcaaagatacgaattttttagctaatcacaactgccgaaatctgatgtagagacaaagaaagttgtctttgctgatgcaaagatacgaattttttagctaatcacaactccattttgattgatgttagaagttgttttgttgtctttgctgatgcaaagatacgaattttttagctaatcacaactaaggtagtctgatagactaccttattttgttgtctttgctgatgcaaagatacgaattttttagctaatcacaaccttatctttgtaccaaaatttatctcggcagttgtctttgctgatgcaaagatacgaattttttagctaatcacaacgtgagaagatctatggaaacttgcctatcagttgtctttgctgatgcaaagatacgaattttttagctaatcacaactaaggtagccaggtaggctaccttattttgttgtctttgctgatgcaaagatacgaattttttagctaatcacaacaagattaagaaaacaattaaaaaaaatatcgttgtctttgctgatgcaaagatacgaattttttagctaatcacaacgagggtgctgtcacactcgcaatagtagcggttgtctttgctgatgcaaagatacgaattttttagctaatcacaactcatcgtatattcatgttcatcagaatatagttgtctttgctgatgcaaagatacgaattttttagctaatcacaactgtacgaaccgttgagaatcaaacccgttgttgtctttgctgatgcaaagatacgaattttttagctaatcacaacaggtttgttccttgcgtccgttcagccaccgttgtctttgctgatgcaaagatacgaattttttagctaatcacaacaacactctaaatatatagcaatgaaacagagttgtctttgctgatgcaaagatacgaattttttagctaatcacaacgtttgttttttgttttagcgcttttttcagttgtctttgctgatgcaaagatacgaattttttagctaatcacaactccaaggtagcgttctctatatggacggctgttgtctttgctgatgcaaagatacgaattttttagctaatcacaactattatgacaacagaaatctatgagcgcagttgtctttgctgatgcaaagatacgaattttttagctaatcacaactatactatccaagttgttagacagataagtgttgtctttgctgatgcaaagatacgaattttttagctaatcacaactaagtctgtacatgattaccattggttttgttgtctttgctgatgcaaagatacgaattttttagctaatcacaactgcaaagttctgataaaataggcagaaaaagttgtctttgctgatgcaaagatacgaattttttagctaatcacaacgaaaacaattattaaaaatttcagatgaaagttgtctttgctggtacaaatatacctgagttcgggataaggatatcacgttaatccggacggcggtgcctcccttcgcgctgcggcagcacggccgttgcaaggcggaggatatacctttgttctgatttttggccaaaaaactcagaaaaatggccaaaaatctcagaaaaatggccaaaaatcaaaacagatagttgcccgttgtccgccaacgg

SEQ ID NO: 1284 - DNA, 19605 bp, synthetic construct
  variation 19527..19590: note = n is a, c, g, or t
  variation 12393..12616: note = n is a, c, g, or t
  variation 15241..15678: note = n is a, c, g, or t
  variation 10843..10861: note = n is a, c, g, or t
  variation 16878..18109: note = n is a, c, g, or t
  variation 14096..14112: note = n is a, c, g, or t
  source 1..19605: mol_type = other DNA
  misc_feature 1..19605: note = Synthetic
aatcttttggacactagtggaatttgaatatctattaaatacacttattaaactgcacgaatctttagtctggaaaagagagcacaataaaacactaataccagcgcaaatattatgctttggggatttagaaggtaaattaaaagaaatccacgaggatgattataagcttgtacaaacgtcgttagcgacgagatgcttaattgaatatattgcttcacaacctcccaagggaactgtaaaagcaagttttgatgatatagatagacttcttgtaataatgcatgaaatagcaaattatggtttcttaagcgatgccattcattttaaaattgctaatcccactattgggaagcttaaatccggaagaataggtatctcccgagagttctttgatgaaaaactaaaaccattttcagaagcccatacaaaggaggaagttgatggttatattgaaagttttgatagtaggtttgaaatcgctgattattctaaagatagtgacgaaaaagaaacgagtgaggacacagagatggaaagagttgatagtgctttccttgcagattggggaataagttatttaaacatttataaattctgcgtttcttgttttatgttatgtattgaaggtgcagactcagtaatttcaatgggagaaaatgaattaataaaaaagttggtggatgaattcaaactcccaaaagatgaagtaatcgcaggcattgaacacttctcaatatttaagagagctgattacctgaaagcccctgatggttataatgataatgaagtttttccttggaaatataatcgtgaattcagttttgctagaagattcataatcaaacatgaaaatgaaaagggtgaatcaatattgacatgggggttcaggaacgctatatctgcacaaaaacaacttgggtacttattatatgaaggaaaacttaataatggcggaaagaaaattgaaaaattgcttggaacctttagagaaagaaaaggaaaagaatttcgcaacagagtaaaagactggcttaacaagaataaagactttatcgtaatagattatgaagttgacatttctcctaatggtcatctaaaagcagacaaaaagtatggtgatgtagacattttagcttttgataccaaaaagaacattgtttggagtcttgaatgtaaaaacactaataaggcaaaaaacatccacgaaatgaagaaagaaatggataattatcttggacgtgaaggaggcgaaggattgataaaaaaacatattgagcggcataattggctgaataacaataaggacaaaatatgtgcatttttaaaaattgatgcccaaattacattagtttcatttattttgacatctgaagttataccaacatcatatattaaagcagaggaattacaaatgccaataattgcattccctaatttgaaaagagaaggaataaaattgttgtatccaacgcactaagccgtgcacatcaagcaaacacaaatcaacaacacgaccaaatttgcttaaagagcatgtcttttcagctcacggactgatagaaatgtatggcaaattgaaattaatatgactgaaaaacaaacaccagccggtaacaaattgtaaattgcattgcggcgatagaggcgtgtcgttcgttggattctcgcttcccagctaagtgtacttgggccacgaacgctcaccgaagtccgcctagagaactgtacttagcgttatgcgcaaatataatctgaatcagattgctgtaaaatagagatttatgaaacaatcgttatcgatattattggtaattctatcactaaatgttttagcgataaaaccccaaaaagaatacgggattcgtcctgagaattatgcattaatttacaaagacttaaacgttatcactgatgatggattaaagattaaaacgtggttcttcccggcacaagactccattacaaaagacgaatggtataaagctgcaaataatcctgtaagaaaagagtatacgacaaaatacgatttaccaagacctactatagttatttgcgatggagacgcaggaaatatgatgtatctaactcaatttgcaaaagaattggttggttttggatataatgttgtcacttttgactggcgaggttttggcgaaagcgattcatgggaaaccaatgaggacttcttggtataccccgagtatttgttagactacaaagccgtaattagtgaagtgattaagcaagatgaagtagacaaagaccgaattgggttattcggattttcaaccggagcatacttgtcgtttgctacattttacaaacagcctgagataaaaacttttgtcggaagagggctactgactgatttaaaatcagctattgatagcataaaacaagttattcctgacaaaaagattattattcccaaagactatcctgaaaatttaatgccaataaatattgcttcaaaaattgacagaccttgttttttgattgttggagaattagataacaggacaccagcatcaatgagtatttcgatttttaatatgctaaaaggtgataaacaattatgggtagtcaataacgcgacccatggaggagcaacagggcctgaatttattgattttaaaaaatttatgactcaattgagaaccttttacgatttaaacttataaaatttcagcacagaactaggtacatattccagggcgagatttgatgttacgccatctgcggattctcgtttcgcagttccgtgtccttcggacaggaacgcactccgaaatccgtcccaataacatgtgccaacctttacattcaaatatagaaagtcggaaaaatgacaataaatatagacatattagagcggaattttttaaccttttcagatttcattaagaatcaggatggacagccatttatatcattcgcagtctcaaaattttatagatgacagagaaaattataaatacagtgtttacaaagaagcaagagagaatttaggaaataaatggtggaaacccgaagatattggaactgggaaaattcaaaaggcggttagttctgccattcagacgagagtataccataattataaaatagttgacaataacctcgttgattggagaaaaaaggatgatttcaacaagctgcaaaagaataaatctcttgaaaatttactattcgacttctataagagcaaacgaaaggatagcgaatgttttcaagacttcattgaagaaggtctatcatatcaatttattgcatatctgtatttcattaaagactatcaacggtttatgccaatctcacaaagtcgatttgattcaatttttgagattttgggtgtggccgattacaaaacaagcggtaatgcttcatgggagaattacgctttattcttggacttaattaaacaaaccagagactttttaaaatcaaaagacagaaacacaacccttctagatgcacatatttttctttggattttaggtcaaattcaatttgacattaaagaaagtgtgacaaaaatgccaacaatcaaaccattagaagatattgaaatcaaaaatgaagatgtagaaagaccaagaataaaaccttctaatgcaaccgaactgaatgtttctgaatggtcggatatacttctagataatgaacttacaaacgaacttgacttatcaattttccaagcattgtattcttttcaagatcaaaaggcttacgcaagtcaaattgccctaatcttagaaactactcacccaccactaaatcttgaaattggcagatatgcaaaaagaatagccaccaagtatgacattaatttcagcgagagaagtgaaaaacaatataagttttgggacttattttttaatggttgggatgaaggaaccaaattcgtttggcaattaagaccagagttgaaaattgccctggaaaagacaaatctcacgggagacatttcttatgcggaagaactgccacaagaaattgaaacggaattttacgaaggtttaataaagacagtgacggtcaattcatacgaacggaattcaaaggcaagagaattatgtgttaaatattggaaagcaatatgtgcgatttgtgattttgattttgaaaaggcatatggagaaatcgggaaaggttttattcacgttcaccatttgaccccagtagcacaaataggcaaaacctatcaagttgaccctataaaagacttaataccagtttgtccaaattgtcactcaattatacacaaaaaagaaccgcctttttcaattgaagaaatgaagaaaatggtaagaaaatgatcgaattgaaagcgatatatagaagaacaccaaacgccacattatacgaaagctattatctgtatttgtagaaaatgaaattctggttgcttccaaagaaatatacaatagagcaaattgtaagtaagaatacgatgaactccatatgtttttagattaaaaatcagactatctctcatagtttatcctaaatgttcagagaactatgaaagttccatgatataggttgggcgtataatccggtcaaaggtgtgccagtgattccggaataatcagtcagtaaaccatattcgaaatcattgatttaaatcagcaaactgaacagggattaaaactgaattaataatatatcagaattatattgaccaattacacataaatatatatatttaaggctgtcgtaatatggcggcaattaaacctaataaaacacagaaatgcaaaatcttttaatttattgaaggctcgatcattggaaataaaaaagccccgtattgtaagacgaggcaacttaaatgttttcacaacggaataatccttattgtgaattgctttcaaattgtccttcaaacatataaataataacctatataaacaaaacatatcatgaaaaaaatattgggattggacttgggaaccaactctattggctgggcactggttaatgttgacaaaaatggtaatccatttggtattgaaggtttgggaagtagaataatcccgatggaccaggcaactttaagcgattttgaaaaaggtaattcaaagtctcaaacagccgaaagaactatgtttagaggagctcgcaggttaagagaaagaaaacatttgcgcagggaacgattacataggatacttaatgaacttaactttttgcctatccattatcggtcatgtatagattttgtgcacaggttggggaaattcaaggccaaccatgaacccaaaatagcctggagaagtaatgaccaggataagatggagtttatttttcagaattcgtttcttgaaatgatgtctgatttcacaaaacgtcaacccgaattggtaaaagaggggaaaaagataccatatgactggacaatctattttttacgtaagaaagctcttggtcaacgtattgagaaagaagaattagcttggctattattacattttaatcaaaaaagagggtattatcaattaaggggtgaagacgagatagatgcaaccaggtcggcaaaaaccagaaaatattttgatcggaaaatcattaaatcaatcattgatacaggagaggaatataaaggattaaaagtcctgatcgttgaattggataatggaaatcaaggaaaaatatttaagcaggaagtacctgactgggtaggtcaagagaaaaatattatcgccacagttgatcttgataaggatggaaaagatagattcgacaaaggtgtcttaagccagcgcttttccattccgtccgattcagaatgggaaaccgaatggaaattaataaagttaaaaacagaggaggatttagaagcatcgcaaaaaacagttggaacgtatatctatgacagtcttttaaaaaatccaaatcaaaaaattaaaggtaagttagttcgaacaatcgaacgtaaatattatcgcgatgaattaagagctatacttaataagcaaagggaattccatccggagttgaatgacaaaaaattgtatcaacattgtatcttttctttatatcctcagaatgaagcatttcgaaattcaatagcaaataaggattttacctatttgtttcttgaagatattattttttaccaaaggccactgaaaagtaaaaaatcaacaataaataattgtgcgtatgaagtaaggaggtatatggataaagaaacaaaggaattaaaggaagtccctttaaaatgcatagcgaagtctcatcccattttccaggaatttaggctttggcagttcatttccaatttgcgcatttacaagaaggatattacagacatcgatgtaacaaatgattttctccattcacaagatgactatgccaatttattcgaatggcttaacaacaaaaacgaaatcgaccaaaaagcctttttaaagtatcctgcattcggttttaaaaaagatgctgtaaattatcgttggaactatgtagaggacaagtcatatccttgtaacaaaacaagaagtgccattttgtcaaaattggataaacacgaacaggaatttctcactaaagaacttgaattaaaaatatggcagcttctctatagcgttaattcaaaggaagagattgataaagcgctaaatgtaaattcgccaaaaatcaacaataaaatatcaatagatcacactggaattcttcacgaactaaaaagctcttcattatccgatatttcaattcagagattaaaagcaatcaactttgaagaaaaagactacggctcttattcttataaagcaataaagaaattacttgcactaatgagacaaggcaagtattttgacaatacagcaattactgatgcaactaaggcacgaataaattcaatttttgaccgactggaatcaatcagttttgatcctgaaagaattaattctatttctgatgatgatattcctaaacaaatcctgaaaagtttcattaagctaaacagaacttacggggggttcaatacatatcaagcatgctatgctgtctatggtagacattcagaggccaaagagattgccaaatgggaaaagccggaagacattgaccaatatctggccaaattcaaacaacattctttgcgaaatccaatcgttgaacagatcataacagagactttgcgcgtcgtgcgtgatatctggaagaaacacgcctataaaactatcaacaaagataatcaaggaaacaattgtgaatcagaaagtgaactcactgaaatacatattgagcttggtcgtgatatgaagaataacaagtctgaacgattaaggatttcaagaataaattctgagaatgaaaatacaaatctcaggataaggaaattattgatagagtttaatgatcctgaatttggtgtagaaaatgtgcgcccccattcacccagccaacaagaaatactgcgaatttatgaagatggagtattaaagagcggagttgagattcctgaatatgttgacaacataattaaaaaattcaaggagactgacgtaaaaaagcagccttcaaaatcagaagttctaagatataagctttggctggaacaaaaatacaggtcaccctatacaaatgaggttattccattgggcaagctatttaccaatgattaccagattgaacacatcattccccaatcacgatattttgacgactcatttagcaataaggtaatttgtgaggcagaagtcaaccagctaaaagaaaatgaactgggctgtgaatttataatgaataatggtggcagaattgtcgagctaagctttggaaaaaccgtcagaattcttgactttgaagcgtacgagcaatttgtacaacaaaattatgctggaaatcgtcctaagttgaggaatctattaatgaccgaaattcccaatgattttattgatcgtcaactaaacgatagtcgatacatcagtaaggttgtaaaaggattactttcaaatattgttcgtgaagatggtgaagcggagtcaacatcaaagaatctgataagctgtacaggtggcgttacggccagactcaaaatggattggggattgaatgatgtatggaataacctaatctatcctcgttttgagcgtttaaacgaattgacaaatagcaatcagtttggatactgggataaaaaggatggcaaaaatgtattccaaacccaggtgccaatggatattcagaaaggattcaataaaaagcgaattgatcatcgtcatcatgccttggatgccttggtaattgcctgtgcaacaagaagtcatattaattatctgaacaatgagtcagccaaatccaattcgaaagagagtcgctacgacctgcgcagaaaattgagacggttagaggttattcaaaaggagtataccattaacgggcgaaaagagattcgtaacattgaagtggcaaaagagttttataaaccatggaattcctttacacaggatgctcaatctgcactggaaaatattgtggtcagttttaaacaaaacctgagggttataaataaaacgacaaattattttttgcgttttaataaggaagggaaaaagatttttgaaacgcaaacttctggttccaattgggccattagaaagcctttgcataaggacaccgcatttggcttggttaatctgaaaagaacgaaaacggtttctttggcgaatgcgattcttgattatgaccaaattgttaataggaaattatggactaaaatcaaggaattgatctccattggatatgataacaagagaattttaaaatactttactgatgataaagagaattggaatgaaataatttcttcaggtattgaagtcttttattacactgacaattttgaaaagcaagtcgcaacaagaaaaccattagacacttccttcactgaatcaaagattattaattcaataaccgatttaggaatccataaaatattgttggctcacctaagggctaatgaaggtaatcccaatatagctttttcaccagagggaatagaaacaatgaaccggcatatctgcgaactaaatggaggtaagtttcaccatccaatttataaggttcgggtacacgagcctttaggctataagtttaaagttggagataaaggaaatagatcaaccaaatatgttgaagccgcaaagggaactaacctgttctttggaatttacattaattcacaaggaatacgctcttatgaaacaatccccctaaatgttgcaatcgaacgtcaaaaacaaggtttatcaccggtacctgacaacaatgaattaggtgaaagacttcttttttggctttctccgaatgatttggtgtatctgccaacatctgatgaagttgagtctgggatttgttgtaacaagttaggtattgacagaatatataaaatggtaagctgcacaggttatgtaggtgactttattccagctcacattgccaatcctattattcaaactttagaattaggcagcaacaataaagcacaacgagcctggacgggtgaaatgataaaggaaatttgcattcctgtaaaagtagatcgaatgggaaatattgttgagatttttaatagaaataagaattgactttagcaaacacatacccaaccgaattgtcttttgggttattgaccaatttcacgcaaaataggctggaattggacaggttctaagttaaaagatatgattaaacggaccttgtattttggcaatcctgcctatctgcataaaagccaattgcagttaaaggtgataaagcctgatgataattccacattgggaaccattccaattgaagacatcggtgtggttgttctcgacaatccccaaataaccatcactcaggccttgttggctgccttgatagataataataccgcgctaattagttgtgacgacaaacacatgcctgctggtttgatgcttccattggatggaaactcaatacagagtgaacggtttagagagcagattgaagcttcagaaccacttaagaaaaatctatgggcgcaaactgttaaggcaaaaattaccaatcaggcaaaagtattaaaaatggccggggctcagaataagcgactggaagcattactgccgcagatccaaagtggagatcctgacaatattgaaggacgagccgcttcagtatactggaaattgctcttcgaagacctcccgtttgtaagggatcggtatgggactatgcccaatgcgcatctaaattactgttatgccatactaagagccatagtcgcccggtcgttggttggtagtgggcttttgccaacgtttgggattcatcatagtaaccgatataatgcttattgccttgcagatgacataatggagccctatcgcccgttctgtgattggatggtattcaatatgcttaagagtaatgaaatattaggcgatgaaataaccaaggatcataaggccaggcttttgacaattgcctcggtagatatagaaatcgacaacaagaaaagtcccttaatggtcggtatgtcacgtaccacctcttctttgtctgaatgtttttcaggagtgcgccgcaaaatagtttttccggaatttgtaacctgacaaatatgggatatgaagcattaaatcaatatcggattatgtgggtgctggtattttttgatcttccggttgaaacaaaaaaacagcgaaaagccgcaacgctttttcgaaaaagtttaatcaatgatggttttacaatgttccaattttccatatatatgcgtaattgtcctagccgcgaaaatgccgatgttcatgtaaaaagagtaaaagggatgctgcctggatagttcggaccnnnnnnnnnnnnnnnnnnntggacactactgaaatgccttaaatgaatatgttattcgattgagtaacgagtataaatgcaaccaagaattagttgaatcatatcattcaaaactttggcataagcattggggagcttgtgaaaaaatgggatggcaattgactgatattaagattcctgaaaatctccatcctgatatcctaaaagaaagagttttccaatttgacacgaatcgattagcttatacttgctatttacataatgacagtattgatgataaatttcatgcaagtccatcaatgggcattgattttgatataaatcagcgaactagagaagttgtttcggaacttaaaaaagacccaacatttaaggattataaatttttcacactaatcacttatgaatatatggggcgtaccatgttcctaatgcttgaagatcctcaagatggtgaattacgcctaaccatacctattcatcaatttattttgctatgctcaactgaagaatggcacaacttaagcctatggaaattcgcaaaagcttacgaattattttctaaaactacacaaacagcacttacagatactctcgacatttattccatctataaatcaaagaatgaaagcttttattttggggatgatgtcagagcaaatttattaacagttgtaccgggtgacggaagccgattaataaaagaggcaaaaattgaaaaaaatagtcatgggattttagctgaagttggaggcagaaaagcatatattccttctgaaaaatatgcagattatgctccattatatgaaccgctattcaattttgaaaattacgcaatttgcctagaagcttttaacttcccaatatggattataaatcgtcaaattgaagacaaaaaaatggctattcacgtgcgaaattttgcagaagcaatagcattttggctttacaaacttagtcctcaaatctcggctacattcaattcgaacatttcagacttttttgaaataaaaattcaacttgaagagtcactttttgaggataaacaaacaaaagacataatagaaaattcagaagataaacaatacactttcaatttagatggcaatagtttagagattaatatccctttttccaagattaaaacgttcattggcaacactaattcaggggaaagggagatgatgagagcgttattgtcagcatttaaccttgtagaaaatataaatctgacatcggataatattaatcaaagtattgataacgcaatacccttgggcaatgcaaaaatgatacttttatatgacagtcaaaaagaccaattaattgacaatagatggcttattaaaccattctatattagtaactcagagattgaaagaatattagatgaaattcctgtatcaattgaaaagataaaaaaaatacctgctaatattgaaaaagaggatgataaaaaagaacttttcaatattgccactcaattattattaggaacgttagcagatgaaattaaattctttgaatttgaacactagtgtccaataaatnnnnnnnnnnnnnnnnnnnnnnnnnnnnnnnnnnnnnnnnnnnnnnnnnnnnnnnnnnnnnnnnnnnnnnnnnnnnnnnnnnnnnnnnnnnnnnnnnnnnnnnnnnnnnnnnnnnnnnnnnnnnnnnnnnnnnnnnnnnnnnnnnnnnnnnnnnnnnnnnnnnnnnnnnnnnnnnnnnnnnnnnnnnnnnnnnnnnnnnnnnnnnnnnnnnnnnnnnnnnnnnngttcccggttacaaataacggaaatatcaggctataaaaaagcaacacctttcgtccaaagagttgcctatagaatataatccctgaaatgttaattgaaaggcagttaagtgcccgaactataccttgaatgacgcaaaagttggcaggagatcacctatataatggaatgaaaataaaattacatgaaaactatcatgggtataaccataataaaaaaatatatatacttttatgtgttaaatcaaacatgcattgaccatgaaacctaatgtgaaatcagcttattccgacccaatctattctcaagttatttgggtagatattggttgacttgtggatatctatgatcaaattgaatcaccatttgatgaccagttgaattagcatatatgaattagggagaaatgggtagaactttacaatgataaaaaggatgtatggatatgtatagtttttccagatatatattacgttaccgccaagtgtaaaaagacagtgaattaatagataatttgcaataaaaactaaaaaaatgaatagtcaacgcacaaaacaacacattagcaagctccaaaacacaagccgatgcttcagcttgcaaaagagttgttttcttgccgacgcacacaactatccctattattatgacaaaaaaaattggcagaaatgacccttgtccatgtggtagtgggaaaaaatataagaagtgttgtattaattcacaaaacgattttgattttgaacctacaccgaaagagaagaaaaataatacattagaattcattaaatcaaataactctacccctctattaaattttataattggactccaattacatcctaataatcatgggaaaaacattcgaattgaggagttggcaacacacatcgttacaaacttaaatgataagcaaaatggtgatttgacattattccagaagcatcttgataatgaatatgattacaatccgatggaagatttgcctgaaaatctcttttgtgaaaatatagttttttatggcgggaattatactgttttctctggcatttacggttactcagttgagatgtttaaaaatcttactgagacaatttttgctcaaaaaaacaaattgcctgatgaatttaaaaatcatgtatatagtggaataaaactaattctagaattaggtcaaattctttcaagaaaatttaacatcggaggtaatatcgaaggtgcagaagatgactcagaatttgactattcttttgaggaaatagatacttcattcagctatgatgatatttacgacatttgtttaaatcatcaaataaaccctgaaataataaaagactttcttatctcaccaaatgataagagattttccattgacgacccagatataaatcctttgctatattcaccaatacttctttttaaaagcaaattctatttcgttttagtttccaatcaaataaatgccttcagtagtgtccnnnnnnnnnnnnnnnnnttttagcaccttgtgtccgtttctgccgtctgtcgaaaaaatggggtgatacgcaagaaggtacttttgttcattgcaccactcggtatagggaaccctgcacgtggtattgtgcttcatcatattcccggtacggtttaaccaggcaatggcctccgtgttgatcgtttcattatcggtaaaaatgcgattatataaaaagttctgcttgatatacttgaccacattctcaaccttgcctttgctttcaggatccgctgcatgacaaaagactgccttaaaaggccgacttgccagatagctcccgaaaacatcagtgagcttatagtcacctttattctcgctatggataaaaaccacatcctggtcgtaaacaatctcccgggggatgccctgaaaaaaactaaaagccttttcgtgggcctccactgcactctggcttgtaaagggttcatcccggaacaggacaaacttttgccggctatggcacaacagcatcgcaaagaagtaaacggtttgccatccccccttgctcgtgcgcaaccgcttcatcccaaagtcaacctgtgcctgttgtcccatcggcaggtccggtactgccgtatactggcgatcactgcgggtcactttggggatattaaactcacccctgaccttaacaacatagttgtaaaccgtcttggggtcaagctgtggaaaatcgcaaaaacactccttcagcttatcatgaacaacagaggccggtgtatccgggtactctccaagatagttgacaacaaaggttttatactgatccatgacatagggccgtgaaccctgtgtggaaaggcaggcctcaaactcctggtcggtcatcgaaagatacttccggacggtacgaaagtttaatcccaggtaatcggcaatacgttggatggaaaacttctccacctctcgaaatcgtttaatctcatagtacataatgataagatccttttgttttttgtccattgcagtcaggttaatcgttctgactacaaagaaactggttaataatcatgttgtcttatcactgcactcttgatgccatttttactgcattcttgttgccattttcactgcactcccgttcccatttttactgcattcnnnnnnnnnnnnnnnnnnnnnnnnnnnnnnnnnnnnnnnnnnnnnnnnnnnnnnnnnnnnnnnnnnnnnnnnnnnnnnnnnnnnnnnnnnnnnnnnnnnnnnnnnnnnnnnnnnnnnnnnnnnnnnnnnnnnnnnnnnnnnnnnnnnnnnnnnnnnnnnnnnnnnnnnnnnnnnnnnnnnnnnnnnnnnnnnnnnnnnnnnnnnnnnnnnnnnnnnnnnnnnnnnnnnnnnnnnnnnnnnnnnnnnnnnnnnnnnnnnnnnnnnnnnnnnnnnnnnnnnnnnnnnnnnnnnnnnnnnnnnnnnnnnnnnnnnnnnnnnnnnnnnnnnnnnnnnnnnnnnnnnnnnnnnnnnnnnnnnnnnnnnnnnnnnnnnnnnnnnnnnnnnnnnnnnnnnnnnnnnnnnnnnnnnnnnnnnnnnnnnnnnnnnnnnnnnnnnnnnaagtgaaagtcttcacccatctatctccgtcatatcgtttgactatcatatcaaaaactcgctttggcaggaagtccacgagttgactgaatacatatttgccgctgttcatatttgcctggttttctttcaggcaacgaagatgggaaatgaaatcaaatcgacacgtgactttattgcttgtaataaactatatactaataacttacaaaggttttgtaaaaaatcttttggacactagtgatcaggactcatttttcaaccatagaagatagccttaaaaatggggcagaccatggatttttttaaccccctatccttagatagtgaacgatggtgcaatatataaaataactcacaatggtgcaaataaatcaggaaaaaaatcaccataatcctgaatgtcaatatcctataaatcgatcctggatcttggttatctgagcaggccatcatcggggtgctttcctgaaagctcaaaaatttaagaagtggggagagggttcctggtatggactagaagaaaaaaatgaggagatcagaggaagggagaccagaggccgcaaaatcagatatgcaaaaaaaacgaaataggtgtggcatttttggcattttggcattttgccccattctacttaataaaggcatgggacaaaatgtggacaacataaaataattggctccgactgtataatgtgttctaataaaaaacaccgcattatgacaaaacatggacaaaggctgaggcaagtcgtggcagcacactcaaaggcacaaaaaaaggccggataagggttaaatgagtaccttaatccggccgtttgaattctaaaactcgacgtacctgtcgggcgagaaaggccgtttgtccggagaggcgatataaaggtactatgccgatgttgaaagaatcctactgtggggatatcccttccatgattctgcaatcattacgccgttgtaagggcataaaaactgaccttaggcaatcgcaacacaagagttgaacttttcgactggtttgatttaacctaaaatcccttgcgcttgttggagcgaatctcaatttggcagttctaccaaggcatgccatcatgttccccatctttcccgtcaggatttcctatacacaggcacttggtcgagtcgcaccaagttcttatcatggtcatatattcagcgtcactagtgtccaaaagnnnnnnnnnnnnnnnnnnnnnnnnnnnnnnnnnnnnnnnnnnnnnnnnnnnnnnnnnnnnnnnnnnnnnnnnnnnnnnnnnnnnnnnnnnnnnnnnnnnnnnnnnnnnnnnnnnnnnnnnnnnnnnnnnnnnnnnnnnnnnnnnnnnnnnnnnnnnnnnnnnnnnnnnnnnnnnnnnnnnnnnnnnnnnnnnnnnnnnnnnnnnnnnnnnnnnnnnnnnnnnnnnnnnnnnnnnnnnnnnnnnnnnnnnnnnnnnnnnnnnnnnnnnnnnnnnnnnnnnnnnnnnnnnnnnnnnnnnnnnnnnnnnnnnnnnnnnnnnnnnnnnnnnnnnnnnnnnnnnnnnnnnnnnnnnnnnnnnnnnnnnnnnnnnnnnnnnnnnnnnnnnnnnnnnnnnnnnnnnnnnnnnnnnnnnnnnnnnnnnnnnnnnnnnnnnnnnnnnnnnnnnnnnnnnnnnnnnnnnnnnnnnnnnnnnnnnnnnnnnnnnnnnnnnnnnnnnnnnnnnnnnnnnnnnnnnnnnnnnnnnnnnnnnnnnnnnnnnnnnnnnnnnnnnnnnnnnnnnnnnnnnnnnnnnnnnnnnnnnnnnnnnnnnnnnnnnnnnnnnnnnnnnnnnnnnnnnnnnnnnnnnnnnnnnnnnnnnnnnnnnnnnnnnnnnnnnnnnnnnnnnnnnnnnnnnnnnnnnnnnnnnnnnnnnnnnnnnnnnnnnnnnnnnnnnnnnnnnnnnnnnnnnnnnnnnnnnnnnnnnnnnnnnnnnnnnnnnnnnnnnnnnnnnnnnnnnnnnnnnnnnnnnnnnnnnnnnnnnnnnnnnnnnnnnnnnnnnnnnnnnnnnnnnnnnnnnnnnnnnnnnnnnnnnnnnnnnnnnnnnnnnnnnnnnnnnnnnnnnnnnnnnnnnnnnnnnnnnnnnnnnnnnnnnnnnnnnnnnnnnnnnnnnnnnnnnnnnnnnnnnnnnnnnnnnnnnnnnnnnnnnnnnnnnnnnnnnnnnnnnnnnnnnnnnnnnnnnnnnnnnnnnnnnnnnnnnnnnnnnnnnnnnnnnnnnnnnnnnnnnnnnnnnnnnnnnnnnnnnnnnnnnnnnnnnnnnnnnnnnnnnnnnnnnnnnnnnnnnnnnnnnnnnnnnnnnnnnnnnnnnnnnnnnnnnnnnnnnnnnnnnnnnnnnnnnnnnnnnnnnnnnnnnnnnnnnnnnnnnnnnnnnnnnnnnnnnnnnnnnnnnnnnnnnnnnnnnnnnnnnnnnnnnnnnnncttttggacactagtgttttgaaaatattaataaagcaattgattcaataggttatcctgatgcaggatataaattgtggataatccaaaatgactctgccaaagaaatgagatttatggttgaggggaactggccaaatcaggccatatatgattcaatccatcatcatgcattgtaccaaaatgcttcaagtccggaagatatggaggtttggaaaaaaatgaagataatctcatacaatcgctttttggtggtaaagtgagattgattcttttatggtttttgaaaataaatattaatcggtttcgcgctcattttacgtctgcccataacagcaggtaagtgtaatttgtactaaacccaattcggttaattataaatatttgtctaatgaacgctaaattgatcacctgcatcattatacttttctcatgcagttgcacaaatccatctcaccccggcgcttcccgtcccgcgattgacaatatttttgttgcaaatcagttcattgatgctttttattcctttgacagagattctttggcgaccattttaaccgacgctgtcggatcccagccggaaattttgtattaccaaaaatgggctgaatgcggtaactacatggtggtcaaaagaaatgacttcattttaaaaaatgattccatagtcttatgtcccgtcaccgtaaaggatgacctaataggcgcacttaaaattgatttcaatgtcactgacacttttcatataactattgttgatggtcaaatccgatttgtagagacctcctcaaacgaccctgatatgtacaatgaagcaaaagaatgggtaaaacaaaacagacctgaattgattgaagaaccatgtcgtggaatttgggaaggtggacctacaccttgcgaatgtgttaaagcgatgattaaaggctatgcagaatttatagccaatcattgacccatttcaagtcaaacgccttttccatgccagattaccttttaacctggcaattggaagttgtcttcatatctgggtctgtttttattctggattatttaatctttctttcaattcattaatctggaagaaatgggtatactgtaaccaatcctcaagtagcaacagttgaaattagattttcccaagaaatgttgtcgtttgatgtcaaattacaactacttcatgttagtgacgattttaaatgttatatttatcaaaatgtttacattttgttatttcagagcagcaaaccccaccctggcgctaaccatcccatccaccccaacctccactccaaacatatacctatgtccatatgggataaataccaccccaaaaactggggatgtattatggttgaagtcggttttctacaccgggactacctaaattctaaggactacggatggtacgggtagtgagnnnnnnnnnnnnnnnnnnnnnnnnnnnnnnnnnnnnnnnnnnnnnnnnnnnnnnnnnnnnnnnnttcgtcgttcccggt

SEQ ID NO: 1285 - DNA, 19320 bp, synthetic construct
  misc_feature 1..19320: note = Synthetic
  source 1..19320: mol_type = other DNA
agaacagttaatttaaactaaatattatccaattatttggattacaacatagaagcataattttgagggcgttattatcagcttttatgttcttgtgttcttctgtcgaaaaaaactcagacacaagaacataaagacataagtttgagggcattattatctgcttttttgttcttgtgtcgaaaataaaatccagcaatcaaagaaaaagaatcactttttattcgtacttttgcctatccataacataaaaactctgtaaatatgactaaaataggttctgtaatgactccggtcggcaaaaaggcgctgcttctgggtagcggtgaattgggtaaagaagtggccatcgaactgcaacgctatggcgtggaagtggtggcatgcgacaaatatgccaatgcgccggccatgcaggtggctcaccgcagccatgtgttcagcatgctcgatgccgaaacgctggaaaaggtggttcgcgaagaaaagcccgaccacatcattccggaagtggaggcaattgccactcctaccctcgtcgaacttgaaaaacaaggtttccatgtgacgcctacggcccacgctgcctggctgaccatgaaccgcgaaggcatccgccgtctggcagccgaagagctgggcgtaaccacttcgccctaccgcttcgccaacacggaagaagaattccgtcaggcagtggctgaaatcagaatgccgtgcgtggtgaaaccgattatgagttcgtcgggacacggacaaagcgtcatcaagtcggaacaggacatcgacaaggcctggcacatcgcccaggaaggcggccgtgcaggagccggacgcgtgattgtggaaggatttgtgaaattcgactacgaaatcacgctgctcaccgtgcgcagctgttcgggaacgactttctgcgagcctatcggacacattcaggtggacggcgactaccgtttctcctggcagccgcaggccatgacggcttcggctctggcaaaggcacaggaaatagccaagaaagtaaccgacgcactgggcggctacggcattttcggcgtggaaatgtttgtcaagggcgatgaagtgatattcagcgaggtttcgccacgtccgcacgacacaggcatggtgaccatgatttcacaggacctcagcgaatttgctctccatgcacgcgccctgctcggaatgccggttccgggaatccgtttctacggaccgtcggcatccatggccatcgtggtggaaggcgacaccgacaaagtggtgttcgacaacttggagaacgctctcagcgaaccgggcgtacagctccgcatttttggcaagccggaagtagtgggacaccgccgcatgggggtaatccttgctacagccgaatcgaccgacgaggcggtgaaaaaagcacagcgcgcctacgacaagctgaaaattgaagtctgcaaacgttagttctaaccgatacgtctatcgcacaaaagcatatcaccgccagccggatgatatgctttttcttttatttatggtgcagtttcgaccatttatacatacatttgcacaacgactgcaactacgacaaaatgaatctgaacaaaatattgacaaccgtccttttcgcagtgctggcaacaacactgaaagcacagccaacccttgccgacctgccccgactggttgccgacacgacatataccccgttccgccatcagctccggctggaggcgcaaccggctttcatattccagactcacgaatttttccgcggctacaacgaaaagaatgtgcgcatcgcaaaatccctcgccggacaggttaaatatgctttccaactgccggaaaactcccaggcggcggccgtctaccgcgactcgtatcagggtatcggcgtgggctgcttctcgtttttcgagccgaagtcgctcggtacaccctttgccgtctatgccttccagggcggaccgatggcacgcctttccgaccgcctgacgttcgactacgaatggaacttcggcgcatcgttcggctggaaaccctacgatgcaaccaccaaccgcttcaaccatgtggtcggcacgaacatcaacgcctacattaatgccgccttcaacctcaactggcagctgactccgcaactgcatctgctcacgggcgtaggcttcacccacttctcgaacggcaacaccggcatccccaactgcggcgtgaacaccgtagcccttaacttgggcttggcttaccgattcaacgcttctgacgacaagcaggaaacgacggccacgcccgaattcacacgccacctgtcgtacgacctctccctctatggagcctatcggcggaaaggcgtgttcgacggagcgggaaatccggtgctttctcccgaccgctacccggtgggaggcatcagcttcagcccgatgtataacttccactaccgcttccgtgcggggctttcgctcgacggcgtgtttgactccagtgcgggcgtatataccgactccgacatcatttgcgacatgagcggcaactgcggcgactacgggttttacaaaccttcacccagccgccagtgggcactgggcacatccgtccgcgcggaatacgtcatgccgttctttgccattaatgcgggcataggctacaacttccttgccggaaccgacgaccagcgcggactttaccagacgctcacgctgaaagtggcggtgtcgcggctcgtctacctcaacatcggctacagcctgcaacgcttcaaggaccccaaccacctgatgctgggcatcggtttccgttttcacgacaaatcgccccgcctacgctaaataacagacaaaaaacgccaatatcttcgttttttcagaatctcttcagaatctcttccgtactttgcagtggaaaatttaaggaatctattttatacggaaggatatgaaaaaagtaattttattggctacaattgttcttaatctatttatattcaacgccaaagcgggcgacacagacttcaggacatggacaaactggaacgtgtcctataacgtcaacgacaaactcgatgtcaaaggcggattggaatacagaacgaaaaacaatgcttcggccaccgatgtgtgggctctcaaggcggaaaccaactataagttgctgccattcctgaaagctggtgtcggctacgaatttcacatgaaacacagaacggaccactggcaaaaacgccaccgctacagcctgtcgctcaacgaatcgtggaccgtaggccgcttcgacctctcgctgcgcgaacgcttccagcacaccatcagcgaccacaacgaattccgcctccgcacccgtgcacaggcaaaatataaagtcaacgactggctgaaaccctacgcttccatcgagatgtacaacaacctgcaccgcggcgacaacttcgagataacccgcatgcgctaccgtgccggcatggagctgaaaatagccaaaaacgtcaccaccgacctctactacctctaccaaaagcaacccgacaaagcctacaacatcaccggcatcgacatcaatttcaagttttaatacaacaatcatcccgcctccagcgggatatttttttgtcttcatataaaaaaatcagggcgggttaccccgcctgtaaaaaataagcggttgagcccatttatttgagttcaaccgctttatgcgctataatttatcggaatcagaaccgatagccgaccgttaacattaaagctatattcttattgttatctaatgcaaaatctttcttcaccatattcgtaaatccaaattggcttgagaggttcaccaaatatttgtccttcagctccatacctataccaatctgaagaccggcagaacaacggttcatcattgcctcgtcctccccttctactttcttaaacaaactgctgctgacttcggctccgccacccgacaatgacatcttgccgcctaaacccagtccgacatacggacccgcattaattacaaaaacattgtcatttttgatcggcaactttacggcagcaagcaaaggtatatccaaataaattggattcatctttacaacaactccctgctctgattcacgacagcctttgctcgtaaaattcagaccagtctggaatgcccataaattgttaatagggcaatcaatacccaaacctactgaaaagccggccttcatactggcctcactgttggtaatgtttgccattgacagacctgcatgcacatcatacttcgcccgagagaaaccggtaatcgcaaagagtcctaaaaccacagttaataacagttttttcatgatagttatttttttcagagtaagattcctgccccctaagaaccttaattgttatttacaaagtgtagggacaactttttaatcagcacactcctttcttagatattggcaacattgaaacaaataaaatgtagttccgcacttgtcagtaataaacacatcatattttattcaaaaatatgcaaaatatttcaaaatatcaaatttaaatacaattaatttaataaaaacctaagatccgcaatgtaaacattgtaaaccaccgacattcccccaaaacagccggtataaattccaagttccaagagcgcataataaaaaatcagggcgagttgccccgcccgtaaatgtttcacaacggaataatccttattgtgatttactacaaattagtgttacaaatgtaaacactatttttttcaaaaacaatagtgcttaactaaatttattttactatctttaaattctaataacttaacgtaagggaatataaaaaacacaacgatatatgaaccccaaaagaatattaggccttgacctcggccccaacagcattggatgggcaacaatactcgaaaccgacaattctaagaccatagaaagtgccggaagtcgcattattccaatggatgctgcaaaattaggtgatttcgaaaaagggaatccacagtcacaaaccaatgaacgtaccaccttcagaggcacacgccgcctgcgtgagcgccacctgctacgacgtgaaagaatgcttaaggtgcttcatctcttgaaatggctgcccgaacatttcgaacaagggattgacttttccaacaacggcgccaaatttttacaagacaaagaaccgaaaattgcctggcaaccaaccaccgacggacgatatgagtttttctttaaagaagctttccgtgaaatgttggccgattttgcgcgcatgcaacccgcattagttgaagaaggtaaaaagattccttacgattggactctctattttttgcgtaagaaagcgctgaccgaaaaaatccgtctcacagaactggcatggttgctgcttaattttaaccaaaaacgtggttattacgaattacgaggagaaacagaagaaaaaaccgacaaactggaagagttttatagtctgaaagttgtcaaagtcgagaaatccgacgaaaaatcgaaagggaatccatggtataacatacatttggaaaacggttggatttatcgccgccaaagtgcacagcttctcgattgggagggcaaggtgcgcgacttcattgtcacaaccgaccttaatcccgacggcacgccgaaactcgacaaggaaggcaacgtaaagcgctcattccgtgctccaaacgaagacgactggaatttaaagaagaaaaagacggaaaacgaaatctcgatttccggaaaagccgttggtgaatacatttacgacaccctacttcaaaatccgaagcaaaagataaacggaagcctcgtcagcaccattgaacggaaattctataaggaagagctacggcgaattcttgaaacccaaagccgcttccattcccagctcaacgacagcttcatttacgaagagtgtctgaaactgctctatccttccaacgaggcgttccgcaagaatatcagcggaaagaatctgatatatctgttcatcgacaatattctgttctatcagcggcctttgaaatcaaaaaaatcgctgatagccaactgcgaatttgaatcctattcattcgtcaaagacggcaaaacgctgactgtacccattaaatgcatcgcgaaatccaacccgctttatcaggaattccgcctatggcaattcctgtccaacctccgcatcctccaacgcacgaaggaagtggacggcaaactctctgtcgatgtggatgtgaccggggaatttcttcccgacaacgaagcatgggccaaccttttcgacatactgaacgaccgaaaggaaatcgaccagaaaacactcctcacagctgttggtatcaacaaaaagaaacaagccgaataccgttggaactatgtagaggacaagaaatatccctgcaacgaaacccgccatctgctgctttctcgctggaataaggccggactcgacaaggccatgcttacccaaaaactaacaatggaactttggcacatcctttattccgtagaggcaaaggacgagtcaaaaaaggcactctccacatttgcccataaaaacggattgccggaaattgaatttgttgaagccttcctttccgctgcggcctttaagaaagactacggagcctattcccgcaaagccatcaaacggttgctgccgctactccgccgtggtaaatattggagtgccgaaaatattgataccgccacaaaaacgcgtattgaaaacattatcgatggcgttgccgacgattctattaacgaacgcacacgcgaaaagctcactgccttttccgacatcacacaatttcaaggacttcccgtatggctcgcctcctatgtggcgttcaaccgccattctgaatccgatcaacagacaaaatgggattcgcccgacgacattgacacgttcttgaggaatttccgccagcattcgctacgcaacccgattgtcgagcaagtggtgacagaaacgctccgcaccgtacgcgacatttggcgcaaatacggacaaatcgatgaaatccacatcgaaatgggacgcgacataaagcagacagcagaagaacgcaaacgccgttcggccatcatacagaaaaacgagaacacaaacatacgcatcaaaatgctgctctccgaatttttcaatgagggaaatgatgtcgaaaacgtacgtccgatgtcaccgatacaacaggataaattgagaatctacgaagagggggtactcaattccgtcgacggtattcaggacaacatagaaaccatactcaaaaagttcaacgaatccgaccccaaaaagcaaccgaccaaggccgagatccgcacttaccgccagtggctcgaacagaactacgtgtcgccctacaccggacagccgattcctctcagcaaactgttttcttctgaatatcagatcgagcacatcattccgaggtctctctacttcgacgattcattctctaataaaataatttgcgaatcagcagtcaacggccggaaaagcagtatgctcgcctataatttcatcaaggaatgcggtggcgaagttatacagttgagcaacggaaagtccgtgcgcattcttaaagtggaagaatacgaacagctcgtaaaacgcgttttcgcatccaaccgcaaaaaacagcagaacctgctggcaacggatattccggacgatttctcacaacggcaactgacagatactcgctacatcagccgcttccttttggccctgctctccaacatcgtacgcgaaaaggatgaaaagggacaatatgaatcgactttcacgtccaaaaatgtcattccttgcaacggcagcattaccgaccgcctgaaaaaggactggggagtaggcgacgtttggaaccgcatcattgcaccacgcttcgaacgcctcaacggcatatatggcgacaatcgttttggtgattggacaaacgtcgacggaaaaaaattcttccgcacgcaaatcccactcgagttgcaacgttccgtcaacaaaaagcgtatcgaccaccgccatcacgcgatggatgccattgtcattgcctgcacttcacggcaaatggtcaactacctgaacaacagcaatgcccacgaccatgacaagcgtattgacctgcgaaatgccgtatgcagcaaagccaaaaccgacaccgacggcaactaccgttacctcgtcaaaaagccgtggcctacatttacggaagacatggcctacacgctttctcaaatgctggtaagcatcaagcagaatctgcgcatcgtgaaccgctgcagcaaccgttaccaacgctatgaaaacggtaaaaaagtgaccgtccggcaaacgaaaggcgaaatgcttgctatccgcaaaccactgcacaaggattccgtgttcggccaagtcaatctccgttccgtaaaaacagtgtcgctcaacgtcgccctcgaaaatccgtcgcgcattgtcgacaagcaactgaaaacgcttgtacgccaattggcggcacagcagatgtccgtcaagcagattgccgattacgttaaaaagcagaccgatttcgacgttaagaaagtggatgtctacattttctccaacgaaaccaataccccgctcgttgctatccgcaaacctgtcgacacgtcgctgacacaagaaaaaattctcaaatcggtgaccgacaccggcattcagaaaattctgcttcgtcatctcgaagccaacgacaacaagccggaatttgccttctcgccggaaggagtcgaagaaatgaacaaaaatattgtacagctcaacaacggacgattccatcagcctatatacaaggtaagaatttatgaaccaaaagggctgaaattcaatattggtacaaccggtacgaaagctacaaaatttgtggaagcagccaaaggcacaaacctcttctttgccgtctatctcgactctgacggaaagcgcaattatgcgtcagtgccgctgaacatcgtggtcgaacgcctaaaacaaggaatgtcgcccgttccagaaaccaacgagaatggcgaccggctattgttccacttgtcgccaaacgacttcgtttatgtgcctaccgaagaggaacttgaatccggaagagttaatatgcctatcgacaattcgagaatttacaaaatggtatcaactaccaaaagtgaatgtcatttcattccctattttattgcgtctccaattgtacagacaaaagaacttggttctaacaataaatcagaacgatcatgggacaatgtaatgattaaatcagtgtgcataccgataacaatcgaccgtttggggcagctctccattgcctctacgcttattcgataagaacctaatctacggcaacgcgcaacggaacaacgtttctgctgcgcgttgcttttttattcatttatttaaaccgctccattatgaaacagacactctatttcgggaatcccgcctacttgtcaatgcggaactcccagttggtcatcaaaatgccggaagtggaaaatgccaaaggcataagcgatgaaatgaagcaaagcagcgttgccaccaaacccattgaagacatcggtgtgctcattatcgaccacaagcaaatcacgcttaccagtgcactcataagcgcactgctcgacaacaattgtgccgtagtcacttgcaacgctcaaagcctgcccaccggcttgctgctacccctcagcagtaataccacccaagccgaacggttcacccgacagatacaggcatcactacccttgaaaaagcagttatgggcgcaaaccgtaaagcgcaaaattctcaatcaagctgttgttctttcgaattttaccgacgcggaaacggcatgtatgaaagtatgggcagaaaaagtgagaagcggcgaccctgacaacttggaagcccgcgcagcagcctactactggaaagtgctctttccccacattcccgatttcacccgtgaccgggaaggagtgcctcccaacaatttgctgaactatggctacgccattctgcgtgccatcgtagcaaggtcgctcgttgcctccggactcctgcccacattgggcattcaccaccataaccgctacaatgcctattgtcttgccgacgacatcatggaaccctaccgtccctttgtcgacgctttggtactaaacacaatgcaacgccacagcgatattcaacaacttaccaaacccattaagtacgacctattgtcggttgcctatctcgacacattcatagatggagcatgccgacctctgacaaacgccgtagctcagacaacggcttcactctacaaatgtttcgcaaatgaaatccgccaaatagcctatcccgattatgaaccgaatgaatgaatatcgaattatgtggattctcgtatttttcgatctcccgactgaaacgaaaaaagaacgcaaagcggcagctctttttcgaaaagatcttatcggcgacggattcaatatgtttcaattttccatttatatccgtcattgtcccagttgggaaaatgccagagtgcatattaaacgagtcaaatcgtttctccccgaaacgggaaaagtatgtatcttcaccatcaccgaccgccagtttgaaaatattgaaattttctatggcgtaaaaaagcaaaagtccattacagcccccatgcaactggaactcttttagaaacagaaaaacccgtcttgacaacgggtttttctatctgttccgaacattttatttttcggaagattttcatgtaacaaactattaaacaaccaattacgtatattgagttgtatttgatagctcaaagttacctaatttgtaagtaaatcacaacacagattgataagtggcaaatgtggatagcgttgtatttgatagctcaaagttacctaatttgtaagtaaatcacaacacccgaatgttaatcctcgtaatcttcagtgttgtatttgatagctcaaagttacctaatttgtaagtaaatcacaactgtcgtttactccaacggtcaaacctgcgagttgtatttgatagctcaaagttacctaatttgtaagtaaatcacaactagctgaatataatttgttgttcattttgggttgtatttgatagctcaaagttacctaatttgtaagtaaatcacaacacagatgctcaaacacgtgagactattgctgttgtatttgatagctcaaagttacctaatttgtaagtaaatcacaaccaatacacacagacgcggatatggtcttttgttgtatttgatagctcaaagttacctaatttgtaagtaaatcacaacgtccaacaacaatttatttagccaggataagttgtatttgatagctcaaagttacctaatttgtaagtaaatcacaaccaacactgatttttataattctcttgacgggttgtatttgatagctcaaagttacctaatttgtaagtaaatcacaacagatctcatgaagacgagtttccatagtaggttgtatttgatagctcaaagttacctaatttgtaagtaaatcacaaccatatcggtttgtttttattgtcctactccgttgtatttgatagctcaaagttacctaatttgtaagtaaatcacaacacgatgtggttaaacataaaaaaaatccaagttgtatttgatagctcaaagttacctaatttgtaagtaaatcacaactgatttcgattgcgtctttgcaatagacttgttgtatttgatagctcaaagttacctaatttgtaagtaaatcacaactattatcgttctgctcaacagaaaaatgatgttgtatttgatagctcaaagttacctaatttgtaagtaaatcacaactgtatctgcaacttccgtcaagataaacaagttgtatttgatagctcaaagttacctaatttgtaagtaaatcacaactacctatttagtgtgtggtgtgctgttggcgttgtatttgatagctcaaagttacctaatttgtaagtaaatcacaactatcagcacttcatccgtccatgccagcaagttgtatttgatagctcaaagttacctaatttgtaagtaaatcacaacgcacttgtaactcttgtttatcgccttgttgttgtatttgatagctcaaagttacctaatttgtaagtaaatcacaacctacacattcatcgcctacatacgcattaggttgtatttgatagctcaaagttacctaatttgtaagtaaatcacaacccacttcttgcccatttccacgttttccagttgtatttgatagctcaaagttacctaatttgtaagtaaatcacaacaaaaataaaattgttaaaccgttctcctcggttgtatttgatagctcaaagttacctaatttgtaagtaaatcacaaccttctcttgttgtgtccgacatttgcccttgttgtatttgatagctcaaagttacctaatttgtaagtaaatcacaacggcgatttattttttattaatttgtcatatgttgtatttgatagctcaaagttacctaatttgtaagtaaatcacaactagtttcccctgtaataacagtaacttgttgttgtatttgatagctcaaagttacctaatttgtaagtaaatcacaacattattccgaacgtgctgtaaatgcttccggttgtatttgatagctcaaagttacctaatttgtaagtaaatcacaactacgggaggggcttatttctcacagtggagttgtatttgatagctcaaagttacctaatttgtaagtaaatcacaacatagctacctatgtagcaatactcgtcattgttgtatttgatagctcaaagttacctaatttgtaagtaaatcacaaccgcttcaatctgctctaagctcagtgatttgttgtatttgatagctcaaagttacctaatttgtaagtaaatcacaaccggaaatcagcccctgttcgtgcatctgttgttgtatttgatagctcaaagttacctaatttgtaagtaaatcacaacggcataatactccgcacgttcgtcttcaccgttgtatttgatagctcaaagttacctaatttgtaagtaaatcacaactgatgaccagcttttgcgttttgttaagtcgttgtatttgatagctcaaagttacctaatttgtaagtaaatcacaacgctatcaccttgaaaattttaacgcaaatggttgtatttgatagctcaaagttacctaatttgtaagtaaatcacaacaataacattgactttgaacaaggaaatcttgttgtatttgatagctcaaagttacctaatttgtaagtaaatcacaacgattatgcgttacgcacacagtcgggacatgttgtatttgatagctcaaagttacctaatttgtaagtaaatcacaacagtctgttggctgacatcttgttccttgcagttgtattcaatagttcaaagttacctaactttcaaacaaataacaaccttttcaaccttttattctactttttctgttgtatttgatagcgtcaaatcgcacggctaaatacaggtttaaaactttatcaaatttacttatctggattttctactgagcaaggtgcggcaggagtcgcagagggatgtctgattactgaagttgggcttgccttttgcatcttgcatgatgcagagcggatcggcgttcgggcaatggggataggcataccaagcgtggataaactcgtgggctgccactttccacaagttgcgtttggcatcccggacacgataggtggaaatgactgccgtgcgttttcctcgaaacgacagtcccaacacgccccaatcggcacaccccttatagggaagcgaaatatcggaatgggtaaatccgagcaacgtggtcggcgcatttcctacagcgatattccgggtttgccaagtcagaatcttgtcggcacggaaacgcgtccgggcatcgttcttcaaactgtcggacaactgccgtacaggcaacaccttcacctcaaaatcgtcgcccgtcagccgcggcagctctcgctccagttccgctttcaaccgctcggcttcctgcagggtcacatcattatatggctgaatcaacagcaccggctgcggttcatcaacgggaacgacaacgtgactttctttatttcccgtacagcttgccaaaacaagcaacacgcctaaaaaataaaaaatccgtttcataagtaattctataatcctattccatcctatttgccaacgctccgagcagctgttcgaaggagctgaaagtttcggtagtcgcgggagtacggaggatgattttagtagccgcatggacatggattgacagcggggcttcggcttcggaacggtaaccgttgcgacggagagcgttgtgagcccaatgatgaagttcgggagagtcggcagaaatacttacaggccgcgagcccgacaatccgctgaaaaagtcgcccgacgtcatgtcgaagcagaggtcacgccccgggaacaggcggttcatgtcgccctgaagcacagcgtcttcagtcgtgcggtcgactatcgtactgtcggcacccaacagccacaggcgatcggacaaagcgagcgactgcgctacgtcgtgcgacgacagcagcacggctttccgctcctcatgcgccagacgatggagcaacttaagggtttcgatgcggcttgccacatcgagaaaagccgtcggctcgtcgaggataatgagcggagcttcctgtgccaaggctttggctatcattgttttctgccgttcgccgtcggacagttccgccacaaactgttttgccttatgggcgatgcccaccgactcgatggcatgtcgcaccaccacgcggtcctcatcgtcgagacggccaagaaatcccgtatgcggctgacggccaagacctacaagttcctcaacggtcagcccgcctgcctgtgtgcggtcggtggaaacgatgctcaccatccgcgaaagccggcgcggcgaatagccggaaataggttcaccgccgagaagcacctcgcccgacaacggaggctgcacgcccgaaatggtacgcaacaatgtcgattttccggcaccgttagcccccaaaaggctgacaagcgtgccgcgtcgaagcgtcagtgacacattgcggagcaccggcgattccaccttgcccttgcgatagccagccgtgaggccgcgtgtttcgagaatcatttccataaatcagttgaaataaaatattttccgacggttaagtatgatgtagacaatgaccggcacgccaataatgggcgtaatggcattgataggaatcgttccactggaaggaagcacactgacgagcgtacacagcaaggcgatggcggcaccggtgagcatcgtggcgggtatgagccggaaatggtcggaggtgcggagcatcagccgtgcgatatggggcacgacaagcccgatgaagccaatcggaccgcaaaaggcggtgactacggcagtaagcacgccggtgataagcagcagtaggttgcgcgtcaggcggatattgacaccaaggttttcggcatagcggcgaccgagcagcaacgcattgagcggcttgataagcagcagtgaagctatcagtcctacggccaccaccgaagcatagacgggcaactggcggagcgtaacgcccgaaaaattacccaagccccacacgacaaacgagtggacgccttcctgcgtggcggcaaagttgagcagtgaaatagccgacgaagcgagatagcttatcaaaataccgacaatcagcagcatcgtggaatttttcacggctacggaaaatgccagcaaaatggccataatcagcaacgcgccgagaagcgcaccgaggagcgtggcaacgtagcccatcgccgccgaaccgataacgccgccaaaagcgagcatcacgacagccactccgaggcttgaaccggtggaaatgcccagaatcgacgggtcggccagcacatttccaaaagaagtctgcaacaatagccccgacacggcgagagcggcaccggcaagggcagccgtagcaatcagcggcacacggctctcccacacgataaagttccatgccgaacgttcggaaggttcgccgccaagaatgcggagcacttcatccgcagggatgtgcaccgtgcccacaagcagcagcaaaaacgccagcccgacaatggccgccgacagcaaaactatcacaaggcgagtccggctcatggctattcctccatgcgtttaaagtaagacaattcgtagcccggcaccttgtcgggatggaagatgccgatatattctttcagcagcaaatccggatggaaagccgtttcttcgaaaagcggcactaccgcggagttaaaataataaacggaacctttgccgaacgcggcaaactgatcgttgtgcggatagatgtcaagcatcgcgcggcgcgtcagttcatagccgtaggtggtcagcagccagaagtcggcattctgtgccttgtcaagcacctgtgcgaaatcaagttgcagcgaaccggcagaagtgtcgtcagcccatgggtagtcggcaccggcatcggcatagagcgtagccttgtagctggcaccgccgggcacataccacacgccgcttgtcaccgtttcggaaatcaccgtcggacggtgaggcacattcctcaccgtcgctgccaagcggttgtagttgtcggccacactggaaaatatagagtcggccacggcttcgcggtcgaaaagcataccgaaaaatttcatccattcggcacggccgagcggattggtttccatataatcggccaattcgagaatcggcacgccgatattggcaagcgcgccataaccggcattttggaaaggagaaagcagaatggcttcgggtgaaatgcccacaatgctctcaatggcgggtgccatcgacgaaccgcagtcagtcactgtgccgtcggcaagtcctgccacaatttcgggagtcttgaaatatttcccgtcgcacacgccgcgcacgactgccacgcaaccgagttccttcagggcacgcgcatgaacatcggaatagaccaacacgttctgcaacggcacacgcaccaccgtgccctgcggcagcgtgtcgggcaccgctttgtcacgcggcaccaacagataggtttgcagcactttcccgttgttccacgggtcgagcaccgccactttcgtatagtcgcggtagcgcgtaatggtcagcccctttgcatagtcgagattggcatcggcaacttcctgctgccgttgtccgcaagctgtcagcaccatcaccgccagcagcatatagagtactttcttcatcgtttcaaggttattcaattaaactgcaaatttacaaacgaaccctgcaaataaaaaatccccgccacgggtttaacatagaataagagtttgatgcagatgcagattcagtcaagcaaacccaaatcggcggcaatgtcacacgccttcagcgaattcggcacttgcagtttcagcaaaatgttctggcggtgacggctgaccgtgtttttgctgatggacagccgttcggcaatttcttggcttgtagccccttttctcaccaaccgcaatatctccacctcccgctccgtgagcaattctccgacagtggcaggcttcagttctattcgttggccggtcagcgtattgacaacgacagccttcgccgtcgaaccactttctgtaaaatcgtacaagcacatgacaaatcgcagttttccttctctactgtcagtgaaatagaacacacgatgcaatatttcgacaaactgtccgctgacatccttcatccgtaaacgcattttcaggcaataattttccctgtttttgggtttctgccgcttcacatactgaaggaaatagtattcctgcgcatatttctcccccatgtcggccggatgaatatggttgaaaatgtcgcgctcccaaatggagggaatggccagtgtctcccccttctttcccagtccgagccgctcggcaacgccgcccataatgatgtagctcatatccgatttcaagtcgctgagcacagccaccgaattttcgacacgggcatagaccgaagctatcttcttgtaataatccaaagccggctcaccgccctgggatacatctccggtattggcaagcagttcgtcgtagagctttttctcgatttgtttcatcaaatatggttatttatgagtatttacagcctaccctatcgcggctaactttgcaaagttaaaaacaacgaaacaatgaaacactatctaacatcactttttctattttgtatcgctatgacgacacaggctcagtcgctcgaaaagatgacttggttcaacgaaccgtcggagtgggaaatcagcaacggaacgctcaccatggaggtaactccgcaaagcgactactggcgcatctcgcactacggtttcacagttgacgacgctccgttctactacacgacaagaggcggagaatttgaagtaaaggcaaaaatctccggcgactaccgcactcgtttcgaccaggcgggaatcatgctccgcatcgaccacgaaaactatatcaaggcgggcattgaattcgtagacggcaaatataacttgagcaccgttgtcacccaccacacttccgactggagtgtcatcagcctcgacaagccggtaccctatatctggattaaggccgtacgccgcctggacgccatcaagattttctattcgttcgacgacaagaactacgtcatgatgcgcaacgcatggatgcaggacaacactcccatccaagtcggcctcatggcagcaagccccgacggcaacggtttcaaggccgttttcgaacagttccagattaaacaccttcccgacatgcgccgtcagcaatggcttaaaaacaatcaggaataaacgttccgccgtatttgctttttcgcataacgcctgcaccaccagtgcgggcgttgtctttatccgaaagtttccccgcccataggggttgcgatttacagaaaatgtgtaattttgcactttgtacgtacacaatcagaaaacaatatggacatatcagtaatagttccgctatataacgaggacgaatcgctgccggaattggaagcgtggattgaacgggtgatgaaagccaacaatttcagctatgaaattattttcgtgaacgacggctctaccgacaagtcatggcaagtcattcaagggcttcaaaagaaaaatccgtgtgtgaaaggcgtttgtttccgccgcaactacggcaagtcgccagcgcttaacgtgggcttc

SEQ ID NO: 1286 - DNA, 19255 bp, synthetic construct
  source 1..19255: mol_type = other DNA
  misc_feature 1..19255: note = Synthetic
  variation 18396..18490: note = n is a, c, g, or t
tggagaacaagggtatcgaaatctctgcaactgtcaagcctatcgtcaagaacgacatgtactgggaaatcagtgctaacatgacatacaacgacaacaagattaccgagctcacaggcgatgcaagtatcgttcaggctaaggacggtggcatcagcgctggtacaggtaacgtggctcagtatcacaccgttggaaagccagcacgttcatactgggtttatcagcaggtttatgatgagaaccgtatgcctatcgagggcttgtatgttgatcgcaacggcgacggacagattacaaccgaggaccgttacttctacaagagcgcatctgctccgttcacattcggctttgctactcgcttccagtacaagaactgggatttgggctgctcattccgcggaagcattggcaactacgtgtttaacgaccgcgaggctggcttcgtaaacgttgcaaagacttacgacagctcattcaactacacacacaatatcttgaagaagtctgccgagactaactggtgtacttacgacaatgtattgtctgactacttcgtgcagaacgcatcgttcctgaagtgcgacaacatcacactcggttacagtttcaacaacctgttcaaggctgccaagtacaagggcgtgagcggacgcatctacgttgctgcatcaaacgtatttacaattaccaagtatgatggcttggacccagaggttgagggcggtattgacaacaacatctacccacgtccattcaacacaatgctgggtttgtcacttaatttctaatccaaaagatataaagctatgactattagattcaaacatatagttccgggagccgtaatggctttgtcactcggaatggcatcatgcgatgtattggacgtaacacctatcgacccgggcacggtgatgaaggttgatgccaacggacttatgaacaagtgctatgcaaatatggctatcgctggtcagcaaggtccagatgatggcgactgcgatgttgacggactcgatggcggtactacaggtttcgttcgccagttgtggaatgccaacgagcttccaaccgatgaggctatgtgctgctggggcgatgacggtatcagttcgtttaacttcaaccagtacacaagttcgcacccgatgttgcagggcttctactatcgcctttatacgggtatcgactactgcaatcactatcttgagaagtgtgccgactacgatgccacaatgacagccgaggctcgtttcctccgtgccatgtattactatcatcttatggactgcttcggaaacgttccttttaccgaggtcatttcttccgactgtcctaagcagataaagagagccgacttgttcaagtatatcgagaaggagcttcttgagattgagccgaaccttcttgaggcagaggcaagaacaagtgccgataagaactacggtcgtgccgacaagagtgccgcttggcttctgcttgcccgtctgtacctcaatgccgaggtctacaccggaacagctcagtgggcaaaggctaaggaatatgccgaaaaggttatcaactcaaagcatgttctttggacaaacggcgcaaacggattttcggcatatcagatgctgttcatgggcgacaacggcgagagtggtgcttcttgcgaggcaatcctgccagtgcttcaggatggtgttaccacaacatcatacggtacaacaatgttccttatggcttcatgctggaaggctgatatgaacacatacggaaactataacacaacagagttctggtctggtaaccgtgcccgcaagaatctggtagacaagttcttcccaacatcagacgctccaaacgttgagaccgaggttatgactaccgaggcaggcgacgaccgcgctctcttctacggaaaggaccgtacccttagcatcaccgacccagccgagtttacatcgggcttctctgttgccaagtatcgcaacacatacagcactggcggttcggctcatgcaacaaagtttgtcgataccgattacttcctgatgcgctctgccgaggcttatcttattgctgccgaggctgatgcacgcatcaacggaggcacgacaagcgagactggcgcaaagtacatcaacgcactccgcactcgtgcacatgcctcaacaaaggcttcgtactctttgcaggatattcttgacgagcgctctcgcgaactttacttcgaaggcttccgccgtaccgaccttgtccgctacggtcagtttgcaggaatgagcgactacaagtgggagtggaaaggcggcgttcagggcggtgtaaacatcgactcacacttgaatatcttcgctattccttatgccgatatgaacgcaaatcctaatttggttcagaatccgggttactaacaacatctaattaaagatacagatatgaataatatattaaaatcatcaataatgcttggctgtctggctgttttcgcagcatgtaacacagatgtagacagcaatcctgttgttggaagcgagtgttatcctgttccgcagacattcgtgcttaacactccggcttattctacacaggatatcgatttgcagaagtcaaagaccctgaacctcacttggtctcagccaaactacggattccctacaactccggtttattctgtcgagatgtcgggaacaggcaacttcaccactctttacaccgaggacgaggacggaaatgttataggcaagcctgattacgttttgctcgacgagactgtgaagggcaaggttacaggcgagttcacttcttctgagatagacaagacgctcgaaaaactcatgggatggaaggagtctaccgatattcctgagaaacagaaactgttcttccgcatcaagtcggctcttgtcggggctgacggcaaggagtacggcgttgttcgttcgaacatcgttgaactgaaggtccttccatactacgaggctctgaaggctgccgacccagacttctggtacttggttggcggatgtatcggcgatggctcatggagcaacaatgccgatggcaagggcgtgagcatcgcaccattgttcgcagtagacggagagaagtacgatgccaagacaggcgacggcttgtttgagtatgtaagctggttcccagccggaggctcgttcaaaattcttgagtttgttggtaactgggattacggaatctgtgccgacggtgcttatcgtaacggcggcgacgatccgggcgacattaaggttgctgatgcaggctactacacaatcactctgaacacagcatctcacgagttcagcatgaaggcatacgagggcactccaaaggtttacgagagcatctgccttgcaggtacattcaacgactggggcgaccagccaatgtcagccttcaacacatacgatggcgcagaaaaccacatctggacagccaacttcacagccggcgacggttgcaagctgaagttcaagatggcaggttcttgggatgacaactggggaagcacatcattcccttacggtacgggcaagaacggcggtgccgacatcgaggttgagccgggcgactacatcatttacttcaatgatattaccggtcagtataatttcattaaaaagtaattcttaacaagtattcaatatgaaaaagcatatattgttctcaatggtacttgcagcctctatggctgcttgtacctccgactataccgactgggcgaagccgcttcagagcgcagtcgaagaggcaaaatcgggcacttatgtaaccacatcggtcgatgccattaagattgccgatgttacgggcgacagcgttaacatcttcaacagccgccttaacattcctgccggaacagatatcaccgagagcaccgttactttcgacgagactcagactattaacatcagcacaagcggaaaggtttccgttgccgaccttgtttcggcagtcgaggctctgtacggaaaggctccaaacgagcgtactctgtcgggcgtggcaacagtctactattcagataacggtcaggcaatgcgtgccatggctgacaagaccgaggttaaggtatcgctctctgctccgttcatatcttcaagctactatctcattggcgatatggtttatacaatgaacggcggaagtaagtcaaactggaatgcccagaatcttctcaagttcaaccacagcgacaagaatgtgtacgacgaccctgagttcaccgttgtattcacaaccgatgctgcagaccagtactggaagattatgccgtacgagaatatcaatcttgaaaacatttgggaccccggcgttgtaggaattgctgttaacggtgatacaagtttctcaggaaaactcacaaccgataatccacaggctggtaagattgaagagccgggcatctatcgcatgactcttaacatgatggagtacacttacaagattgagaaactcaactttaaggagttcttctacgagattggcggtgagagtacctggggtgtaactcacgctctgtacggcaagaatttcgacggaaagtatcagggatattactatctcgacagcgagttcaagttcagacctaatgcagataactgggaaggcgactatgaattcaacggcgagggtaagatttctgacaacggcggttctaactgtcctgctccagaggctgccttctatcagattgatgtagaccttgctgctggaacttatgctctcacagcagtcaagagcattacgatggttggtacacacaatagttggaatgttgctgatgccgcaactcacatgacatacaacaaggaggagaactgctggcagattgaatacacattcgccgagcagacaagccttaagtttgccatgaacgacgactggacagtgagctggggtggtgccaacggagatgcttcgaactatggcaatcttactcagaacaacggaaaggacctttcggttgctgccggcaagtatctcatcaagctgttcttgagttatgagggtgcaaacaaggttacgtttactccgaaaaactaatatgagttaattcttggttatttattttagttaaacaaatcctgctcggtcgtgttgacagggcaggatttttttgtgtgtataatcagtaacttacgcgaattcggggtaacgaaacacgttttcgcgttttgttattcgaacaaattacattatgcaaaataatacagattaaaatgaatcatcatacaaaaagataacaaaaagcccctttcttggtaaggggatagtaagggggtagcaagagggtagcaagggggtagcttcgtcctaggttgatgaaacgtatattaatgcatcgaatcggtataagaaacttcatttttctatatcgtgagatgattatttggaatgacgctgaaagcgtcacctttcagtaaccgcagtatccgtaggatctgcggacagttcgaataatttcgcccctgaaagcggtcgcccattgcgataactggggcactccttatgagtgctttttttgattgtgcactatttccgcaggtcgttccgacctacgattactaagcggagacgccttcagcgtctgtaaaaaacacacaatcttctgataatctataaataaaaggctcaaaaaaataaagggattctaataattagaaatccctttaagtgcgaacagacttaaaaaagcccactacgtcgctggttggtaatcaaaccgttgcaaatatagtcatcaaatcttttaaagccaaattttttttggctgaaatttgtttttttaacgaaatatgattcatggtactaaaaaaatagaaggcaaacgctcgttttccgaggcttgccttctgtcgtcaagttagttttaaaagaagagaggtttttctatttcgttatttctgtcttattcgaaaacaagatgcaaaaaggtgttgctataatatcaataccgaaaataacgtatcttgccatagcatcgtttgttgggaaaagcaggcagattgtaattccaatgattgatataagcaagttgattgtctccgattttatgttggcgtcagagaaaatcataggtgtttctgatattttctttggatagacaagtaattcgtaagcagaaatcagaattgtcagaatcacaaagatatatgctgcagtcattacgttatcgcagttgtaccaaagtggtgacaatgcgtaaacgaagaatcctactttaggaaaagttctaatatttctgcaaataaagcttttcattgttcctctgttgatttgaaaatgttaattgtttctttgtgcaaaaatacaataaaaagtaatatattgtataaaaaatgcattgaaaagtttgcttttgttaggaaatatgtttgattttgtgcaaaattcgttatgaacactatagtggtgataagtatatttagcaaaatttcgtatattctgaataatttttcacttttcatagaaaaatcgcctttacctctcttttaaatcacatttatatgatatttttgcagccaaaaaaacagaaatatggttaccgcatcaattataatagtcacgtcgataatttctattgtggcttttccgaaaaacaatccgtttccgcgttgtatggctcgtcccgatttgttgggcatatttatgttcaatccgtattatgtaagccatttcaaagagtactatcgtatgcttgcgtcggggcttgtacacacaggatggtggcatctgctgttaaacatgataactctttactttataggtaatttggttgagggagcctttgtcggtatttacggcagtttgctgggcaggattatctatcttgtcttttatctttttgccttgattgtctcatcaatttccgacttgatgaaatatcgcgataatgtgtcttattattattgtggttcatcgggtgcagtttcggcagttatgtttgcttcagtaattatttttcctaaaataagtttttatttgttttttattccaatcccggttccgggatatgtttatgctctgctttttctgctttactgctgttattgtatggcaagacagaaaatcaactgtttcggaaatgctgttcatttctggggtggactgttcggactgtttttcccgatatttgtttatccgccaatacttgtgcatttaataagtctgttcttgaaatagatttaagtcatacatagttttgccgatagcctttatgcggcaaaaatcccagtcgtagtttacgccctgtttttcagaacgtaaactacgtttgttatatgtcggttctaacattgttcttgtgtaggttattaagtctgatatcagcataccgcgcaagcggaatcgtttgcgctcgtaaaacgtaaattttcagtattttaacgttttttgtaatccaaagaaaattatatttgcaacgtaatcaaaaagataatatcatgagggtacggaaattcattaacggatgtgccaagaaaacggctgtagccgtggcggcactcaccgtggcagcatcggcttcggctcagggctggccggcagcatacgacggcgtaatgcttcagggattctattgggattcgtatgtagacacgcagtggaactatctcgaaaagcaggcagatgagatttcccagtatttcagtcttgtttgggtgccaaacagcggctattgcggctcgggcaacaacatgggatacatgcctcagtattatttcaatcagaattcatcgttcggaagcgaggcagaattgctttcgatgataaatacatacaagtcgaagggcgctggtttcattgccgatgtggttataaaccatcgcaacaaccttggcgcaggcggttcgtggactgattttgcggctgagacatacaacggtgttaagtatcagatgctcccttcggatatctgctctgacgatgacaacggtcagactgcagcatgggcatcaggtaacggcatttcgcttagttccaacaaagatacgggcgagggctggagcggttgccgcgacatcgaccataagagtgcgaatgtgaataaggtggtaaaggcatatctcggctatcttcagaatacattaggatatgccggtttccgctacgatatggttaagggctacagcgcatcgtttactggcgactacaacagtacggtaaacgctacttattcggtgggcgagtactgggacggcaatacagcagttgttaagaactggattgacggcacaaaggtgaacggtactgttcagagtgcagcgttcgattttccgttccgatatacttgtcgcgacgccgtggcatcatcgggctacaactggagcaagctcactggcacttcgcttatttcagaccagaactatcgccgctattcggttacttttgtagagaatcacgacactcaggtgcgctcggctaacgaccagcaagacccaatccgccgcgacacgctcgcccttaacgcttggatgcttgcaatgcccggaacgccttgcgtattcctaaagcattggattgactgcaagcaggagataaaggcgatgattgatgcacgaaaggctgtaggaatcacgaaccagagcacttatagcgagtatatttcgcaggctgcaaagtgcatcagaacggttactggcgagaacggtcagctacgcgttatcgttggcgacaagagcaatacgaacattcctaacacgatggtccaggtgctcgacggataccactatcgctacctgatgagcaagagcaccgagattgcttgggcagataaggcttcgggcgattatgaggaggctttcaaggttaagcttgtggctgtctctgctcacgacgatgcacagctcgtttacaccaccgacggcacagaaccatcggcaactaacggcacaaaggtggcaagcggtacggatattgaaatttcttcgaactgcacgcttaaggttgccctcgttgttggcggaacagtaaagaacgtggcaacgcgcaaatataccgtcactccgtttgtggctcacaaggcaacagtctacttcaagaatcctgactggacatctgtttatttctatgcttgggattcgtcaaacactttgcttggctcatggccgggaacaaagatgaccgacaaggttgttatcgacggcgtggagtggtattacaaggcattcgacgtaaacaagaagggctataccttcaacatcatattcaacaagggcatgggacagcagcagactgtcgatatcggtcctatcagtcaggatgtttattacgaactatcgggttcaaacggcgacaaactcacggttaaggaggttacgccgtctggagcgacatcggttacacagcctgtcgttaatgacggtttcgagattgcatcggcaaacggccgattagtgattaagagtaacaccagcaaggtagttccagtatatacagcgcaaggcgtattggtaaagaaattgaaagttgagagagggttaaatgattttggtgatatgcagcctggtctgtatataatctctaaccagaaagtggtagtaagttattaaaaagggaaaagttttttacaatgtaattttaagtttttcggaaaaagtatttcaatagtttttatttcatattgggtaaaagagagaacggtgtccgcgtgagcaggcaccgttttttgtagtaagtcttggaatggagtttaaatggtattttattatgcttaaaatagatatagttgtgatgatataaagaaagcgactcccgaaagagccgctttagatgttttcacaacagaataatccttattgtgatttgcttcaaaattagtgttgcaaatatacaaggtattttttattatccaataaaaatctcagtttttttactatgaattctgaaaatttgatgatgttgcaaaagtctatgcctttttgtttgtcttttctaaatatatttgataatttagcacattattaaaatctatttactgcaaaaaaagtttatgaagaaaattttaggtcttgaccttggtaccaacagcatcggctgggcagtggtgaatgcggaagagaaactccgcgagaatgaaacttcgtatcttcaacctgtaggaataagtgcggcaggaagccgaattattcctatgtcggctgatattttgggcgaattcgacaaaggtaattctgtatcgcagacggcagaaagaactggttatcgtggtgtgcgccgtttgctcgaacgtaatttgttgcgccgcgaacgcttgttgcgtgtgctgaatctgatgaactttctgccagaacactatgccaatcagattgacagatatggaaagtttatcaatcattctgagcccaagttggcttggacgaaagacgaaactggcaagttcagattcattttcgaagattcgttcaacgaaatgcttgccgattttgcaaagaatcagccgcaacttgtagccgacggcaagaaagtgccatacgattggactatctattatctgcgcaagaaggctttgtggcaaagactgacaaaagaagaacttgcgtggattctgctgcaattcaatcaaaagcgtggctattaccaacttcgtggcgaagaagaggaggaggcgcaggacaagaaagttgagttccttgaacaaaaggttgtacgagttgaggctaccgaagagaaaaagggcaaggatacttggtacaatgtatatcttgagaacggaatgatttaccgccgtccaagtagtgtacctctcgattgggaaggaaaggttaaggagtttatcgttacaacagacctcgaaaaagatggttcgccaaagaaagataaggaaggaaatataaagcgttcgtttcgtgccccaaaagaggacgactggactttagtaaaaaagaaaactgaattcgacatcgacaacagccacaaaaccgttggttgctatatctacgatgctttactacagaatccgaatcaaaagattgtgggcaagctcgtgcgcacaatcgagcgtaaatattacaaagatgaactccgtcaaattcttgatattcagaaggctttgatgccagaacttcaagacgagaatctttacaaggcttgtatcgaggaactctatccaaacaatgaggcacaccgaaataacatcgctaaacctgatttcgccaatctgtttgtcaacgacattctgttctatcagcgtccgctaaagagtaaaaagtcgcttataagtaattgtccttatgaatcgcatttcgacaaggacggcaaagagtatccaataaagtgtatagcaaagtcaaatccgcttttccaagagttccgtttgtggcagtttgttcaaaatttgaggatttatcagcgtgagaaagaggttacaggtaaactcctgacagatgtcgatgttaccaatgaggttttgaaatcggaggacgattacgttgctctcttcgattggcttaacgacagggcatcaataaagcaagacactttgcttaactcttatttcaagttcaaaaaggagaaaggcaaagatcaatatccatatcgttggaactacgttgaggataaggaatatccgtgcaacgaaacacgtgccgacattctgaaaggatttgacaaatgtggcgtttctgccaatttcttgacaaaagaacgagaaatgcagctttggcatattctctattctgttgaggacaagaatgaaattagcaaggctctggaaaaatatgccgagaagaacaatttgcccgaattgtttgccgatgtatttgccaaaatcaagccgttcaaaaaggagtacggttcttattcagaaaaagctatcaagaagttgcttccgcttatgcgcatgggcaaatattggagtgcagatgccattgacgcaaaaacgaaagagcgtattgataagattatcacgggtgaatatgacgaaaaaattagagaccgtgttcgcgaaaaggctatcaatctgaccagcgaaaatcatttcagaggcttacctatttggttggcttgctacattgtgtacgaccgtcattcagaagccaaagagattgaaaagtgggagaagcctgaagatattgataaatacctaaaagctttcaaacaacattctcttcgcaatcctattgtggagcaggtggttacagaaacgcttcgcacagtgcgcgacatctggaagcaggagggaaatatcgacgagattcacgttgaacttggtcgagagatgaaaaatcctgccgacaaacgcaagaaaatgactgaaaacattcagcaaaatgagaataccaacttgcgcatcaaagcaatgcttatggagtttatgaaccctgaaatgggcatcgaaaatgtgcgtccgtattctccaagtcagcaggatattttgcgtatttacgaggaaaatgccctcgataatctttctaaggacgacccggattttgactttgtcaataagatttcgaagttggcacagccttcaaaatcagatattgtaaagtacaaatgctggttggagcagaaatatcgttcgccttatactggcgagatgatttcacttgccaaacttttcacacatgcctacgaaattgagcatgtgattccacagtcgcgctacttcgacgactcattcagcaacaaagtaatatgcgaagccgaagtgaataagttgaaagaccgtcagttgggctttgagtttatcaagaaccataagggcgaaaaggtgcaacttagtcagggtggaactgttgagattctgtcggttgaggcttacgaaaagtttgtgaaagaccattataacaataatcgcacaaagatgaaaaagttgctgatggaagatatccccgacggatttattgagcgtcagcttaatgatagccgatatatcagcaaacttgtgaaaggcttgttgtctaacatcgtgcgcgaaaaattgccaaatggcgattatgaacaagaggcagtttccaagaatctgatttcgtgcagtggttcgataaccgatcacctgaaaaaggattgggggttaaacgatgtttggaatagcatcgtcttgccgcgtttcaagagattgaatgaattgacagggaaagatgtctttactgccgtaagtgcagaaggacatgaaattcctgctatgccgctcgaattacagaagggcttcagcaagaaacgtatagaccatcgccatcatgcaatggatgccataactatagcttgtgcaactcgcgaccatgtaaatttgctcaacaatgaggcagcacactcgcaaaagcatgataagtcgtatcgccacgatttgcagcgcaaactccgccgatttgaaaagacgttgattaacggacaggagcgagaggttgccaaagagttcctgaaaccgtggaattcgtttaccaccgatgcaaagcaggctttggaaaacatcatcgtcagcttcaagcagaacttgcgtgtaataaacaagacaaccaaccactatcagcattttgatgagagtggcaagaaagtcatgactaagcaagaggggggcgatagttgggcaatacgcaagtcaatgcacaaagacacgggctggggtgaagtgaatttgcgtttcaaaaagcaagtttcgctaaacgaggctctgaagactcctcaatacatagttaatgctgattttaaaggcaatgtcgttaagtggttgaaacttggtatggatgccaaggcgataaagaaactcgtagaaggtcaaaaagacgtatggtctgatattgatgtcaagaaaatatgggtttattattttacaaaagaaacaaacgaccgctattttgcaactcgtttcatgagcgatttggttggctatatgtctggaataaaagagaaaggcaaggcaattgcgaaaatagagggcataacggatacaggaattcagcagattctgaaagcccacctaaaggcgaagggagacaatccggaacttgctttttctgccgatggcatcgacgagatgaatcgtattattgtggattttgaaaagattaagaattatcagctgaaaaaagttcataagcctatttacaaggtacgtcgttatgaatgcggcaataaatattcaatcggacaaatcggttgcaaagcaaagaaatttgtagaagccgataagggcacaaacctattctttgctattttcagttctgaaaaattgaacaaggagactggtgagatggaaagcgtgcgttcataccttaccattccgctaaatgtgatgattgattgccaaaagaaatttggttctcaatggcgcgataacattgaggcttatttgaaagaaaacaatttggttccttctgatgtcaagttgttgttcattctttcgccaaacgatttggtttatctgccaaccaaagaggagttgaaggatggaataaaggttgttgataagaagcggatttataaaatggtgagttgtacaggtaacgaaggacattttgttcctgcaagaatagccaatcctattttgcaaacgaccgagttaggaagtaataataaagcgcaacgtgcatggactggtgaaatgataaaagaaatctgtgtcccattaaaagtcgaccgattaggcaatattatagaaataggaaaataaccatcgagtggggcgcagagatgtgcctcactttcttatttttaataccatgataaaaagaactttatattttggcaacccggcatatcttagtctgaaaaacagccaacttgtaatcaagattccagggctcgaaaagagcaatatgcaccagaatttcaaggacgaatttacgaccaccgttcctattgaggacataggagtcgttgtgctcgacagcatgtatctaacaataacatcgggtgttatttcagccttgctcgataacaattgtgccattgttacttgcgattctaagtgtatgcctgttggcttgctgctgccgttggctggcaatacaatacagagcgaacgcttcagaaaacagcttgatgcttctctgcctctgaaaaaacagttgtggcagcagaccatcagggctaaaatctataatcaggcaatgattctcggcaagtacacaaaagccgagactggcaacatgatggcatggaccgaaacggtaagaagtggcgactccgataatctggagggtagggcggcggcttactattggcgcaatgtctttcctgcaattcctaagttcgtaagaggacgcgatgaggcagctccaaataatctgctcaactacggatatgccattcttagggctgtcgtggcaagggctttggtcgagagcggactgcttccgactttcggaatccatcatcacaaccgttacaacgcctattgtctggctgatgatatcatggaaccgtatcgcccttatgtcgatgaaatcgtaatcggcattataaacgagggcattgattattcaactctgacaagagatttgaaggctcgttttcttgttctgccaacaaccgaggtggtgattggtggaaaacgcagtccgctgatggttgccgtgtcgcagacaacatcgtcgctttacaagtgtttcaacggagaaatccgactgatttcttatcccgaaattgttgattgatggatcgtttcagcgaatatcgaattatgtgggtgttggtgcttttcgatttgcctaccgaaacgaagaaagaccgcaaagaggctgctttgttccgtaagaatctgatgcaagatggctttaccatgtttcagttctcgatatatgtgcgtcattgtgcttgtgcagaaaatgcagatgttcatgtaaaacgagtcaaatcttttattccaaagtatggtcaggttgggataatgcggataacggacaagcaattttctgccatagagatattttatggccgtaagcctcagaaacctaacagccccggtcagcagttggaactgttttagtatagaaacaagaaatcctgctccaaaaagcaggatttcttgtcttgaaatacagttttttgttttgtaattttgtttacaaaagtgtgatatacagtattttataaatactctgctgtattcccttttgcaaagatactaatttgaaagcaaatcacaactacgtgagaactccaccaagttgaataatgctgtattcccttttgcaaagatactaatttgaaagcaaatcacaaccaatggggcgtgaggactgcacaggacgcagctgtattcccttttgcaaagatactaatttgaaagcaaatcacaacggtcaagcgcagcgaggtacgggctggcacgctgtattcccttttgcaaagatactaatttgaaagcaaatcacaacacaaatcacgattgaacacaggagcaccaagctgtattcccttttgcaaagatactaatttgaaagcaaatcacaactctgttggttctgcaggtgtccctacttctgctgtattcccttttgcaaagatactaatttgaaagcaaatcacaacgtttctcgatgagttaactacagtaaataggctgtattcccttttgcaaagatactaatttgaaagcaaatcacaactatattcttctctagtaattccattctttgctgtattcccttttgcaaagatactaatttgaaagcaaatcacaactatattgctcaatcatatttacgggggagtgctgtattcccttttgcaaagatactaatttgaaagcaaatcacaaccaaagacaggtcaacagattgatgcacaaagctgtattcccttttgcaaagatactaatttgaaagcaaatcacaacaacagaatttattaaccctttaataatatgctgtattcccttttgcaaagatactaatttgaaagcaaatcacaactatcacaaaagcgaccaacgcgaaagtaacgctgtattcccttttgcaaagatactaatttgaaagcaaatcacaaccggatagcatagaagcctttgcaccaagtagctgtattcccttttgcaaagatactaatttgaaagcaaatcacaacggcactacctttatatatttattctatgggctgtattcccttttgcaaagatactaatttgaaagcaaatcacaacgctctctcgttcatgatgtcaaagatgctggctgtattcccttttgcaaagatactaatttgaaagcaaatcacaactctgaaacggatgccattttaggtgctaatgctgtattcccttttgcaaagatactaatttgaaagcaaatcacaacagaaatcgagtggacgctatcgagaaacgggctgtattcccttttgcaaagatactaatttgaaagcaaatcacaacttgctctgtcatgttgcgttgaaattatttgctgtattcccttttgcaaagatactaatttgaaagcaaatcacaaccagttgcagcgcgcttgcccatgtaaagcgctgtattcccttttgcaaagatactaatttgaaagcaaatcacaactgcagtcctcatcgctgatgtcctgcaagcgctgtattcccttttgcaaagatactaatttgaaagcaaatcacaacgatttaatcgcaggagactcaaaggaaatggctgtattcccttttgcaaagatactaatttgaaagcaaatcacaacaactcaaaccacttagtttaactacaactattgagctgtattcccttttgcaaagatactaatttgaaagcaaatcacaactgttacgcgcgactgcgagatagacggcgagctgtattcccttttgcaaagatactaatttgaaagcaaatcacaactataggaatccctttattttttcgaaatagctgtattcccttttgcaaagatactaatttgaaagcaaatcacaacaaacctgtaaggtctccaaactgaggcaatgctgtattcccttttgcaaagatactaatttgaaagcaaatcacaacttgctgtgtaactcaacacctttgatgttagctgtattcccttttgcaaagatactaatttgaaagcaaatcacaactccacggtgtattgccttttaaagtcttgggctgtattcccttttgcaaagatactaatttgaaagcaaatcacaactatctcttgtgtactttgtgtatgcctttggctgtattcccttttgcaaagatactaatttgaaagcaaatcacaactttgcaatgtcaatttaaaattattaagagctgtattcccttttgcaaagatactaatttgaaagcaaatcacaaccgagttgttaggggggggtaggctgaatagctgtattcccttttgcaaagatactaatttgaaagcaaatcacaactcgatttaatgttaattactctgttgtttggctgtattcccttttgcaaagatactaatttgaaagcaaatnnnnnnnnnnnnnnnnnnnnnnnnnnnnnnnnnnnnnnnnnnnnnnnnnnnnnnnnnnnnnnnnnnnnnnnnnnnnnnnnnnnnnnnnnnnnnnntttcaagcagccctggctgtattcccttttgcaaagatactaatttgaaagcaaatcacaacaaataaggtggtacaaggtttcaaaccctggctgtattcccttttgcaaagatactaatttgaaagcaaatcacaactattgtgaggggcgcgaagcccctcggttagctgtattcccttttgcaaagatactaatttgaaagcaaatcacaacttatgatgtcctcgatggtcgtctcagttgctgtattcccttttgcaaagatactaatttgaaagcaaatcacaacttaagttcgacaatcatatcaacacaagcagctgtattcccttttgcaaagatactaatttgaaagcaaatcacaactataaggctctttgattttatctttacccagctgtattcccttttgcaaagatactaatttgaaagcaaatcacaacaagttgagttaaagcaacttaaccaaaacgctgtattcccttttgcaaagatactaatttgaaagcaaatcacaaccctttgcgaagggcaaaaaaaaaatagaccgctgtattcccttttgcaaagatactaatttgaaagcaaatcacaacaaggacggtgtgcaactttcattaggcaaggctgtattcccttttgcaaagatactaatttgaaagcaaatcacaactaaatttctttgcaaaatattttgttattgctgtattcccttttgcaaagatactaatttgaaagcaaatcacaacttttcttttcttt

SEQ ID NO: 1287 - DNA, 18956 bp, synthetic construct
  source 1..18956: mol_type = other DNA
  misc_feature 1..18956: note = Synthetic
acagttgctgcgccagcactgcccataccaaaattaatgatagtaatattattagcagtagcactactcataggcttatctaagccttttacttctacctcatataacttggcaaacatgtgtacatagtttgtaaaattaactagcaaaatatattcgccaaactcatctaaaggcacaccagtataacgaggcaaccaattgtttacaatctcttctttactcttcataagctagtatttttaaaatcaaataatgtaaatatatttaaaaaaaaattgagttccatctttcccgatttgaaatatccacctattgatgtgcgaattaaaaaaacaccgcaacatgttatggtgtttgatgccattcgtaaaaaatggctggtgttaagccccgaagaatgggtgcgccaacaccttatccattggctcatccaacacaaagggattgcttccagtcttatttctatcgaaaaagaaataaaagtaaatgggttaagaaaacgttacgatgctgttatttataacaccgaattaaaaccactagtgcttatcgaatgcaaagcacccgatgtacccctcaatacccaaactatagagcaagccttgcgttataatttacagttaaacgctccgttttgctttgttagtaatgggttgagtgatgccttgtttaaagtaagcgaacaaggtattcaaaggttagaagaatggccaatgttttgagatgaaaatgcctccctatctacaccctaaaaaactgtactctttttaaaatttgttagtaattgacttgaatatatttggtaagaataccttcagataccctaaattcgctgaaaaataaaacgttggtgaggcaaggttttctaattcatttagcataaacgcatccatcacatttaataccttaactatgaaaaaaaaatggtctattttaatggcgagttgttcactgctgccgctgttgtcaactgctcaagatgcacaagtgtttcaaaaaccgagtaaagaaattttagagttggccgattttacaagggcaccaggcgtttcggccgatgcgaaagccgaaaatatgttgtttatttaccgcaatacttataaaacattagaagaccttaaccaagatgagttgcgattaggtggattaagagttaatcccaacactaatattgctagtgccactaactacatcaataaattaaccctccgtaaaataaattcaaatgccgaaacgcccattcaagggatgcccgataatgctaaaattagtggtatttcttggtcgccaaacgagcaaaaaattgcttttttaaataccaataacaattcggttgatttgtgggtaatagatgtagctactgcggttgccaaaaaaataagcaagcaagcgttaaatgcaaatactggacaagcctacagttggtttccaaatagtactagccttttagtaaaaacaatacctaataacagagctgctttaatagactccaaaaaaagtttaccaacaggaccaaccgtttccaacagcgaaaaaacaaaatcacaaaaccgaacctatcaagatttattgaaaaacccaaccgatgaattaaattttgaagtgttgatgaacgccgaattacacaccattgatatagatggaaacgataagctcttccgtgcaaaagatttattcgttgaagaacgcatttcgcccaatggaaaatacatcctacttaccactttagaaaaaccattctcgtacattgtaccttataaccgctttccactgcgcaccagcgtttattcaatagaaggcacgttgataaaagaaatcaattactcgcccttaaatgaagtaattgctaaaggatttatggccgtaaaaaaaggaaaacgcaacatcaattggcgaaacgataaagaagctagtttgtattacgttgaagcgttagatgaaggcaatcctgaaaacaaagtagcgtttagagatgaagtattagaatgggatgcaccctttaacacacccgcaaaaacaattttaaaaacagaacaacgctttggcgatattacctggggtaacgataccttagctgtagccagcgataattggtacgatacccgaaacgaaaaaacctatctatttaatccaagcaatagcaatgctaaacctcgcttaatttttgaccgcaactatcaagacatttactctgaccctggtattttttcgacagaaaaaaataagtttggaagacaagttcttaaaattcaaaataacacggcttacttaattggcgaggggttcaccgaaaaaggacaatttccgtttattgataaatacgatttaaaagcacgcaaagcacaacgcatttatcaaagcacatttaccactaaacaagaaaacatcattgacattactgattatacccaactcaaagccttggtattaattcaatctaaaaacgaataccccaattattttagcagaagtttaaataagaaaggaacactcacccaaattaccagttttaaaaatccgttcgaaagcattaaagatgtaagcaaggaattgattaagtataaacgtaaagatggcgtggacttatcgggtacattgtatttgccagcgggttacgataaaacaaaaaagcaaaaattaccacttttaatttgggcttatccacaagagtttaaagataaaaatacggcgggtcaatccagtgctaaccctaacgagttcacatttccatactacggttcttttgtgtattgggttactaaaggttacgctgttttagacgatgcggcgttccctattattggcgaaggcgataaagaacccaatgataattttttagcgcaattaatagataacgccgaagcagccattagcgccgttgataatttagggtatattgataaaacaaaagttgcagtgggcgggcattcgtatggagcttttatgacggctaatcttttaacacactctaaactatttgcctgtggcattgcccgcagtggagcctacaaccgtactttaacgccttttggttttcaaagtgaacaacgcaattactgggaaattccgagcatttacaattcaatgtcgccatttatgaatgccgaaaaaatgaaaacccctttattgttggtgcatggcgatgcggataataaccctggtacgtttaccttgcaaaccgagcgttactttcaagccttaaagggattgggtgcgccagtacgaatggtattgttgccaaaggaagcgcatggctatgtagcgaaagaaaatattttgcatttactatgggaacaagaacaatttttagataaacatttaaaaacaactaactaagttgggatgtaataccaattacaaattaaaaatacattactgaaaaatagttggtaaaaagttctgtattatttattggtattagtttaaaaaaagtttagtgaaatcaccttcactaaactttttttatttgtagaaaattaaaaacctactgcctctaaggttgcttggcacttaagcgggcatactttaataataaatttttgataccattcccttcaaacgcaatagtggctttggtttcgggccatacgccttctaaaagacttacttgcccacttccaaatttttcgtgccaaaccgaatgacctacttgtaaatttttattaaatgccaaatcaatagcggctggtgcgctggtgttacctaggcgactgtttaaactcactaactttttagggggctgaaatccgatttcagatttttgacccgtgctttgctctttggtatttagattaagggtttgctttttaaaagataaattttcggagttagatgtatttgcagcgttaaacgtttgacggcggttttctaatgcttcgcctaaaaacggattggctttagggtcttccggaaaatctagatacttgctcccaatctcatcaataaaccgacttggctcgcaataaataacattgccatagcgatagcgtgtgcctgcaaaactaagcgtggcttgcttttcggcgcgggtaacggccacataaaataaacggcgttcttcttccaaatcgctgcggctatttaaggccatttgtgagggaaataaattttcttctaaacctacaatgtgtacatacggaaattctaaacctttggcggcgtgaatggtcatcatacttacccgatcggcatttttatcgtcgtccgcatttttatcggcatcggttagcaaggttatttcttgcataaactcatctaaagttttaatgcttacatcttgctgttgggcaaacaaactcgtatcgtctttatttaagaggggtttcaccacttcattcaattcctcctcttgcggggtgcgcggctgttctacaaaatctttaatcccatttaataactcttgtatattctcgtagcgactaacgccttcgggtgttttatcttgatacaattctttaacaatgcccgtgttaacagcaatgtggttcgccagctcgtaagcatctttataaggtaaggttaagctgtagttttttattaaggccacaaagtcattaatttttgcactaatgcccgtgtttaatcccaaattaaaatcttttaaattcgtaataaccgtccacatgtttatattatgttcggcggcggccacactaattttatcaacggtggcttgcccaatacctcgcgtgggataattgatgatacgttttaaactttcatcatcgttgttattaatcgttaatcgaaaataggctactacatctttaatttctttgcgttggtaaaaacttaatccaccataaatgcggtagttaatgtttaaacgtcgcagggcttcttcaaacgcacggctttgggcgttggtgcggtataaaatggcaaagtctttattgaaggcttgttcgcgcatcttcgtatcaaaaatatgattggctactttttgtccttcttcattgtcggtacttgctcggataatttttattttttgcccaacttcattatcggtaaacacatgttttttaaactgttctttattgttggcaataatatcgttagcggcttctacaataactttggtgctgcggtagttttgttcgagtttaaatgtttttaaatcggggtaatctttttcaaagtttaaaatattttgaatgttggctcctctaaacgcataaatactttgagcatcatcgcccacggcacaaatgttttggaatttagcggctagttgtttaataataacgtactgcgaaaagttggtatcttggtactcatctaccaaaatataacgaaacttatcttggtattttaataatgctttcggaaaatcgcgcaataaaacattggtgttaaataataaatcgtcgaaatccatggctcccgctttaaaattgcgtttttggtattccaaaaaaagtcggcctaacaggggtttgtgactgctggcatcttcttgctgggtaataggattagcggcgtattgctgtgccgttatcaatttatttttagcatccgaaatacggtttagtaccatggctggtttataaactttttcatcgaggttaaaatgctttaaaatatctttaataacacttttactatcgtcggtatcgtaaatggtaaagttgttggggtatcctaatttatcggcttctattcttaaaatttttgcaaaaacagaatggaaggtacccatccataaatttttagcttctttagccccaacaatttttgcgatccgatctttcatttcgcgggcggccttattggtaaacgtgagggccaatatattaaacgcatccacgcctttctccatcaaatatgctatgcgatacgtgagcacacgggttttacccgaacctgcgccagcaataatcatcacagggccttcggtagtggaggcagcggcacgttgcgctggatttaattcttctaaatagtgcatagtttaattggcaatagaataacaaaaatttttgttgcttaaaattacggctaaagccttatatgcacaagtgtttacgcatcatttttataacataaacaatggtattaaattttgcagcaaacaaccaattaaatgcttaaattcaactcgtttatgaaaaagatttttttaaatacagtattggctctactaactttattaagccaagcccaagaaaaagtaaacctcaacgatttatgggtaaagtataaattttatcctaaaacggctggtagctttaatgccatgaacgacggtattttttataccgatatcgaagaagtggaaaaggaaaacacagtgtgtaaatacgaattaaaaacgggtaaaaaagttggagaaattgtacgacaaagtaaaattatgtttgccaataaacccatcaatttaactacttacgagtttagtccgaacgaagataaattactgttgcacgagggaatggaaaacgtttaccgccgatcgcccaaagccaattactttatttacgatttaaaaactgccaaagtaactcaactcgatgcaaatggcaaacaaatgtttccgcacttttcgcccgatggtaaaaaagtggcttacgtgcgcgaaaataatttatacatcaaaactttagaaaccgatgctattacagccgtaacgagcgatggcaaatggaacgaaattaaaaatggttgggccgattgggtgtatgaagaagaatttagcaaagccgattacttggattggagtgctgatagcaaatacttggcctttgtaaagttcgatgagcgtcaagtaaaagaatacagcatggatgtgtacacgggtaatttatatcccgaaaaaaatacgtttaaatatcctaaagctggcgaaaacaattccattgtgagtgtacacacgtttgaagtaagcaccggaaaaagtaaattattagatacaggcgatgaaatagacctttacattccgcgcattcaatatactaacgatgccaatgtattgtgcgtgcaacgtatgaaccgccttcaaaataaaattgaattgttgtttattaattcgcaaacgggtagttctaaaaccgtattaaccgaagaggctaaaacgtatattgatgtgcacgataacttaacttttgtaggcaataagggctttatttggagctgcgaacaagatgactacaaccatttgtattattacgatttgaatgggcaattaattaaccgtattacctcgggcaattgggatgtgattgagtttaaaggcttcgacgaaaaaacaaatacggtgtattatagcagtactgaaaacggtgttattaatagagatgtgtatagcattcaattaaatggtaaaaataaattacgtttatcgaaacaagacggtactactgatgccgagtttaccaaagggtttaagtattacgtgagttcttacagcaatgccaatacaccgcctgtttacgaattgtatagcagcaatggcaagctaataaaagttttagaagacaatgccaagttgcgcgacacgcttaaaccttatcaattttctaagaaagaattttttaaatttaaaactagtgaagacatagaacttaacgggtttatgattaagccccccgattttgatagcaataaaaaataccctgtttacatgtatgcttacaatgggccaggttctaacgagtgtaacaacgcatgggatgcttttgaaatgccttggcatcaactcttggcgcaaaacggatacattgtagtgtgtgtagatgggcgcggtacgtttggccgtgggcgggtgtttaaacacagtacctatttgcaattgggtaaattagaagttatagatcaattggaagtggcgaagtatttagggcagcaaagttatgtggacaaaacgcgcattgggtttcagggatggagttatggcgggtacatggccagtttaatgattaccaaaggtgctgatttaattaaaacggctattgcagtagcacctgttaccaattggaaatactacgataacatttatacggaacggtttatgcgcaaaccgcaagataataaaagtggttacgaagataattcgccggttaactacgccaaaaaattgaagggtaattttttattgatacatggcagtgccgatgataatgtgcattaccaaaatagcatggaatttgctaaagaattgattaaatacaacaagccgtttgagtttatgacctatcccaataaaaatcacggtataagtgggggacttacacgcctgcatatttacagcaagatttttaatttcgttaaagaaaaattataagatggctaaaaaaacattggtagtattgagcggtgcaggcattagtgccgaaagtggcattcgtacctttcgcgactcgggcgggctttgggaagagcataaggtagaagatgtagccacttttgaagcttggcagcgcaataaagaattggttttaagattttataatgaacggcgcaaacaggtgttagaggttgaacccaatggggcgcattatgcgttggccgaacttcaaaaacaatttcacgttaaaataattacgcaaaacattgacgatttgcacgaacgcgctggcagtaaaaatgtattgcacttacatggcgaaattttaaaagcacgcagtacggttgacccttcgttaatttatgaggtagaaggatgggaattaaaggtaggacagaaatgcgaaaaaggttcgcaactgcgcccgcacattgtttggtttggcgaaatggttcccgaaatggccaatgccgcgctaatagccgaaactgctgatgtatttttagttattggtacatcgttaaatgtttatcctgcggcgggtttaattcatcaggtgaatcccgaaatacccaaatacctcattgaccctggttcttttaatttagattatatgcggcacctcacgcacatccaaaaaaatgcggtagaaggcatgaaagagtggatggagcaactcaaaaaataagagaactacttattgaaaaaatttattgtttttatacctgcatcacttaataaattaattccaaccaatcattactttgttcctttgcgaactttgcgaactcctttgcgtgccattgcctgatgaaaataatttattctaaatctctttttcttaaagccaatcccaaccattcgtggctttcttcctttgcgaactttgcgcctttgcgtgccatttgcctgataaaaatagtttattctaaatctctttttcttaaaacctatccaaactatttattgctttattcctttgcgaactttgcgccttggcgtgccattgcctgatgaagataatttattctaaatctccttttcttaaaaccaaacccaaccatttattgctttatttctttgcgaactttgcgcctttgcgtgccattgcctgatgaagataatttattctaaatctccttttcttaaaaccaaacccaaccatttattgctttatttctttgcgaactttgcgccttagcgtgccattacctgatgaaaataatttattctaaatctctttttcttaaaaccaatcccaactatttattgctttcttcctttgcgaactctttgcgcctttgcgtgccatacccatttttataaacgactactcctactcaggctataacaattatttagaaaaagccctttcttagaattggaaacgaagccgcataccctgttttatgcgactgttatttccctagaactaaggagtaaatatcaggtttttggttattgtttatgccaaagcgaatacttacattgcttagctaaaaatcactataaaaataacacttataaaaaacacgatgaatacctcggctttaaaaatactggaaacaacaacttgtaaaacaggtttggcaagggctataaatgaagacgaccccttgcggggccctcttaaatgttttcacaacggaataatccttattgtgattagcttcaaattgttctcaaatatataaataaaaaataacaaataacaatatggactcaaaaaaaattttaggattggatttaggaaccaatagtataggatgggctttaataaaccaagattttgaagctaaaaaaggcgaaatactcgggatgggtagtcgagttatccctatgagtcaagatattttaaatgaatttggtaaaggaaactctgtatctcaaactgctgaacgaacaggttacagaggtacaagaagattgagagagcgttatttactcaggcgagaacgattacatcgtgttttaaacatcttgggttttttacctcatcattttgcatcttctattgatttcaaaaaacactatgggcaatttgaatctaataaggaaactaaattagcttattttaattctgagttcattttcaaaaaatcgtttaatgaaatgttagaagattttagaatacaccaaccttctttattaaaagatgaaaaaggaaaagataaactaattccatacgattggaccatttattatttaagaaagaaagctttaacacaaaaaatagagaaggaagaattagcttggcttatcttaaactttaatcaaaaaagagggtattatcaactcagaggtgaagacgttgatgaaaaacaaaataagttagaggaactttatactttaaaaatagttgatgttaaagcagacgaaccacaaaagggtaaatcagaaatatggtattcccttatcttagaaaatggttgggtttatagacgttcaagtaagctacctttatttgattggaaagataaaacaagagactttattgttacaacagatttaaacgatgatggctctattaaaaaagataaagaaggaaacgagaaaagaagttttagagcacctggtcctgatgaatggaaactagttaagaaaaaaacggaggatgctattataaaatcaaaaaaaactattggtgtttacgtttatgaaacattactaaaaacgcctaatcaaaaaattaatggcaaattgataagaaccattgaacgaaatttttataaagatgaactaaaagctattttagaaaaacaaattacagaacataaagaactgcaagataaaaatctttacaatgcctgcataaaagagctttatcaaaataatgaaacccatcaaaccgttttaagtaagaaaacgtttctacacttttttttagatgatatcatttactaccaacgaacacttagaagtcaaaaatcatctatttcaaactgtaatttagaaagtagaactcataaagataaagacggtaatatgaccgtagaacccttaaaagctatttcaaagtcgcatcctttatatcaagagtatcggatctggaaatggattagtgatttaaaaatatatacgcgagataaggatacaaatgttacagctcaattcattaatggtattgaaatacaggaagatttatttgactttttgaataatcgtaaagaaattaaacaagactctcttttgaaattttttcttgaaaaatcaggtttaaaaggaaaactgttgaacgaagaagtaaaaaaattcaaatggaactttattgatgatgctgaaaaagcatacccctgtaatgaaacaagacatcttattttgacccgttttgctaagattgaaaatagtaatactgattttttaactcacaatgtaattgaacatttatggcatataatctattcgatttctgataaaactgaatatgaaaaagctttaaaaacatttgcaaaaaaatatgctttagacgaactatcttttgtagatgctttcaaaaaacttcctccatttgatagtgaatatgccagttattcgttaaaggctataaaaaaattactgccattaatgcgtcttggaaaatactgggataaaaattctatagatataaaaactaaagatagaattcaaaaaattattacaggagaagtagatgaaactattaaagatttagttagagataaatcactcaaaaataaactggagaatgaaataaattttcaaggactaccagaatggttagcaaaatatgtagtttacgatcgccattcagaggctagttcaactcgtaaatggaaatccatagccgacttaaatgattatttagaagaatttagacaacattctttacgaaatccgatagtagaacaggtaatactagaaacacttagaactgttaaagatatatggattaaatacggtaatggaagatataatttttttgacgaaattcatatcgagcttggtcgtgatatgaaaaatacggcagcagaaagggcttcaaaaacaaaacaaattttagaaaatgaaaatggcaacattagaattaaattgcttttagcagagttaaaaaaagattcatcaattgaaaatgtacgtccgtactcgccctatcaacaagaaattttgaaaatatatgaagaaggtgttttaaattcgaatgttgaaattcctgaagaatatcttaaaataagtaagacagcgcaaccaacttcgggagaattgctgcgctacaaactatggctcgaacaaaaatatcaatcgccttatactggcgaaatgattcctcttacaaagttatttactttagactatgaaatagaacacattattccgcaaagtttatattttgatgatagccttagcaacaaagtaatttgtgaaaccgctgtaaatagattgaaagataaagatttaggatttacatttataaagaaacacgaaggaaaaaaaatatcaatgggttttaataaagaagtttcacttcttagtcctagtgattatgaaaaatttgttagagaaaagtatgctaaacttacttccaaaagaaataagttactccttgaggaaattccagaaaaaatgattcaacgccaactgaatgatacacgttatattagtaaattcatcacctctatcttatctaatattgttcggtccgaaacaaatgatgatggtgttaactcgaagaatattattccaggtaatggtaaagttacaagtagattaagacaagattggggattaaatgatgtgtggaatgatttaatattgcctcgtttccagagaatgaatgaattaaagagcaatactgattacacgacttataatgctaaatatcaaaaacatttaccaacagtaccgatagagtcatcaaaaaattttcaaaaaaaacgtattgatcatcgccaccatgctttagatgcgttaattatagcttgtacaacacgcgatcatgtaaatttactcagtaatcaacatgcgcaatcggccgaacgattcgatttacagcgaaaacttagaaaatttgaaaaagtaagttatacagactccgaaagtggcattagtcagaataaagaagttcctaaagactttataaagccttgggaaacgataacgcttgatgcaaaaaataaattagataaaacaattgttagctttaaacaaaacttaagaattataaataaaacaattaataaatttgaaagttacaaagataaagatgggaaacttattttggataaagatggtaagcctaaaaaagaactaagattacaaacaaaaggaaatagttgggctatacgaaaatctatgcaccaagatacagtaatgggactgattaaacttcggagtcaaaaaacaattcctttagctaaagcacttgaagatatagaaaatatagtagataaattattaaaaaataaaataaaacaacttattaaagaaggactagatgccaaaaaaataattaaattatttaaagatgaaggtaataattggaatgataaaaatatttcaaaggtggatgtctattattgggaggttgatgaaaatggattgggactcaatgtttcttcacgtgtgagtttagataccacatttgataaaaagaagattactgaaagcattgcggatactggaatcaaaaagatactgttgaatcatttaaaaaactatgagggtaaaaaagacgaaaaaggtgctgacattgcgcccgaactactggctttctcgccagaaggtattgatgaaatgaatgctaatatcgtccaactaaatgataataaatttcatcaaccgatttataagtttaaaacgtttgaaccaaaagggaataaatttattgtaggtcaaagtggtaataaaaaagataaattagtgattgcagcaaaagggacaaatctattttttgcaatatataaagatgaaaacgggaaacgagtatatgaaaccattcaacttaacgaagttattgaacatcagaagtggagagcttctttaacgagtgatgaacaaaagaaaacaccgcttatcccaattaaaaaagataaaggcgagcatctttttaatttatctccaaatgatctaatttacgtttctggtgatatagctaatgcgaaaaaattagatttcgataacttaacagatgagcaggtttctaatatttataaagtagtaagtttttctagtaatagactttgtgcaatcccctttaatgcagctacttctattgtagataaatttgaatttacacaacaaaataaactagaatttactagtgataaaaaatctattaaagagcattgcatcaaactcaatattgatagaatcggcaatcttcgtattggcagttaattgcaccgttttatttggtttttaagcaccttcaaggtttagtaaaaagtaaatcctctaccctagccttgaaggtttttataacaacaaaaaatagaaatcaatagctaaaaaaatatgcctactcaaacagaaatatacttaccgaaatgttattcatacagctataaccttgcaaatgggcgtgcgtttctttttttaaacgccactaattttttaaagactcatccattatgtgtttcaaaaattactaataacttatttccttgctctatacttcaacattttcattttttaacgctagtaaaaagcaaagcaggtaagcgtgcacgttttaatgggattgatgccgatggtagaattaaatcctaccgtggcttcacttctcaagccttgattcatttttttaattagcgatgattaaacaaactcgatattttggtaaccccgccaacttgcgtataaaaaataagcaattaagtgtggaggtattttctgaaacgggaacgacttaccattcgcttcctgttgaggatttaggcattgttattctcgaccatcctcaaattacattaagtagtggggttatacaagcattgcaagaaaataataccgttatcattacgtgtaactctaaacacatgccacaaagtttaacctttccgttagaggggcataccacgcaacaagagcgttacgattatcaattagcagctagcgaaccacttaaaaaacaagtgtgggcgcaaaccattgttcaaaaaataaaaaaccaagcagcggtattaaatcgtttttcgttagaaagtaattatttagtgcccttgtataaaaatgtaaaaagtggagatactgaaaattgcgaggcaacagcagccgcctattattggaaaactttgtttgcccacattcctgattttacgcgccaacccgaaggcattccgccaaacaacttattaaattatggatacgccattttgcgtgctaccatggcgcgcagcattgtggcagcgggcttattacctaccttgggtatttttcaccgcaaccgctacaatgccttttgcttggccgacgacttaatggaaccctatcggccttatgtagatgaaatcgtttataaattcattaacgcatttggtttgattgacgatttattgcctgagcataaacgtattttattgggcattccggccattgatgtgcgtatagaaggcgagcaaagtcctttaatgattgcgacccaacgcaccgccaatagtttgtacaaatgctacgaaggtacgttgcgtaaattaatttatcccgacctataatgtgctttaaccatgataacctcttacgaacgtttaaatgcttaccgagttatgtggactttggtgttgtatgatttgcctaccgaaaccaaaaaagatcggaaactagccgccaaatttagaaaagatttgctgcaagatgggtttagaatgtttcagtttagcatgtatgtgaggcacagtgcgagcagcgataacgcttatgtgcacaagcgaaaagtcataaaaaatttacccgaacatggaaaagttggaattttacaaataaccgataagcaatttggacaaatggaacttttttttggcaaaaaacaacaagaacgcttggatattcctcaacagcttgaattattttagaaacaaaaaaagcccaagttgagttgggcttttaaagtattgataagattttttttactatgcgtttaggcttaatcccttgattttattgatttttttgagctatctgtttttatcaataagtcaaagatacaatttgaaagctaatcacaacacattatgtaaccacctgtatataccacaagtttttatcaataagtcaaagatacaatttgaaagctaatcacaacatgacggcgaaccacccgtatttacgcctagtttttatcaataagtcaaagatacaatttgaaagctaatcacaacattatactagttgttgttacgatagccatcgtttttatcaataagtcaaagatacaatttgaaagctaatcacaacacagcttctaatgtggttgtggaagtttcagtttttatcaataagtcaaagatacaatttgaaagctaatcacaacactaaagctatacccgcttccgtttttatagtttttatcaataagtcaaagatacaatttgaaagctaatcacaacggtctttcatacaggtttgtaaactcaggagtttttatcaataagtcaaagatacaatttgaaagctaatcacaacctttttcaaaatcatctaacatggcgtttagtttttatcaataagtcaaagatacaatttgaaagctaatcacaacgttaagctaaggcgttgtatagcctccgtagtttttatcaataagtcaaagatacaatttgaaagctaatcacaacccattcaggcgtcttccttacatctcaaaagtttttatcaataagtcaaagatacaatttgaaagctaatcacaactagttaacgtttggtgtaacgtgtatgtcagtttttatcaataagtcaaagatacaatttgaaagctaatcacaacaccatagttgttttttcgcatgattcaactgtttttatcaataagtcaaagatacaatttgaaagctaatcacaacggatgaggacagggcttattacgatgccttgtttttatcaataagtcaaagatacaatttgaaagctaatcacaaccatcgcaagctatcccattttcataaaacggtttttatcaataagtcaaagatacaatttgaaagctaatcacaacttaatttttaatttatccgcactaattatcgtttttatcaataagtcaaagatacaatttgaaagctaatcacaacaccagcgtgcaaatggccataacctagcgggtttttatcaataagtcaaagatacaatttgaaagctaatcacaacagcgagttatcgtttctaaaaatagatacagtttttatcaataagtcaaagatacaatttgaaagctaatcacaacagtgatactactccaagacatgatgcctttgtttttatcaataagtcaaagatacaatttgaaagctaatcacaacggaatttagaacaagaaatgatgtctttcagtttttatcaataagtcaaagatacaatttgaaagctaatcacaacggaggtatgttgctagaaagagaggctacggtttttatcaataagtcaaagatacaatttgaaagctaatcacaaccaaatgggtatcactacgaacggtactaccgtttttatcaataagtcaaagatacaatttgaaagctaatcacaacgcaaacggcttaatggccgcaaacggcgtagtttttatcaataagtcaaagatacaatttgaaagctaatcacaacatgatttaaacaaaggtcctattaaacaacgtttttatcaataagtcaaagatacaatttgaaagctaatcacaacaccctgtataaattcatcaaatcctcctttgtttttatcaataagtcaaagatacaatttgaaagctaatcacaacgactttagagtttggatagaaactaaaaaagtttttatcaataagtcaaagatacaatttgaaagctaatcacaactatagttccgttgttattggttttttttatgtttttatcaataagtcaaagatacaatttgaaagctaatcacaacaagcgttcattttatattttgtacgagattgtttttatcaataagtcaaagatacaatttgaaagctaatcacaactacgccatatcgtgcaaaaactctttaaatgtttttatcaataagtcaaagatacaatttgaaagctaatcacaacaggccctcgctttttatttaaaattacgtagtttttatcaataagtcaaagatacaatttgaaagctaatcacaacatctataagagcatttatatctgtttccttgtttttatcaataagtcaaagatacaatttgaaagctaatcacaacatcatctctaatagtatgcaccttaacgccgtttttatcaataagtcaaagatacaatttgaaagctaatcacaacgaaacgggttatgcttatgataaaattaatgtttttatcaataagtcaaagatacaatttgaaagctaatcacaacaagaagaaactgcttggagaggggtataaagtttttatcaataagtcaaagatacaatttgaaagctaatcacaacacttacttactgtggggttgtgagttgtaagtttttatcaataagtcaaagatacaatttga

SEQ ID NO: 1288 - DNA, 18949 bp, synthetic construct
  variation 16000..17060: note = n is a, c, g, or t
  misc_feature 1..18949: note = Synthetic
  source 1..18949: mol_type = other DNA
ggcgggcaggctgctttgatgcagtacttggcaaagaatatcaagtatcctaccattgctcaggagaatggaacccaagggcgtgttatcgttcagtttgtggtaaatagagatggtagtatcgttgacgcgaaagttgtacgtcctgtagacccctatttggataaggaagcgcttcgtgtgattaattcgatgcctaaatggaagccgggtatgcaacgcggtaaaccggtacgtgtaaaatatacagttcctgtaatgtttagattgcagtaattttgtatcacagataaataaagaggctgcttcgaagcagcctctttttgttcgttacgtttttattatcaaattattatgtttacagcctctcagattcttgatgaaataaacaagcatattgcctcacttcagtttacccgtacgcccaaaggactttacgaaccgattgagtatgttctttctttgggaggaaaaagaatacgtccggtattgttgttgatggcttataatttatacaaagacgacttggcttcagcttacgcccccgctacaggaatagaagtttatcataattatacgcttttgcatgacgacttgatggaccgcgcagatttgcggaggggaaagcctactgttcataaagcttgggatgataatgcagctatattatcgggagatgccatgctggttttggcatatcagtatatagcggcttgtagtcctgaacatttaaaagaagttttggatttattcagtcagacagcgcttgaaatttgtgaaggacagcaattagatatggagtttgaagcccgcaaagacgtttcggaacaggagtacctcaatatgattcgcttaaagacagcagtattgcttgcttctgctttaaaaatcggtgcgattcttggcggggcatctgctgtggatgccgatcatctttatcagtttggtgtgcggataggaattgctttccaattgcaagacgatttgctcgatgtgtatgggaatacggaagtctttggcaaaaagataggtggagatattctttgcaataagaaaacatatatgctgattaaagcgcttgagcatgtagatggcccgcggcagaaggagttgagtttctggttggatgcaaagaattttgatccggctgagaagattcgggcagtgacttccatttatgatcggctgaatattcggagattttgtgaaaataagatgagagaatattatgatttggctatggagagcttaagtgccgtaagtgttgtcgaagaaaaaaagcacgaactgaaaaatgttgtgaagcagctcatgtatcgtgatatataaataggataatgtatgccttacagacgattgccaaatacggataaagccagagtgagagcgctgaaagcagcggttgcaagaggcgacatatgctccttggacaaattagccatttcgctaaagaccttatttgaagcccgtaattttttggcgaaattcgaagctgcgcaaatttattatgtgcaatgctataccaatcagtccaagtcaagtcgcaaacatcagtcaaatgtgagaactgcgaggttatatatttcacactttatccaagtgtttaatttggcagttctcagagatgaaattaaagagtctcaaaaagaactttatggtttgtcggatgtaaatacattgcccgatttgcttagtgagagcgccttgatagaatggggagcgaaaataatagaaggagagcaacgacgtatttcacaagggggaatacctatttataaccctactatcgcgcgtgtgaaagtatattacgacatctttgtggatagctatgaacggcagaaaaactatcaggcggcaacggctcgtagcctggaagatctcgcttcaatgcgtagccgtgccgatgagctgattttggatatatggaatcaggtagaggctgagttcgaaggtgtgcaaccgaatgaaaacaggttggaaaaatgccgggattacggattggtatattattatcgttccaatgagaaatgaacagataaaagtgactttatgttaatagatacgcactctcatctttttttagatgaattctcaaaagatttaccggaagtaatagaacgggcacgtcgcgccggggtttctcatatatttttgcctaatatagatagtacgactattgattcgatgctggctgtctgtgcagagtattcggattattgttaccctatgatcggtttgcatcctacatcggtcgatgagcggtatgagaatgaactgtcaatcgttcgtaaacagcttgaaaatcctaatcagtttgtggcaatcggtgaaatcggacttgatttttattgggataagacttttttcactcaacagctggcggcttttgaaaagcagttgcaatgggcaatcgaatatgatttgcctgtagtcatacattcgcgtgatgcatttccttatatatatagtataatgaagccgttcaagaatacatcgttgagaggtatattccatagctttacaggaactgtcggagaagctgcccgattgctcgaattcgaaaactttatgttaggcatcaatggagttgtcacttttaaaaagtcggtgttgccggaagtcttgttgtctgttcccctggaaagaatagtacttgaaacagattctccttatttaactccggttcccaatcgtggaaaacgaaacgaaagcgcaaacgtaagggatacattgtcgaaagtggcagaaatctatcggatgacaccggagtatgttgcaagggtaacttctatgtctgccctaaaagtgtttgcattccgcaaataaggacggaaaggttttaaaatatattaatttgcagtgtttattcaagataaaacagggataatgcttcatgaaaaaaaaaaaaaggatacatttgtagctgaaaatctgaaagcctcttagggagagatgctcgagtggttgaagaggcacgcctggaaagcgtgtatacgccaaaagtgtatcgggggttcgaatccccctctctccgcaagtgagaatgaaattgggaaataaatacaaaataacaattaattaattaatcttaaaaattagacacacaatgaaaaagttatttgcaattgttgctgtggttggagccatgacatttggcacaactcaatttgctcaggctcaagacgctactgctactgaacaggctgccgaccaacaagttgctgctgaaactgtagctgctgacgttgctacacctgctgctgaggaaggtggtatccataaagaacttaaagtaaaattcattgaaggaactgcttctttcatgagtttggtagctattgctttggttatcggattggcattctgtatcgaacgtatcatttatctgagcttggctgagatcaatacaaaaaaattcatggcgtctatagaggctgctttggaaaaaggagatgttgaggcggctaaagatattgcccgcaatacaagaggccctatcgcttctatttattatcagggattgatgagaatcgaccagggtattgatgttgttgaaaagtctgtagtttcttacggcggtgtgcaggccggctaccttgaaaaaggatgttcttggattacactgtttatcgctatggctccttcactcggattcttgggtactgtaatcggtatggtgcaagctttcgataaaatccagcaggtaggtgatatctctccgacagttgtagcaggtggtatgaaagtagctttgattactactatcttcggtttgatcgttgctctgattctacaagtattttacaactacgttctttcaaagatcgaggctcttacaagcgaaatggaggattcttccgtatctttgcttgacatggtaatcaaatataatttgaaatacaaaaaataatctgagatgagtaaattaacatataaagtttcgtattacgttctgtatgcgatgtttgctgtcattctgattgtcttagggctgttctacttcggtggtgacgctcaaggtgcagaagtcattccgggtgtagatcctgaaatgtggcagccggctcaggccaatgccttactcttcttgatgtatggattgcttggtttggccattgcagctactcttgtcgctgctgtattccaatttgcgtcagctatgaaagacagtccggcaaatgctataagatctttgcttggattggttcttttaatcattgttctcgtgttggcttggaccatgggcgatggtacgccgatgaacatccaaggctatgagggttcggacaatgttcctttctggttgaagctgacagatatgttcctttatactatctatatcttgctgtttgtgacgattgtttcaatcattgtaagcggtataaagaaaagattgtcctaatttaaagtaagggatattcaatttaataagttattacaatggcaaaaggaaaaagaaaagttcctgatattaactcaagttctacggcggatatcgctttcttgttgcttatcttcttcttgattacgacatcaatggatacggaccgcggcttggcaagattgttgccgccgccacccgaagagcaagataagcaaaataccgataaaattaaggaacgtaacattttgcaggtctatttgaataaggatgatgctttgatgtgcggaaatgattatatcagtattgatcaactaaggaagaaagccaaagagtttattgctaatgttaataatgaagagtctaaaccggaaaaaacacaaaagaatgtagagttttttggtccgactcttgttaacgacaagcatgtaatctctttacagaacgaccgtggctcttcttatcaggcatatattagtgtgcagaatgaattggttgctgcatacaatgagttaagagatgaattgtctcaatctaagtttcagagaaactatgctgatttgaatgaagaagaacaaaaagctgttcgtgaaatcttcccgcagcgtatttcagaagcagaacctaaaaaatacggagaaaaaaagaagtaatgggaaaatttaataaaactggtaaacgtgagatgccggcgttgaacacttcttctttgcctgaccttatcttcaccttgttgttcttctttatgattgtaacaacaatgcgtgaggtgactttaaaggtacagtttaagcttccggtaggtactgaacttgaaaagttggagaagaaatcgctggtaacgttcatttatattggtgaaccgactcaggaatatcgtgctaagatgggtactgaaagccgtatacagctgaacgacagctatgctgaagtttcggaagtacaggattttatctttcaggaacgctctagtatgaatgaaagcgatcaaggaaatatgacagtttctttgaaagtcgatcagaaaacgaagatgggtattgttacagatgtgaagaatgctcttcgtaaagcttatgcgctaaaaatcaactattctgctacaaaacgtggagaacagaaataatagttgaatttaatattataaaaagagagggcaataaacggccctctttttttatacataatttctgaagcagtcggttgccgcagattcgggggtgtggagattcgaatgccggatactgcggcggaaggctcaagactatagagcggtcattttgtttcccaccggggaaacaaaagtttccccagcgggaaaataaagtttccccagtgggaaaataaagtttcaatagtgggaaacaaaagtttcaatagcgggaaacaaaagcttcaatagtgggaaacaaaagcttcaattgtgggaaacaaaagcttcaattgtggtttaatgtttttagttgaccactttacggcttattttcaaagtcggttgactcagttaatacttatttttattacaagttgatgggaggatatcgcaaaatgattcgttatctgacgttgtagacagtcgtataaagttgttctttaacttcttcaaaatgattttcgcttgtcagatttccataggccattaaatacatgggcaaatacgggtctccttttttatagggaggctgattataattgtttttccataggcagaatccatgtcgttcgtagaagtgaatgcgacgttgggatatttcgtctgtaggtctttccacttccagcacgatgggaagattcaaccgtttgtataactgttcgataacttgtttgccataacccttgttgcgatgcacaggattcatggcaagatgttctatgtagaagaagcgttcaaacgcccaataggtaataaatccgatgggctgctcatcgttcaggatgatattgttgtagaagttatttgtttggtcggtatatttgcgaacatcttcgagcgggcggtattcttccggtggaaaagcttctgtgagtagcttctccataaaccggtagtattctacatctgatgtctgtatgggttgaaatcggatcattgtatttgttttagctatggattgtttggtgtgttatggtacataaaattcaatcatacgccggatagcgcgttggcaaaccgggcagaaagcgggatattcgtttgttttcatgcgacaattgaaagccgggcgatatatgcctttcgcagaataacctcctccttcgtacactcctacgggaaataacttgtttctttgcgcagatggtgttggaataggcgtgccggtcacaagcatgtcttcccatttcgaagcaaaatcgattcgggtggtaatattttgctcccaaggttccacatcgagcgggtaagtatctgtcattacatcattctcataaaagtattcatcggccaatcctccgaaactatgtccgaactcatgtactactacaggtttgaacatggaatgatgcgcgctggttagcgtgtaggagttatagattcctccccctccatatacttccgtgtttgccagtatgatgatatgttcgtagggaacaccggccaaagcattgtgtatcgcctttacacggctagtggtaagatagcgttccgaataaaaagtgtcaaaatgggaatgtacggtcgtttgtttccatcgtttctctcgcggtacgcttactccgctatctgccgacggacttgctaccgcaaccacattgaatttacttttcaatgttcggaaaggttcgtgtgcaaacaaactttcacaggcccgttctgcgtcttggtaaaatgtctctatttctttgttggtgtatccttctgctaaaatggctatatcaatgcattctttttcacttccgtttttcaggatatagcgatgtggagcgttgtgagatatgcctcgttcgtgaatcaagatatcatcggggcgaaccacatggcgtaagtgagccatgacggctttacgcggagtatataagatgacttctatctctacaggctctttgggaaaggggaggagaaatgtgttttcaaaacctctggcagtttcttttgcctcatcggtagatagccattcctggtatagcgaggagaaagaggttttgtaaatacattgtttactgcttaaatctctgacaatgatttgaccgttaccttccaaaggcagttccgacagattgtgccggcggcctgcccatacgggaagttgcgacaattcatccaggtaaatcgcttgtctgttcgcgtcacctgtgaaaagatagtctacccgtaacgttttgtcttgaaaatagtcgtcaaaattttgcgcatggctttcgaatgccatccatacgcacaggaaaaaaagaatgcagtgtttcatattcatcgtatatttatgtttcttacaaaggtacaaactattgccgacttatcttctatttgtaaataaaagtaatagtttatagtatttattatcgggaaatagctaactttgcataaaagattcattgattaaaacagtttgatttaaatgggatatcatcaattagatagtttagatgagcagattttgaaattgattgcggataatgcgagaattccttttctggaagtcgccagagcttgcaatgtatcgggtgcggccattcatcaacgcattcaaaaattgacaaacttaggtatattgaaagggtcggaatacatcatcgatccggaaaaaataggatatgagacgtgcgcttatataggtatctttctgaaagatcccgaatcgtttgattcggtaacaaaagcgttgagagacataccggaagttgtggaatgtcattttactacaggtaaatacgatatgtttatcaaaatttacgcacgtaataatcaccatttattgagtgtgattcatgataaactgcagccgctcgggctggctcgtacagagacacttatctcttttcacgaggctattaagcggcagatgccgatattgatagatacggaataaggaaaagcaggacgtgtagggacgtttccaacggtgactatcgccttacataatctacaaaagcataagagcagggatgtttttcatctattgaatgaacttctctgcttttttcatgccagatatcgggagatatttccggaaagaaagcgtcagccagtggagccgtgcaatctatttcagtcaggcacagttggtcggcataacgaagcgcttgtcgataaacgcttgcccccccgatgatatatacgttttcatcttccttacaggcttttaacgcagcatccaacgattggaaaacttctgctccggggaattcgtttgaggtgttcgaagacaatacaatgttcctgcgatgcggcaacgctcctttgggaagcgattcaaaagtctttcgccccatgatgatggtatgtccggttgtcagcgccttgaaacgcttcaagtcattgggtagccagaagagaagcttgttctcgaatccgatagccatttgacggtctacggcggcaataatagatattttactcatggcagtttataccgataccgctcctgcgatgtgtggatgcgggttatagttcgttaattcaaaatcttcaaacgtaaagtcgaagatgctttttatctccgggttgatcttcatttgcggaagcgggcgcggagtacgcgtcagttgcagtttaatctgttcgaggtgattcagatatatatgagcgtctcccaatgtgtggataaaatcgccggcttttaatccggtcacttgagccatcatttgcagcaacaaggcgtatgaagcaatgttgaaaggaacacccagaaagatatcggcgcttcgttggtagagctgtaaactgagttttccgtcggcaacgtagaattggaagaaagcgtggcacggcggaagattcatattcttcagatctgccacattccatgcgctgacaatgattcgccgggagtcggggttgtgcttgatcatttccaccgcttcactgatctggtcgattcctcctccgtcgtaatcgggccacgaacgccattgatgcccgtaaatatgtccgagctctccgttctcgtccgcccattcattccatatacgcacgccatgctcctgcagatatttcacattcgtatctcctttcagaaaccaaagcagttcgtggataatcgattttaggtgtagctttttagtggtcagacaagggaatccttcatcaagatgaaatcgcatctgatggccgaagatgctgatggttccggttcccgtccggtcacttttgggagtcccttccgctaatacgcggttaagtaggtctaaatattgtttcattgtcggtggttatgctatgatgcaaaagtactcaaaaaacttttatttgcagaggaagaacttgtttaaatttcgattgtactctttccgtttcattttaattaaataaaaaaggacgagttgccccgtcctggatgttttcacaacggaataatccttattgtgatttacttcaatttagtgctgcaaagttaaataaatatttattcaaaaacaataattctaataaaaaaatataactttgcggaaaagaataatattatgaaaaagatacttggacttgatttaggcaccaatagtataggttgggcagtagtcaactcttttgatgaaaatcaaaatgaagaaagtttgaaacacatagaatgtctgggaagcaggattattccaatggatgctgccatattgggagattttgataaaggtaattctatttcgcaaacggcaaaacggaccgaatttcgtggcgtgcgccacttgcgggagcgtcatttacttcgtcgggcaaggttgcataagattttaagattattaggatttttgccggatcattatgtgcaagatttggatggtcatggaaattttctggtaaatgtggaacctaaaatagcttggcgaaaagattcaaacggaacttttgagtttatttttaacgattcctttgatgaaatgttgcaagattttgctacatatcagcccgaattaattgcttgtaataggaaagtaccttacgattggaccatttattatcttcgtaaaaaagcactgacaaagaaactctctaaagaagaattatcttggattcttttgaatttcaaccaaaagagaggatattatcaattaagaggtgaagaagatgatgaatctgtgaaaaccgcaaagactcgccaatactttgatcgacaaaagattaaaagtatagtcgatacgaatcagacctacaaaggacaaaaggttttgattgtagagttagaggatggtgtaaaaggcaaaatctttaaaaaagaaatacctaactgggtaggacaggaaaagagtatcattgtaaccgtagatattgataaagacggatgtgataaatatgaagaatcgggagaactttcctgccgatttaaaataccgtcagatgcagagtgggaatcagaatggaagcttattaaaatgaagactcaaaaagatttggacgcatcaggtaaaacggtgggcgcttatatttatgacgctattctgcagaacccttctcaaaaaatacgtggaaagctggtgcgtactattgagcgtaaatattataaggaagagcttaagcaaatattgaaaaagcaagtggagtttcatccggagttgcgggataaagacttgtttcttgattgcttgaatgaattatatccgaacaatgatgctcatcgaaatgcttgtgccgatcgagattttatctatttgtttatggacgacatactattttatcagcgtccactcaagagcaaaaagtctttgatcgctgattgtccgtatgaaaaacatatgtatagagataaagaaacaggtgagttgaaatattcgtctgttaagtgtattgccaaatcacatccgttgtttcaagagtttcgtttatggcattttatttcgaatattcggatatatcaaaaagaacgtgtgattgatgttgatgcctgccagccggatttatcttcagcaaggtctgctttgaagtctaagttggaagcggatgttgatgttacgaatgagtttctaacatgtgaggctgattatgtatctctttttgaatggcttaataataagaaaagtgtaagtcaaaaagattttttaaaatatcccgcttttggaataaagaaatcgggagataactatcggtggaactatgtggaagataaatcatacccttgtaatgagacacgtgcgttaattctgagccatttggagaaagcaaatattcgaggggatatttttaccagagagcaggaagaagctttatggcatattttatattcagttgaagatagatacgagatagtgaaagctttacagtcattcgctgctaaatatcgttttaatgacgattttgtaaccgttttcagtaagtttcctccatttaaaaaagagtatggctcttattctgctaaagcgattaagaaactgttgcccttaatgcgcatggggaaatattggagtgaatcagctattgacatcaagacaagagagcgcatagagaagattattacgggggagtgtgatgacagtattcgagaacgagtccgtttaaaggctatccgattgcatgacattgagcatttccgtgctttgccggtttggttggcatgttatgttgtttatgaccgtcattccgaatccggagatataatgaagtggaaaactccgcaggagatggattcgtatatacaaaactttaagcagcattctcttcggaatccgatagtggaacaagtaattaccgaaacgctgcgtgttgtacgcgatatctggaaacaagtcggcagaattgatgaaatccatgtagagttaggtcgtgagatgaaaaatcctgcggataaaagaaaagaaatgactaagcgaataattgaaaatgagaacaccaatttacggataaaagccatgctgacagagtttttgaatccggaatttgagatagagaatgttcgtccctactctgcgagtcaacaagatattttacgtatttatgaaaatggtgttttgaatagcgtatcggaaattccggaagagataacaggaatattgaaaaagtttaatgaacgagagcaaagaaagcgtccgtctacttctgaggtattgcgctacaagctttggttggagcagaaatattgctctccttataccggaaagatgataccgcttggtaagctctttacgcctgcgtatgagatagaacacgttatccctcaatctcgctattttgatgactcgtttaataataaggtgatatgtgaagctgaagttaataagttaaagggaaatcttctcggatatgaattcattaaaaaacatcatgggcagagagtcgatttgggactgggagagattgtcgatatattttcggttgatgaatatgaaacctttgtgaaagattattattcgggtaaccaacaaaagatgaagaagcttttaatggacgaaataccggagcaatttatagagcgccaattgaacgatagccgatatatcagtaaagtagtgaagtctttgctctctaatatcgttcgtgagcaggatgaacaggagagcatatcgaaaaacgtaattgtgtgtacaggaggggttacagaccgattgaagaaagattgggggattaatgatgtttggaacaagcttattttacctcgttttcagcgcttgaataatattactgaaaccactgagtttacggcgaagaatatggaaggccatgaaattcctgttgtgccgtttgaatatcaaagaggttttaacaagaaaagaattgatcatcgccatcatgcgatggacgctatcgttatagcatgcgccagtcgtaatattgttaactatttaaacaatgagtctgcaaggaaaaaagctcgaataagtcgttatgatttgcaaaaattgctgtgcgataaagttaggacagatgataatggtaattataaatggatacttaaaaagccatggggtaccttgacacaagatgtttatgccgcattggataatgtaattgtcagttttaagcagaatttgcgggtgattaataaaacgaagaattattatgtccattatgaagccggtaaaaagaccattgctaaacaagaaaagggtagtagttgggctattcgaaaaccaatgcataaagataccgtgtttggagaagtgaatctgcgcaaagtaaaaacagtttctttgaatgaagctattaaaaatcctcaatgtattgtggaaaaggatttcaaaaagaagcttctatctttgcttaaacaaaactttgatgcaaagaaggttaaggcatattttgaagaacataaagacgtttggagtgatattaacctatctaagatagaggtgtattattttacaaaagataccaaagaaagattcttcgcaacacgtaaacctttagactcaagcttcgataaaaaggaaatagaaagtgttactgatacagggatacagaaaatcctgctccgtcatttggaacagaaaaacggtgatcctgatttagctttctcaccggatggtattgaggaaatgaatcataatatcgtacaactgaatggtggcagaaagcatcagcctattgttaaagtgcgtgtttatgagaaagcagacaaatttgcaataggccagcagggtaataaatcgtctaagtatgtagaagcagcaaagggtacaaatttgtttttcgcagtatatgaggaagaagtgcgcgataaaaaaacaaatgccgtaatgcttaagaggcactatgcgagtattccgttaaacgttgctatcgatcgtcaaaaaaaaggattatccactgcaccggaagatgaaaatggaaacgttcccatttttgtgttgtcacctaatgatttagtctatcttccgacagccgaagatatagcaaatgcctcaatctcttttccaataaataagaatagaatttataagatggttagctgtactggtaatcgatgtttttttataaaacatcatgttgctaatgtaattgtggataaaagtgagttctcagtgcttaataagatagagaaggctgagacagatgaaatgataaaagagatctgtgttccaataaaaattgatagacttgggaatattgtaaaaataggggtttacaaatagttctttcagagggaacttatattatcagacgatatagataaaagagagatgattaaaaagacactttattttggcaatccggcttatctttctttaaggtatggacagttggtaataaaactgcccgagatggagaaaaatgaaagtttgccggaaaacctgcggcagcaagcggaaatcacaaaacctgttgaagatataggagtggttcttttagacaataagcagatcactattacatccggggcgcttgctgcattattagaaaataatagtgctgttatcacttgcgatagcaagaatatgccggtaggattattgcttcctttgtatgggaataagacacagaacgaacgttttcgtcatcagctggatgcatcgttgccactgaaaaagcaactttggcagcagactattaagtcgaaaatagagaatcaggctgctgtgttaagtagctgtaccggagaagaagtgaagtgtatgcgggtgtgggccaataatgtaagaagtggtgaccctgataatttggaggcacgtgctgctgctttttattggaagcttctttttgctgatattgaaggattcacgcgcgaacgtgaaggtgttgctcccaataatctactgaattatggttatgctattctgcgtgcggtggttgcccgtggattggttgtcagcggcttgctccctactttgggtatccatcatcataatcgctacaatgcttattgtctggctgatgatataatggagccttatcgcccttacgtagatgaattagtgtttgctttagttcgttcttatggcaataatgtggaattgacaaaggaagtaaaaaactccttgttgacaattcctactttggaggttaaaattggaggaaagcggagtccgttaatggttgcagttgggcagactacagcatcgttatataaatgtttttctggagaactgcgtcgtataagctatccggagcgttgatggatcgttttagtgaatatcgggttatgtgggttcttgttctttttgatctgccgacggaaactaagaaagacaaaaaggcatatgcagattttagaaagaatttgcagaaagacggttttactatgtttcaattctcaatttatatacggcattgtgccagtagcgagaacgcatctgtacatataaaaagagttaaatctttcttgcctgaatatggacaggttgggattatgtgtataacagataagcagtttggagacattgaacttttttatggaaagaaaattcaaaccactaatgcaccaggtcaacaattagaattattttaaaacaaaaaatcccgtacttacacgggattttttattgttaatgagtacggtttttcttattctaatagtcctattaatccgttgattattagttgtnnnnnnnnnnnnnnnnnnnnnnnnnnnnnnnnnnnnnnnnnnnnnnnnnnnnnnnnnnnnnnnnnnnnnnnnnnnnnnnnnnnnnnnnnnnnnnnnnnnnnnnnnnnnnnnnnnnnnnnnnnnnnnnnnnnnnnnnnnnnnnnnnnnnnnnnnnnnnnnnnnnnnnnnnnnnnnnnnnnnnnnnnnnnnnnnnnnnnnnnnnnnnnnnnnnnnnnnnnnnnnnnnnnnnnnnnnnnnnnnnnnnnnnnnnnnnnnnnnnnnnnnnnnnnnnnnnnnnnnnnnnnnnnnnnnnnnnnnnnnnnnnnnnnnnnnnnnnnnnnnnnnnnnnnnnnnnnnnnnnnnnnnnnnnnnnnnnnnnnnnnnnnnnnnnnnnnnnnnnnnnnnnnnnnnnnnnnnnnnnnnnnnnnnnnnnnnnnnnnnnnnnnnnnnnnnnnnnnnnnnnnnnnnnnnnnnnnnnnnnnnnnnnnnnnnnnnnnnnnnnnnnnnnnnnnnnnnnnnnnnnnnnnnnnnnnnnnnnnnnnnnnnnnnnnnnnnnnnnnnnnnnnnnnnnnnnnnnnnnnnnnnnnnnnnnnnnnnnnnnnnnnnnnnnnnnnnnnnnnnnnnnnnnnnnnnnnnnnnnnnnnnnnnnnnnnnnnnnnnnnnnnnnnnnnnnnnnnnnnnnnnnnnnnnnnnnnnnnnnnnnnnnnnnnnnnnnnnnnnnnnnnnnnnnnnnnnnnnnnnnnnnnnnnnnnnnnnnnnnnnnnnnnnnnnnnnnnnnnnnnnnnnnnnnnnnnnnnnnnnnnnnnnnnnnnnnnnnnnnnnnnnnnnnnnnnnnnnnnnnnnnnnnnnnnnnnnnnnnnnnnnnnnnnnnnnnnnnnnnnnnnnnnnnnnnnnnnnnnnnnnnnnnnnnnnnnnnnnnnnnnnnnnnnnnnnnnnnnnnnnnnnnnnnnnnnnnnnnnnnnnnnnnnnnnnnnnnnnnnnnnnnnnnnnnnnnnnnnnnnnnnnnnnnnnnnnnnnnnnnnnnnnnnnnnnnnnnnnnnnnnnnnnnnnnnnnnnnnnnnnnnnnnnnnnnnnnnnnnnnncgttgcatcaggctcagctgtactcaatgtctcaaagatactaaatcggccgggatgattacaaaaaaggagtaaacaagttggcaaaccagcctacaaactttttccatggggagcgtttcttccagaactcgggcgtcatttctgtgcattgtccgatgtccgcccggaaaatattgtttaattcgcctgtgacttgtttgtcgaaaatgaacgcgttcgtttcgtaatcatagcgcaggctgcggctgttgagattggccgtgccgactgtgcagaaaaggtcgtccaccatcatgattttggagtggtggaatccgccattgtacatataaacggttgctccccttttcatcaatttatggagtttgtagagcgcagcttcgggggtgaaagggatgtccgccgcggtagaaaccataatggaaacgtttactcctcgatcgatggttctttttattgctttgttgatggaggaggtcggaacaaaataggggtttacgatgtgtacgttcttttgtgcggcatagatgcttacggcgtaggcgtgactcaacatacggttgctcttcttgggagtacggtcgacgatggcaaccactatgctgtcgttctctttgtggagagggaaataagccggtccgccgatgttttgtttggtttgtttgttccagattgccaggaaaatcttttgcagttcatctacggcatctccttcaatgcggatgtgcatgtctcgccatgtcccgattttcgggagtcctttaatgtagtagtcggctatattcatccctcctgtataggcaacctttccgtcgataacggctattttacgatgatcgcggtgcgctgcatggttgatgtagggaaatgtaaacggatcgaatttcaatatttcaattccttgctgacgtattttcttgagatgctttttcttgagcggacgattgttggaccaattgccgaaagcatcgaacatcgcgcgtacctccacaccctctttggctttttgggccagcaacttaaacagttcattggcgatagagtcatttcgaaagttgaaatattccagatgaatgtgatgccgggctccttcaatgacttcaaacagatcaacgaatttttcatgtccgctttttagcagcttgattttattgttattgctaataggaatgccggattgggacaggaaacgaagcgtcagagagtcgctggtcaaattgatagagtccctgcgaatcgccattaaactatcgataacatctgcccgactatgagataaggatagaactaaaaataaaacaaatgatagtatgcgtggcttcaaaacgtttctccttgctttggtttacaaaaatccaaagatacaacaactatagttaggcaccccttcaagaaagaaccgatttattatagtttaacactattacctgcttatgccgtgcttgtaagatgaaaagcttcggagaccgttgcgggattattcgccttataattatctctctctacatcgaccttgttctttcagaaacagtttttgaaaggagaatccctgtcgatgtcggggtgtatatatcgacaccgtgggaaagacgcatatttcgattagtttcccattggaggtgtgtcgtaatgcacgatgcacttccttttttgttcatcgctatacaaatcggttcattatctttaagctgcgatattttgaagatttctttgatttatgtgtttccagcacttaaataaagcggcagtaagctcataaaacagcctaattagccaatccatgccttcttttgtcatttttgcacacatcttttttatattgaaggcaatggccaggaaggaaaagtccataaagaccttgtcctttccaaaatgtctgaaacgtt

SEQ ID NO: 1289 - DNA, 18866 bp, synthetic construct
  source 1..18866: mol_type = other DNA
  misc_feature 1..18866: note = Synthetic
ttgtgttagctgaaatataccatacaaattatgaaaataacgcattgcacgaatgctgtcaggaagtatattgcctataaatgaactactgttgagggtaatatttgatgtgggtttaaatgtaatttgatggccaaaagcaggtgtattattgccattgattctgcttatattttgccagccgttcaacaataatagagccatataccatttttggttgggtgtagtatatgctacccttacaccactttcataatagggtgtattctccgccaaaatacttctggagagtgtccaacaatcttttccaatagcactttcaaaaccgatatgtgaagcaaaaataccggcatctgcccaaatatcctttttgcgggatagctttatgcctatattagcttcaaaaatatttttaaatactccattttctgttgaaagattggcattcatataagttcctgtagcaaaagcaagatttgcccttaccttattttcagtaatagcagcttttaaaaatccaagattcaaatttacctcattgtgttggttgtagctatataaaaaagcaggtctgttatggttaggcggatttacaaaatcataagcataatatacatccaaatagccactaagttgtagcttttgattcaatgaatcgttttgggcatgggcataacctgtaattatataaacggatagaaacataattttcttcatgtaccagttcattttacattcttgcatgcatagctgatgtatctctttaatggtttgtcaaggaatctaaagcaatgttaagcgccaatacattcacagattcgggtccaaaaattcctaacaagggtttatcggtatgctgccgcaccaatgattcaataatagttttaggaatatgtcttatttgggcaattctgtttacctgtatcatagcagattgcacagcaatatgaggatctaagccgctaccacttgcggtaaccaaatcagacggtatagccgatgctggaacaccgggatgatggacttggaatgaatcaacatgttgttgtaccgaaagcaaataatccggattattgggccctttattacttgcacctgctgctgctgctgcattataattaacagcagaaggtcttgaccaaaaatatttatcatctgaaaatttttgtccgatattccggtacattttttttccatgcaccatccatactgcagcctctcctttatcaggcgtaatctgagcaacgcaccatactaatgcagtatacattacagaaaaaagcagcaagcaaaccaatgttaaacgaatggcaggtaataaatagtatttcataaaatgtttatataaaatttgcaacaacaatatcaatgattttaatgcccacaaaaggaacaataattccccccagtccgtatatcagtaaattacgccgcagcagtgcgctagcaccaataggtttataggctacaccgcgcaatgccagtggaatgagcagcggtataataatggcattaaaaataactgcagaaagaatagcgctctgcgggctatgcaaatgcatgatattcattccctgtagggcaggtatataggtaatgaacaatgcgggcacaattgcaaagtattttgcaacgtcgtttgcaatactaaaggttgttaaagtgccgcgtgtcattaataattgttttccaatttcaactacttcaatcaattttgtagggtcattatcgagatctaccatattaccggcttctttggctgcctgtgttccactgttcatagctacccctacatctgcctgagccaatgccggtgcatcgttggtgccatctcccatcattgcaaccagccttcctgaagcctgttctatttttatataattcattttatcttccggctttgcttcagcaataaaatcatccacacctgctttttcagctataaacctggctgttaacggattatcgccggtaaccataactgttttaatacccatcttccgtaaacgctcaaacctttctttaatacctgttttaataatatcctgcaattctataacccccattactttctcattttcagcaaccaccaatggtgtaccacctttacttgaaatggattgaacagttgcatgtacatattcaggaaatgtatttcctgcattttcacaaatttttcggatagcatctgctgcaccttttctgatacgcatatcatctatatcaatacccgaacatctggtttctgcagtaaatggaatgaaacgtgggttgttgagttgcatcatcgcagtatctaatgcggctaattcaataatcgattttccttcgggcgtttgatcggaaaccgaactcattacaaccagtttcttaaaataatcggggtcaacatttgtggccggataaaattgagttgcttttctgtttccaatggtaatggtacctgttttatctaatagtaacacatcaatatcgccggcagtttctactgctttgccgcttttggtaattacattggctttcaatgcacgattcatccctgcaattcctattgctgataacaacccaccaatggtagtaggtatcaggcaaacaaataaggcaataaaagcggcaatggtaataggtgtatgcgcataatctgcaaatgattttaaagtaactgtaacaatgataaaaaccagtgtaaaacctgccaataaaatggttaatgcaatctcgttgggtgttttttggcgtgaagcaccttccactaaagcaatcattttatctaaaaaactttcgcccggttcactggttacctttactttaattgtatcgctaagcacttttgttccgcctgtaacgctgcttttatcgccacccgcttctctaattacaggtgcactttcaccggtaatagcactttcatcaatggttgccaggccttctactatttccccatcggcaggaataatatcatctgtttcacatataaaaatatcccctttttttaatttggaagccggaacaacaatcatttcattcacatacatttcgcctaccggcaatattaatttggcgggtgtgtcttcccttgttttccgcaaactgttggcttgtgctttaccccttgcctcggctatggcttcggcaaaattggcaaacagcaaagtaatgaacagtaataatgtaattaccaaattgtaagttaaacttccctgaccattcgctccgccggcaatccagatacatactcctcccattactacggttcctacccaaacggtaaacatgaccggatttaaaatcatggtagcaggatttaatttcaggaatgactgctttaatgcaccggccaataatgctttatttaaaaattgtttagatgcaatatgattcatttgaatatatttttaatgaaaggaaaaatattcagcaacaggccctaaagccaaagatggaaaaaatgataaagctgcaacaattataataacggccattaccattaagccgaaggtaaccgtatcggtttttaacgtaccggcactttcaggaatatattttttttgtgccagtaaaccggcaatagctaccggcccaatgatgggcaaatacctcgataacagcattacaatgccatccgaaatattccaccagggagtattggctccaagccctgcaaattcgctaccgttattggcactggcagaagtaaattcatataacatttcgctaaagccatgaaaacccggattagaaagccagcccgcatattcagcaggatgatgcgcatataaataagcagcaatggctgtacccgataatattaaaaatggatgaatcaaagcaataatcatcgctattttcatttcttttgcttcaatttttttacccatcagttcgggtgttctgcctaccattaatccactgataaatacagccagtatcatgaaaatataaaagtttaaaaagcctacgccaatacccccataaaaagcatttaccatcattcccaacatggtacacatgccggcaagcggcataaaactatcatgcatcgcatttacagaaccattactggttactgtggtaacaattccccaatacgctgatgcagcagcccccaaacgcacttctttgccttccatattgcccgaggtttgttctattcccatttttgcaatggcaggattccctgcagtttccattataatggtgggtgctaataataaaaagaaacccaccgtcattaccccaacaattagccaggctaattttttccgtttcagcatatagcccattgtaaatattaatgcaatgggtaataatgcaatggctatggtttcaaccatattggtgaaataattaggattttcaaatggatgagccgagttaggcccgaagaaacctcctccatttgttcccaactgtttaatggcaacaaatgctgctaccggccctctgcttacctgaactgtatcgccctgtaatgtagtaatggtatctttacccttaaacgtcatgggcataccgttcaataaaaacagaactgccattataaaagcaatgggtaataaaatccgggtacagcttcttacaaaaagaaagtaaaagttacccaaagaatggtttgcaccctctttcatagccttaaaaactacaacacatattgccattccgcaacctgcactgataaattgaaataacattaaaactaactgacccagataagacatacctgtttcaccggaataatgctgcagattggtatttgaaataaaacttacagcagtattaaaagccagatcggccgacatggagggattgtgatcagggtttagtggcaaatgcgccatattggttaaaaccaacatggccagaacaaaccagataaaattaatggtgagtaatacttttaaatgttgcttccaattcatttctattttcggatcaacgcctgatattcgataaatcagttgatcaattggattgaaaatgggatctaaccaggtggtttctcctgaaaataatttacccatatacctgcctaacggaatggctaacaataccgttatcataaacatggctatgatgccatacatttcagtattcatttgcattgtttaatttagtttagaatatcaatatgttcactgtaaaatgcagcacggtagtggtacagcttaacattcattacccaaaattgacagctcatctgctgtgttaaaatttttcaggatgaattaaaacatagcacatatatacaaatactataatcgctacaaaaaataataaaagcataagtttaaattttttcgaaccaatgaatcattacgttaaacaacagaaacgctaacagaccggtaattagtaaaagtaaaaacagcatgttggtattttttatgtttaaataatataagcagtttaagtggatgatacatcattccattctttaactgtgccaatatatttgcaaaacaagtgccagctaaaataaaatacatgaaaatccttactggaaatgaattataaaaataatatagtatatatatacaacaataaaccctttcaaaataaaagggttcacactatcattttaaaagggtatgccttatgcgcaacaccaaaataaaaataaaactattattcaactgaactcgttattttatactcttcaatttttctgtacaaagtagttagggcaatattaagtaagcgtgcagtttctgttttattaccccgggtatattgcagtactttttgtatgtgtgctttttcaacggcagccagctctaatgaagttgcaggcatattacccatttctaaatcgggtacctgataaaaatcaaccggtaaggaagtgggttctaatatattattttcagttaaaataacacttcgttcaataatatttttcagttcacggatatttcctttccatgtatgtttttgtaacaattgtatgtatgccggagcaatgccggttatttttttatttgttttttccgaaaaatattgtaaaaaatgattggctaataatgtaatatcgtcaatacgttcccgtaaggaaggcagttgtatttgaaatactgaaatacggtaaaacaaatcttcccgaaagcggccggcatttacttccttttttaagtcgcggttagttgccgcaattaatctaacatttaccctggtaacattgttatcgcccactttcagaaattcgcctgtttctattacacgcagtagttttgcctgcaaatcgaggggcatttcacctatttcatctaaaaaaatggtaccctcattggcttcttcaaaaatacctttagtatcttttatagcaccggtaaatgcaccggctttatgtccaaataattcattttccaataattctttactgaaggcggaacaattcactgcaataaaattaccgttctttctttttcctgcctgatgtatggcctgtgcaaaaacttctttaccggttcctgtttcgccggttaataaaacagtggcatctgtttgtgctacttttcgggcggcttcaatggctaattgaatactttttgaacaaccaagtatactgtttaatgcatatttattatctaactgtttttctaattgttgtaccctttttgccagtttcactttttcaagtgctctgtaaagcaatggaataattttataattatcatctccctttgttatataatcaaatgctccattttttatagcttgtacactatccggaatattgccataggctgtcatcaagataatttcaagcgcaggatacttttgtttgatatttttggccaaatcaacaccatgctcatcgggcaatttaacatcgcaaagtacaatatctatattttgctgttctaattttttaagcccggtttttccgtcgccggcctgtaatacatcaaatccttctaaactcaacatttttgccaacagtgttctgagttttacctcatcatctataattaaaatagtatttgccatgcgtaacaataaatgtaacttgaataaatgtaaaagcaattagtattataacccaaatgtaagtatgtaaataactacatcattttatttgtaccattcaaattttaaaatataattaataaattgaactattatttcttttatacctgagccataaaagcaatcattttttcagaagtgccactaattttacaactattttactgttgtaatatgcttaatgtcgtttatggctgttcgttgtatatacttttacactaaacacaaccaatttattgggaagcttatttttaacctactttcattttactatctataaaaagccccgcaataagcagggctttttagttatttaatgcagcaaaccttccggtatgggtttcttaattaaatatttgtaaatgaacttcgctttcagattttgaaaatcatcccatttagcaggcaaataaggccaaccatggcgcccaccgggatacaacatcatttcaaaaggcttcttggcatcttccaaagcactaattaattgtatgctgttttgcatatgtacattatcatccatagtaccatgtacaatttgcaacaggcctttataccgaccaatataactcaatacactactttttttataaccctccggattgctttccggtgtacccatatagcgttcagtataatgggtatcatacaggctccagtctaccacactgccaccggccataccataagtaaacacatccgatttgtaggttaatgcatagcacgtcatataccccccataactaaaccctgtaatagcaatacgggcagggtcggcaccggcattatgaataaaccatttggccatagtgctgtaatcttccatttcccaataccctaaatcatggtacatatagtttacacctgctttaccaaactggccactggcacggtggtcaaacgctacttgtattaacccctcctgtgccaatagttcgcggctggggctccagttccacctgtcccatacggtaccggcattaggccctccataaatactaatgagcatgggatatttcttcgttttatcataatgtgccggccaggtaaccaaagcgggcagttcaaataaaccatcagcacttttaatacgtataatttcagttttagcaatagcatacgcatccatgtcagggcctttggcattacccagttctttaactattttaccatttacatctaccaatgccatacgtgctggcgtttgtgtattactgtaggtggtaataaaatatttaccaccgggtgaaaaattgatagtatggttataattaccaaaagttaagcgttggggttgtccgccatcaaaactaattttatacaaatcggtacgggttgagttttcaataccacgtgctgtaaaataaatggtgcgattggcttcatcaatatactcaattccggtaacggtgaaatttccattagtaatagcatgttgcagggtaccatctatattgtataagtacagcatattccatccacttttatcgctctgggcaatataaccgctgccatcttttaaaaagttaatacggccgcctaccctgtcttccaaatcaatccaggttttttgtgtttcggtatataccggtttacgtgcccccgtttgtgtattaacttcataaataatcaggctgtcttgtttacggttcatccagggcaaccataaactattgttgctgctgcgccacatgggccagccaaaatattggtcgtctttttcattaaaattggcccaggtggtattgccaccatccggactaacaaatcccattttcacttccggatttttatcgcctgcttcgggataacgggtatattccaaataaccatgttgcccctcgctactgtaaataggaaacataggcaccatactttcatcaaacctggcataggcaatggttttgctatcggggctccaccaaaaagcccggtaatgggtggggcggccataaatttcttccaaatatacccaactggcatagccgtttaaggtagtagccgaaccatcaaaggttaattgtgtttctttttgtgcagcaatgttgtagctatataaattattgtttttggtataggctatataattgctatcgggcgagaaagtggggttgtgttcctgcgccgtatcgttggtaatgcgtgtaggcgttccgtttacaaacaaatacaagtcatggttcatttcggtaacagccttatcaggctttaactgtgcaggagcagtatacgataacatttttcccgagggaatatcaaataaaaatgtttgtgcatcttctcttttttcgccgcgttgcaacaacaatacctggttattgttcagccattctattacagaaggcagcggtttgtaaaagccgttgggcgcttttccggtaaccaattgcgccatacttatttctttttgctgggcataagtaaacaatgctgttaagcaacagcatgcaataatgccaaaaattttcctcatgtgtttgaattttgcatgaagataaatatcctcctccttttttacgataccattcaaaaaaaaattataaacgccagtattttcgggcttttttcgagatttgttcgacagttgttcgactccggcccatacaaatgcagcattgataagggttgtatcgaaccattgtcgaacatgtatcgaatttgtttcgaacaaggtagggagaaaggggttggaaatgggtggtgggtgatggtggttaggaggtggggattgaggagcatgtgactcccaactgtgaaaaggatgaataggcagtttaaatgtgtgtataaagggatttcgttagaaaaaatgagataatattttttttataaatacataaatttgattagtttagggggagaaaaaaaagccccacattgtaaggtgaggcgacttaaatgttttcacaacggaataatccttattgtgatttgctttcaaattaggtttcaaaaataaagaaataattgcaacatgaaaaaaacaattttagggctggatttaggcaccaattcaataggttgggcgttgatagaacaggattttgaaaacaaacaaggaaacatattgggaatggggagtcgaataattcccatgagtcaggatatgatgaatgactttggtaaaggaacttctatctctcaaactgctgaaagaacgtattatagaagtataaggcgcttacgtgagcgacatttattaagaagagagcgactgcacagagtattaaatattttaggctttttacctgaacattatagcaaacaaattgactttgaaaaaaatttggggcaatttcttgaagaaaccgaacccaaaatagcatacaataataaagacttcattttcaaaaaatcattcgaagaaatgttggaagattttcgcatgaaccaaccagaacttttaaatagaaaaaataaaaaaggtaaggatgctaagataccctatgactggaccatttattacttacgtaaaaaaggattaacacaaaaattacaaaaagaagagttggcttggcttttgttaaatttcaatcaaaagcgaggatattaccaattaagaggtgaagatgatgaagatgatacaagatcagctcaaacaagaacttattttgacacacagataatttcgggaataatagatacaggagctatttataaagggcttaaagttattttaataaaactttcaaatggagattctggtaaatatttctcaaaagaaattccaaattggattggaatagaaaaaaatattattgcaacgattgaattagataaagacgggaacgataaatatgaagatgatggaactttgaaaagaaaattttctattccaacagaagaagattgggagaaaaaatggaaactaataaaaatcaaaacagagagagaaattaaagattctaataaaactgttggtacatacatttacgatacattacttcaaaaacctaatcaaaaaattagaggaaaattagttcgtactatcgaacgtaagttttacaaagaagaattaaaagccattttagaaaagcaaattgctttacaacctgaattgtttactaatgaattatataatgcttgcgttcgcgagttatacagaagcaacgaagcgcaccaactacaactcagtaaaagagattttgtgcatttatttttagatgatattattttctatcagcgtccgttgcgtagtcaaaaatcaagtattggtaattgctctttggagtatagacaatacaaccaaaaagatgaaaccgggaaagagattgaagtgaaagaatatttaaaatgtgttccaaaatctaatccatattatcaagaatttagagtttggcagtggctgtacaacttaaaaatttacacaaaaaaagaagataaagatgtaacacatgaatttctgaagtcaaatgaagataaggaaaatttatttgagtttttaatgagtaaaaaagaggttaatcaaaaagacattctaaaacatttcttcaaagacttaaagggcaaagtacaaacagctgaaattgccaaataccgttggaattatgtatatgatttgggaaaagacgaatcaaaaccctatccaatgaatgaaacaggttatgaaatccgtaaacgattaaaagaagttgcaaatattccagctaattttctaacaagagaaattgaacaacaactttggcacatcatttattctgtaacggataaaaatgagtttgaaacagcactgaaaacttttgcaagaaaatatcagttagatgtaaactctttcgcagaaaacttcagtaagtttccgcgattcaaaagcgattatggctcatattctgaaaaggctatcaaaaaattattgcctttaatgcgaattggcaaacactggaaatgggaaaatattgatattaaaactcaggcacgaattgacaaacttctaactggcgagtttgatgaaaacattaaagatagggtaagagaaaaaataaataaagagaatttagataataaagaagattatcaagggttgcctttgtggttggctcaatatgtggtttataaccgacattcggaggctgccgatattgggaaatggaattcagttgaagatttaaaaacgtatttaaaagagtttaaacaacattacttaagaaacccaattgtagaacaagttataaccgaaacgctgcgtgttgtaaaagacatttgggaaaaatatggtgatggaacgaaagatttctttaacgaaattcatattgagttaggcagagaaatgaaaaacaccacagaagaccgggctaaaattacagaacaggtttccaaaaatgaaaatacaaatttgagaataaagacattgttaatggaatttgcaaaggatgattcttttaaaaatcaaattgattattcaaactattgtaaagaagaaaaaaatcttacttcttatcagaaaggaaataatcctgtaagaccctattctcaaacacaacacgatattttgaaaatttatgaagaatatgctctaaatgaccatactgaagaatatctaaaaaatgaaaaaacaggattaaccgaaacaaaagatggaaaatctaaagaaataacgatttatgatatttctcaaaaatcacaaccaacaaaatcccaaatcgaaaaatataaattatggcttgaacaaaaatatcggtcgccctatacaggcgaaataattcccttgagtaaactgttcacacctgcttatgaaattgaacatattattccacaaagccgatattttgatgatagtttaagcaataaagtaatctgcgaagaagccgtaaataagctaaaagataacaaacttggtttggaatttattaaaaacccagtattacaaacggtagaaattggtttggggaaaacagtaaatatttttaccgaaaaacaatatcgggaatttgtagaagaacattattctaaaaacaaagtcaaacgcaacaaattattgttagaagaaattcccgataaaatgattgcccgtcaaatgaatgacacgcgatacatcagcaagtttgtttctgcagttctatcaaatattgttcgtgctgataaagacgatgacggagtaaattcaaaaaacattgttccgggcaatggaaaaattaccgatcgtttaaaacaagattggggattaaacgatgtttggaatgaattgattttaccacgttttgagcgaatgaataaattgaccaattcggaagcttttacagcaaaaaacaaagaaggacacaccatacctgctattccgtttgaactttcaaaaggctttcaaaagaaacgcattgaccaccgccaccatgcaatggacgcattagtaattgcttgtgctacaagagaccatgtgaatttgctaaataatcaatctgcaaaatcagataattctagatttgatttacaacacaaactccaaaatactgaaaaatggatagacaaaaatggaaaagaaagagataaattcacggaatttaaaaagccatggcaaaactttacaattgatgccaaaaacgagttagaaaaagttgttgtgagctttaaacaaaacttgcgtgttatcaataaatcgacaaacacttaccaaaaatttgaaaacgagaaaaaagtcgaaaagaagcaagaacgtgtgcattgggcagttaagaagccaatgcacgaagaaacaatttcaggaattgttaagttatcttggttaaaagttagtgaaggagaatttacaacagcaacaagaaaaacattggataaaagttttaataaagaaaaaatcaaaaagattactgatactggtattcaaaaaattcttctcaactacttaagagaaaaaggaaacgatcctgaattagcattatcgcctgaaggaatagaggagttgaataaaaatatttctcaatacaataatggtaaatttcatcacccaatatttaaagtgcgaatttacgaaaaaggaaaaggaagatttgtattaggagaaaaaggcaataaaaagagtaagtatgtgcaaggttctccaaatttatattttgctgtttaccaagaagaaaatggcaaaagaaattttaaatccattcctttaaatatcgttattgaacgtcaaaaacaaggattgagttcagttccggagacgaatgaaaaaggagaaaaattgtgtcaggaatgcccttatctctcgcccaacgatttggtatatgtgccaaccacagatgaattagaaaacaacacaaaaattgattttaaaaatttaaccaatgagcaaaggaagagaatttataatgtaaatgatttttcttcaacctgttactttttcccaaatacaattgcaaaacctatcgcacccaaagaaatagatttgcgttatgatgaaaaggagaataaaccaacaggttcttttgatactaaaactgcaagtttagatggaatgcaaattaaagatgtttgtatcaaattacaagtggatcgcttaggtaacatatctaaagtataaatcagtatgcacaaaagaatcatttatatagaaaaactcttctagttcaaatcctctaataaataattgatgccaatccatgcctatatcaaagaaatggagaattcataaaataaaatcgtattactaaacattctataatttcatacaaactaatataagataaaatattcatttaaaaaaatattatttagtaattcaaaaaacaattaatgaatttttgtaattgaagattgattgaagcatacaattattcctcatttcaagttaaagtttttccaattatttaacaatattttcctaatcatgtcaccacttcttcccggtcgatattatcatatttacaaccatgccaatggtgatgataaccttttccgggaagcagaaaattatcgtttcttcctgcaacaatactataaacatatagatgctgtagcagatactttagcctggtgcttaatgccgaatcattttcatctactggttaaaataaaaaacgaagaagcgctgctgcaaacttttccaaagttcgaaactttggaaaagttgctgtcgaagaaattctccaacctcttcagcagctatacgcaggcttttaataaagtttaccaacgcaggggttcgctttttattaaaaactttaaaagaaaggaaattacctctgcgcaatatttacaaacccttgttttatacattcatctcaacccggttaaacacagttttacaaaagaaacaactgagtggccctggagctcttaccactatgttcatgctcattttgaagagcttcccttcttccgggaaatcttcgaaaataaaaatagcttcctcgcacaacatacccttaaacttgaacgttttattgaatatatcgcattggaggaatcgctcacccggtaaatcataccagcatgctcaaacacaccctttgcatagaaaacccctgccatttaaaatgcagtaatgcgcaattggtggtaagttaagtataataaaggaatgaagtacaattaccgtgaaaaattataaatacattatacaattttcacggttcatagttttagcttttaataatcaatatttacaaccatttaggggtttgttgcagttatttattcaatgaccaaattattggttagaaggattattctaaaataattcaatttttaactacacttataatttttcaagatttaagctgctaaacacaagcaccatatatacataccggaaaggattcatttttttgttcctcaattacatttttaggcataacccatttcattacttttttattaccgtgaaaaattataaatttgttgtacaattttcacggtaaagatgattcaacggaatattataaaaacactacaaaagcagatgaaacagtttcctgccgtagctataataggtgcgcggcagataggcaaatcaactattgccaggcagattgcagataaaaaaaaatctactacagtttattttgacttagaaaaaccatctgacaggcgtaaactggaagatgctgaaaccatgctggccggattaaaagataaactggtgattattgacgaagtccaaacgatgcccgaattatttgccatattacgcccattaattgatgaataccgaaaacccggacgttttatgctattgggctcggtttcaccttttttagtaagaggcatttctgaaagtttggccggtagaattgcccatatagaactacccaccattaacttaatggaagccaataaagccaaaattgcacaggataaaatatgattcagaggcggctatcctgaagcacttaccttaagaaccaatgcacaatggtatgcatgggccgaaaattactactgcacttttgtggagcgtgatgtaaattttttaatgaatgaaaatctatcaccggctactgttcgaaatctatggaccatgttaagcgcaattagtggcaatattgtaaactacgaaaatatttcacgttcattaggcattagtagagccactacgctaaaatatctggattttatggaaggagcttttttaatcagacgtttacagccatggtttatcaacactactaaacggatcgtaaaatcgcctaaaatctattttcgtgatagcggcttattgcattacatgaaccgcatacaaacaactgatgaattagccggccacattgtttcaggtgcctcatgggaaggttttgttattgaacaaatacatcaactggtaccatctcatttatctgtatattactatcgcacacatcatggtgcagaatcagatgtagtattggttaacggaaatatacccgtagcctgtgttgaaataaaacgtaataatgcaccggaaatttcaaaaggctttttaaattgtattgcagatttgaatacacaaaaaaattttattgtaacacctggaagtgataactatacaaacaatcatattcaaatctgttcactacatacttttttaaccaaatatatcacacatatctaatgcttaaacgcaccctctgcatagagaacccctgccacctaaaatgcaataacgaacaattggtgcttagctatgcccacataaaagggttggaagaccggcaggataaaacggtacccattgaagatataggcgtactggtattagagcatccgcaaattaccattacccattttttgttagaccaactgattaccaacaatattgcggtaataacctgcaacagtacccaccaccccagcggcatgctgctgcctttagagagccataccctgcaaagtgagcgttttaaggagcaattagccgccagtgaacccctaaaaaaacaattgtggcagcaaaccgtaaaagcaaagattaataaccaggcggctgttttaaaaaaatggaacataccccatggctatttaaacaatgcccggcaaaatgtaaaaagtggcgatgccgataatgccgaagccaaggcagcggcctattattgggcgcatttgtttccggatgcctggcagttttttagaaaacgggatgggccaccccccaataatttattgaattatggttatgccattattcgggctgctatggcccgtgccattgcaggagcgggtttattacccacactgggcatttttcaccgcaaccgttacaatgcctattgtttagccgatgatatgatggaaccctaccgcccatttatagatgccattgtacgcaacattattcacgaaacatcggcagtagaagtattaacacaacccataaaagtgcaactgctgaatgtgttaacccatgatacacggatagaagaacaaaccagccccttatgggtagccatgcaaaaaacagctttctctttaagcaaatgttatagcggcgagcaacgaaaattggattttcctgaactaccattaacataagcccatacaaataaatattactttttatttgttacccataataatataatgccttactacgttttaatgatggcaaatgaacatttgccggttattgatgacagactgttccctttatgcccaggcacaataacacatccgaacgtttcaatgcctatcgtattatgtggataatggtatttttcgatttacctaccgaaaccaaaacagagcgaaaaacggcacaagaattcaggaagaaaattatggccgatggctttgtaatgtttcaattttccatatacctgcggcattgccccagcatggaaaacgccgccgtgcatataaagcgggttaaaaaaatattacctgaaaaagggcatgtgggcattatgaccattaccgacaaacaatttgggatgatggagctatttcagggtaaaaaagaagcgccggcacaacccataccccagcaattagagttattttaatgcaatataacaaaaatagaaaagtaaaaaggctgccctgccaactgcaggcacagccatttcaatcatttttttctttctattttctttgaaaacccttacagtcattgtattacagcatttactgttgttatcaaagatctgataaaaagaatttgaaagcaaatcacaacacccccatcccgcattgtttcagcgccgaagttgttatcaaagatctgataaaaagaatttgaaagcaaatcacaacgtcgtgatctaaacagaaaagttactattagttgttatcaaagatctgataaaaagaatttgaaagcaaatcacaacagacctttatggctcccgtataattacctgttgttatcaaagatctgataaaaagaatttgaaagcaaatcacaactgaaatccgtagccaaactttttatccgggttgttatcatc

SEQ ID NO: 1290 - DNA, 18773 bp, synthetic construct
  misc_feature 1..18773: note = Synthetic
  source 1..18773: mol_type = other DNA
ggctttcgccaggatgtcggccttgaaggcttcgtccttgagcgaggaggcgttgatcttgacgttgaggtgggcacccatgacggccgagcgggctgcgagcgagccgacaccgccgtcggtgaccgagttgggattaccccactccaccatggcgcggcagacctcgaaagcctcgaggctcttctgcatggtgcggaagggtacctgggtggcatacttggtggcttcctggatggcggcgctgcgggcagccttctcctcatcggtcttcttgggcagaccgaaggcgttcataatgcggttgaaagcctcagtgtcttcatccaccagatgaagcagttcgtccttcagcatctgccccttgacggcaacatccgagaacttctcccactcgtcgtcgtaggcagccttgccacccgtgaggttggcaaccatggtgcccaacgaggcagcaagggctcccatataggcactcacactgccaccgccgggggcggggctctccgaggccgtctcgtcacagaaaccacggcaggtcaggtccacaagcttcttcttcgaatggtcctcgatgaggtattcgataaccttctccttcgggtcgaagggcttcaggtcgtcaagacccatgctcttgatggccaccttcatgatctcctcctcgctgacgccgaggctgcgctgctgcttggcaaggtagtacttgccggcgtcgatgagcacactcttcgggatgagacccacgatctcacagccggtgacgcgcaggcctcggttggcggcacaacggcacacctcgtcaaagcacttgtgcaccggagccaccttgatggaggtgatgttcatgctcacctgcgcgatgccgtagtcctcgatataccagccgatggctttggtgcccttcagcgtgccggggatcatgatggtcttgccgttctcgtccttcatgggcttgccgctgggcttgccaccctcacgctgcggacggcccttctcacgcacgtcgaaagcaatggcgttggcacgacgcgtgctcgtagtgttcaggttgtagttgatggccacgaggaagtcgcgggctcccacctgggtggcgccggtatgggcggtgtggtcgttccaggcgttggggccgaagtcgggcttccactgctccgtgccgaggcggctcgagaggctctcgtattcgccggtgcggcagtaggccaggttgcgacgctcagggatgaaggcggcattctcgtagcagtagatggggatctgcagctcctcgccaagacgcttgcccaacttgtgggcatactccaccacctcgtccatcgtgatattgctcacggggatgagagggcacacgtccgtggcgccctgacgcgggtgggcaccgtggtgctggctcatgtcgatgagctccgcggctttcttcaccacctggtaggcggcctcgagcacaggctccggctcacccacgaaggtgatgaccgttcgattcgtcgtctgacccgggtcaacgtctaggagcttcacaccttccaccttctcgatctcggcggtcacctgattgatgatatccatattgcggccttcactgatattaggcacgcattcaataagttgcttcatatttttatgttttttattttgtacaaaaatacaaaaaaaaatccatccaaccactcccccatgcaaaaatgtttttcccatatttatgaacacccgcgccccaccgcgcagcgaaagaccaatccatcgcacgcagtcgcgacaccatagaaaagatttccggagttccggaagtcgagcgcagagccaagcatgcttgagctatgccaagatgaaggaacgtagacgaagtcaggatttccgagcgccgcgaagggagataataacgtgagagaaaaattggatctatggattacagcccgcagggctgggagaaaaaaaacgcaggcggggagataaaaaaacgcaggcgagataagaaaaatcccgcgcagcggaaaaaaaaagccgcccccggaggggcggcaaaatgctaggggactatcccctgtaccattagatcacacgggtgaagatgtgggactgaccctcggcagtgaccgtggcctggttgccgttgacggtgaacgtactcgtctgcggaccatcctcatcatcctggatggtgagagtaccctgaccgctggtgagcgtaccgctgtaggtgtaggtaccgttcgactgctcgctgtcgccctcactgtcggaatacacaaagaggcaattcgttttgccgaagctgacgctcaatgtgacatatattcccatctcctggaagctgcactgccacgaggtgccgttcagcggatagtcgccactgggacgcgggttgccgttgctgccggcaagggttagcgtcacggtaccggagggcgtgttttcacatgtcatcgtactgccgctgacggtgatggggatggtatacgccgtgccgtttacggtcaggttgatgacaccgctgccctcgttgtagtcgtaggtcccttggtaattctcggtgccgtggggcgtctgaacagtgaccgcgacatcggtggcggtggaaaagctgacagtgatattggcctctccgtcgttgaaggtccaccgggtacccaccaacgatttctgggtgtcgatgttgttgtcgtccttgtcgcatgcagcaaggccgaacagcatggctgctatgaagcacacttgaagtaatcttttcataattgttcgtttttaagggtttttgtcactgcaaaagtacacaattatttccatatatgcaaatcccctccctacccttttcgcaggacgaagccaaatcgccctgactgccaacgacatatacatcaaaaaaaattgtatcttcgcacctgcaaaagcagcattcaacaaaacaacgaaccattttcaacatcaagaaaatcaacacctgcatcctgctaaccaccctgctggaacaggtgcctgtcccctgtcccactacttacctcgcttccgtcagatcatcgcgctcaaggtaagtctttttttttaccgatgcaaaaaaaaattcccataattcagaattattctttatctttgcacaaaagaagttgaatgaaggtaacgtttgaagatgctgaattagagaatcttgtgcttaatcacaaaagcaaaaagtacaagaaataccagcgagatggcaagtttctcgacgcgctcgaccgtgtatacttcaccatgcagtcgcaaaaaacggcctccgacttgaaacaatacagttacctccattatgagcaattgaagcatgtgggtatgagttccgtaagggtgattaatggccgggtagagcggctgttgttccacgagttggaagatggaattgaaatatcattaatcgaaatagatgaaacgcattatggacaacgatagaatcacagggttccgtgcagtacatccgggcgagatcctcaacgaggagttgaaagagcgcggaatcaagcagaaagagctcgccgcaaagattggcatcctacccagtcacctcaacgagttgatcaaggggaagcgcagtttcaccgtagcccttgcaatggctttggaaaaagagctggggataccgtatgattcgtggatgcagatgcagtacggctacgagcacgactgtctggtgatagcacaacgggaggtggaggaacagcagcgtacgcgccgcgagagcatccttcctcgtgtggctgctgtgctctgatccgaccatcacgcttttcgagaaatcacatagagattataacgatactcctccgcagaattatggtgcctgcggaggttttctgttgaaatgcgggggaattcaagattgttgttgggcggaatagttacgcaatatgtaaaaaaaaattgggttattcactgcatctacttatttcataggaactcagttgcctcatcaagttcggcaggcataccatcccttcggggtttatgaaaaacctttatcgccggtcacatattattgtgggacaggtgcctgcttcctgttctccaatactgtacttgtctcatcataaaaaggcgacggcaacctgttcgattgccgcccccatgttagttttcacaacggaataatccttattgtgaattgcttaaaaagtgctgcaaaaatacaatcttttttcaaaatggcaaaaaatattttattatctactgaaaaaaacttatctttgcaccattgaaaaaactattaattatggcaagaatactaggacttgacctcggcaccaacagcatcggatgggctgttattgacaatgaaaagaaagaaatcgttgcttccgattctcgcatcatccccatggatgcaggtcgtatgggtgacttcgaagcgggaaataccatatctcagacagctgaccggacaaaggctcgtggcgcccgtcgtctctacgaacgtttttatttgcgtcgtcaacgcctgctacgcgtattaaaaatcataggatatttgcccgaacattatgcttccactctagaccgctatggcaacctgcccaagggagcggagcctaaactcgcatggcgagagggcaaagatggcaacccagaatttctcttcaaaccttcattcgacgagatggtggccgattttcgtcgtgaaggatatgatgggaaaataccttatgactggactatctactatttgcgccaaaaaggtctctcggcaccactatccaaagaggaacttgcatgggttttgatgcaattcaaccaaaaaaggggctattaccaactacgtggaaagaccgatgaagaagactcctcttcaacagaaaaaggggaagggaaagagtaccatgagttgcttgtggtgaaagtggagaatactggtgagaaagacaaaaaaggcagaatcaaatacaatattctcttcgagaacggatggctgtggaaaagagcctctaacttagcacctgattgggaggggaaaaagcgccctattatcgcaacattcaaactcgacaaggatggaaatcgcaaagaagagcagccatcatccttcagttcgcccgacgagaaaagctggggtctacgcaaaataaaaacgcagcacgatattgaccaaacaaacttgaccgtaggcgaatacatctaccatctcctattacacaatcccaaacaaaagattatcggcgaagcagtacgcacaatcgaccgttcctactaccacaacgagctgatagctattctaaagaaacagaccgaatatcaccccgaacttaaagaccgcacactctacaagcaatgcatccaggaactttattcaagcaacgaggcctaccggaatagtattgcggtacgtgatttcatctatttgctagtcgacgacattcttttctaccagcgtccattgaagagcaaaaagaatctaatctcggactgtccatatgaatgttatgaatatttagaccacaagaccaacacaaccaagagtgtccccatcaaatgcatcgccaaatctcatcctctgttccaggagttccggctgtggcagttcctgtcaaacctgagaatattcaaggacgaccaaaacatcactacacaattgctggccaacgacgatgattatgccaatctctacgactatctcttaaccatcaaagaagttgacgaaacgacactgctccggcatttcaacattgagaagaaagaattgtcacgctaccgctggaattacgttcacgacaagaaatacccaatgggcgaaacccatgctattctaatgggtggcctcaagaaagccaacatcgacccacacttcctcacctctgagaatgaagaaaccttgtggcacatactctattcaatcgatgacccaaaacaatacaaggaagcactacacacatttgcacgcaaacagggcttgactgaagagcagcgtgatgaattcgtgcagtcattccaacgactgacaatttacaagggaaaagaatacggatcctattcggccaaagccaccaaacgcctactctcagtgatgcgacgaggccggtattggagtgtcaatgcaattgatgaggagaccaagcagcatattgaacacctgatttcaggagaggtcgacaatgtccttaccaacagggtacgtgaagccctatcattcatttcctcaattgatcattgcaaaggtctagctccatggcaagcctgctacctcgtctatggtcgccattctgaagccgccgatgcccaacgatggaccagtccagaagaaattgaccgttacctggaaagattccatcatcactcgctcaacaatcccgtagtcaagcaagtaattactgaaagcttgcgtaccgttcgtgatatttggcagcaatatggccgccccgatgaaatacatattgagctagggcgcgagctgaagaaaacagccgctgaacgcgagcgtttatctcaaactattgccgaaggagaagcctccaaccaacgcatccgtctactgctgtccgagttaaagaatcccgatttcggagtcgagaacgtccgtccaaactcaccctcgcaacaggaactactgaagatatatgaagaaggggtcttcagtcaaccaaaagacataatattcgaggatgaaaacgaacaaaaagaaatagaaaatatccgtttgagattcaccgctcccaagaaccaaccaacccacaccgaagtattgcgatacaagctttggctcgaccaaaaataccgctctccatataccggacacatcatcccccttggaaaacttttcacagaagcatatcagatagaacacgtcatccctcaaagtcgctggttcgacgattccctctccaacaaagtaatctgcgaatccgaagtcaatcaactcaaagatcgcttactcggacacgaattcatcgttcaacaccatggtgaaacggtttccttatcgttgggtggacaagttgagattctatccgttggcgattacgaaaaactggtcaaagaaacttttgcttccaaccgacacaagagagagaaacttttgcttgatgaaatccccgatagcttcacctcacgacagatgaacgacagtcgctacatcagtcgcttgatgatgcacttgctctccaacattgtgcgcacagaagacgaagaaaaccatatcgaagacactgtcatatcaaaaaacgtcatagcgctcaatggaagtatcaccgaccgtctaaaacacgactggggcgtcaacgacacttggaatcgcgtcatccttcctcgctttcagcgcttaaacgagattactagcacaacaaattacacagccgtcaccaacggtcatcttatcccgcaaatgccactcgaactgcgacaaggtttcaacaagaaacgcatcgaccaccgccaccacgcaatggatgccattgtgatagcttgttgcacacgcgaccatgtcaacctgctcaacaacgaatccgccaagagcaacatcaggtacgacctcaaccacaaattgcgtcgcattgatacctacaccggaaacgacggccaacagcacgaaactttctgcgaattcattgccccatggccaacgttcgccaccgacctctatgatactttgcaaaacatggtggtcagttttaaacagaacctacgggtcatcaataaaacatccaatcgttactttattttcaaggatagcagacgaattctcgtcaaacaagagaaaggtgatagttgggccattcgcaagccaatgcacaaggaaaccgtttttggcgaagtaaaccttcaattaaaacggcctgtcaaactaaaagaggccatactgaatccatctgccatagtcgaccgcgaattgcgtgctaaaataaaagagaagctatcacttcattacagtgcagaagatctcatctcatttttcgagaagaacaccgacacctggccagaagtgaagaatggcaaagtagaagtatactactataccaaggaagacgttgatgccaatgggcagcccaaagttcgttactttgccactcgcaaagcgctcatcgatgttgttggaggatgtgtcactatagccgatgccgaaaaagccattaagagcatcaccgacagcggcattcaatccattctccgagcccatctcgctgctgaaggaggcaacccaattgaagcattctccgccgatggattggaacggatgaaccaaaacattcgccaactcaatggtggccgttaccaccaacccatcaaacgtgtccgcaaatacgaatcttctgccaaaaagcgtagcataagtgacaagggacagaaagcaactaaatatgttgaagctgctgaagggacaaacctcttcttcgttatttacactgattccaaaggaaatcgaggatatgtcacaccacctctctttgatatcatccgcctgcaaaaaatctatgagaaacagtggaaacaacacattgctgaattagattcagtaccctccaatgcaaaaatattgtacattctctctcctggcgaccttgtctatgttcccgcagatggcgaacagcccacagtcgacaccttggaccgtagcagaatttacaaggtagtctcatgtgacgatgtctacatcagctgtattccccatagttcagcccaaccaatcctgaacaaagtggaatacgaatccctcaacaagatgaaaaccaccctcgataagcaacagatgatacgcgagttctgtatccctatccaagtcgaccgtctcggaaacatcatcaaaataggatagcaccatgatcaaacgcaccctctgcttctctcatcctgcctatctatctctacgcaatgggcagctggtcgtcaaattggagaaacacgacgacgagccagaaaagcaggccacgatacccatcgaggacatcggcgtcgtggtgctcgaccaccgacagataacactcactcacggcgtgatggcggccctactcgacaacaacgccgcagttgtcacctgcgacaattctcatatgcccgtagggcttatgttaccgctggagggacacactgtacagcaggagcgattccaagaccaactaggatcttccctgcccttgcgcaaacagttgtggcaacagacggtacaacaaaagatcttgaaccaggccgccttgcttcgcgaattacatgacactgagacaggcaatatgcgtcaatgggcaaaagaagtactatcaggcgatagcaccaacctcgaagggcgcgccgccgccttctattggagccgaatgttcccttctattcccaacttcacacgcagccgagacggtgtatatcccaatgctctgctcaactacggatatgccatactgcgtgccgtgattgcacgtgccctcgtgggcagcggcctcctccccacccttggcatacaccaccacaacagatacaacgcctactgcctggccgacgacatcatggagccctatcgaccctacgttgaccgtttggtggtggagacaatggctgtgtgcagcgatgtggaggtaaccacagccatcaaaagccgactgctcaccattcccacccttgaggtgcgtatcgctggacagcgtagccccttgatggtcgccgccagccagacaacagcctcattagctcgatgcttctcgggcgaaaaccgtcgggtcgtataccccgaattgtaaaatggaccgcttcagcgaataccgcatcatgtggctgcttgtattcttcgacctacctaccgacaccaagaaagaacgcaaagcagctgccgatttccgcaaaaaactactgggcgacggattcaccatgttccagttctccatctacgtacgtcattgcgccagccgcgagaacgccgacgtccatctcaaaagagtgaagtccagcctgccggaatatggccaggtaggatgcctaaccatcacagacaaacagttttccgaaatagaacttttcgtcagcaaaaaagaagtagtgcctaacgcaccaggacaacagttggaacttttctagaaatacaaaaacaagcacaacaaacaaaaatcccgcccaaatgagcgggatttttttagcctttgacagctaatagaacattgattatcattgaattactgacatcgtgatgtcaaagagctaatatcaatgtttacttttcaagcaattcacaacggcgggcgggtttgggcgcgccccttgcggatgtcaaagagctaatatcaatgtttacttttcaagcaattcacaactgaggccggagagtttttcggtgaacacctgatgtcaaagagctaatatcaatgtttacttttcaagcaattcacaacaggaaagacgtgtagcctgtgaatatcgtgatgtcaaagagctaatatcaatgtttacttttcaagcaattcacaacttgtcgatgcaccacagcaccgactcaagcgatgtcaaagagctaatatcaatgtttacttttcaagcaattcacaacctctccgtggccgacgtggtgtccgccacagatgtcaaagagctaatatcaatgcttacttttcaagcaattcacaacagtttggcgagggaatgccttacgaccagagatgtcaaagagctaatatcaatgtttacttttcaagcaattcacaacacagacaccgtcaaggtcttgccggcggtgatgtcaaagagctaatatcaatgtttacttttcaagcaattcacaacagtcagtttttctttattttctgccacaatgatgtcaaagagctaatatcaatgtttacttttcaagcaattcacaactctcctcgtactacgtctgttacttcatctgatgtcaaagagctaatatcaatgtttacttttcaagcaattcacaactgtagtgccggatggcaaggacagtcgttgatgtcaaagagctaatatcaatgtttacttttcaagcaattcacaactccgcccgcaaaaacgaaaaaacccttaaagatgtcaaagagctaatatcaatgtttacttttcaagcaattcacaacacaacgtacatcactcacataagcgactgcaaaaatacgaactttctctggattaatcagatttatttttttccgcacgcgaggaaacaagaaaaaaaagaccagatggccaccagagaaaggatttcttcctttatgtttttgtttcaataaggatcgcacctctgtctcgtcaaagtcaacaggctctgttgttcggttgttgttcgattgttgttcgattgttgttcgattaatgatcgaacaacaatcgaacaacaaacatgcatcaatggtatatcacggccataagacagccatctgcgctggcgccgaccgttttctcccagccctgcgggctgtaatccatagatccaatttttctctcacgttattatctcccctcgcggcgctcggagatcctgacttcgtctacgttccttcatcttggcatagctcaagcttgcttggttctgcgctcgactttcggaactccggaaatcttttattaggtatcgcgactccgtgcgatggattggtattaattttttgcagatttgatttttttcttatctttgcagaatagaatgaagcgaataaggatatattatatatatattatctcattgataatgaacctgctgcctgtgctgtcgcaggggcaggatatcgtgtacgagggggtgcgcaggacggcatgcctgacggactccatacacatacgtgtgggcctcgccgcctgcagcgaggtgcaggtgatgaaccgctacacggcgatctcgcaccccgaggtggctttcctgcccgacggcaaggagtgcaacggaagctgctcgtaccagtcgcccatcaccttctccggcttcgcggcgagcgacacgatacggtcggtgcagaacatcaagtatgtgcgcctcaatatcgagcattcgtggatgggcgatatcttcatcggcctcacctgccccaacgggcagcgcacgtcgctgatgaagtacagcaacaacggcacctcgagctgcacacaatccatccccgcacagatgaaggggtggtcgggcacgagccatgtgcccacgagcacgcacctcggcggcgcctacgactacgaggcatattcggaatattgcgaccccaacgcgtcgggcaacgaacccggcacggggtggaactactgctggagcgagaacaccaccagcggatatacctaccgcggatatatctacgcctcgggcaacaacagctacggcaacaccatcgactcgtcgaatgtggcgcagggacgcaagttctaccaccccgacgggggcttcgaggccctggtgggatgccccgtgaacggcgactggtacatcgaggtgatggacggatggagcgtggacaacggctacgccttcgactgggagctgaacctcgatccctcgttcataccgcgtgccggtgtgatgaccgccaacagcgtcaccgccgaccccgcgacgggcggcgtggtgacgcaggtcgacgactcgacgtacctggtgtcggcgcctgccgacgccgtgggcgacaccaacgtgcgcttcacggtgcacatcgtgggtacgggacacaccatcgacaccaccgtcagcatcctcttcagcagcgaccactaccgcctgatccagcagaccctctgcgcgggcgacagcctcgtcattgacgacacgctggtggtgcgcgagacgacgcaccgcctggacactgtggcgataggctccggctgcatcgacgtgcgcgagatcgacgtcaccgtggcgcccgtctacgacctctacgacaccatggtgctctgtcccacggacaccttcgcctataacaacatcgactacacaggccccggcgactacgtggtgtacggcctcagcagtgtcggctgcgacagcacgatgcacctcaacgtcaccgatgccgacaccctcttcgcccctgtgctgctggtcagcgacgacggcgagacgtggtggagcgacaccctgctggcgggctgccgtccctaccgtgtgatggtgcgcgacacctcgcagcaggaggcttcgcggcgctggttcttcggcgacggcggcagcgccacggacacgctgctcacgcacacctacgacagcgcgggacactacgacatcaccctcacggctgtgagccttcacggctgccacgacaccgtggtgctgcacgacgcggtgtacgtctacgagctgccacgcccctccttctggtgggctcccgtgaaacccacgatgtcgcaccccgcggtgcagttctacaacgagagcgagccctacgactcgctgaccttccgctgggagatagccaccgccgacggcacggacaccgcggaggacgccacaccctactactcgtggcagtcgggcggcgctgtgtcgggcgacttcctggtggtcctcaacgccctgcaggcctatgtgacgcccacgggcgacacgctggtgtgcagcgacaccgtgcagcacaccatagagatcgtcaacgactggctgcagttccccaacctggtgacgcccaatggcgacggcaccagcgacatctggaaggtggtgggcctcctcgaggcaggggtatacaccctcaacgagctgtggatctacaacgcctggggagcacgcgtctaccacgcccgcaacatcagcagcgaggacgacttctgggaccctgagaagacgtcgagccccgacggcacctactactaccgcttcatggccaagagcccctacggcgccgtgcgccgcacaggaatgatagaggtggtgagatgaaaacagaaagctgaaagtggaaagttgaaagttgaaaattatgatgacgaggcacatgacacatagggatctgctgaggctgctgctcgccgccctgctgctatgcctatggctccccgagctcagggcccaacagatcgtgtcgatgaatgtgccgcggcacctctgtgccggcgacacgctgcacctcagcatgggacgccacgacacccacaacgtcgtggtgcgcgaggtgatggcggtggagagccacagcgagcgtatcttcctgcccgacggcaaggagtgcggcggccactgctcgtaccggtcgccgctgaccttcacccagtttcccgccaacgccagcatcacctccgtcaacgacatacgctatgtgcggctgaacatagagcacagctacatcggcgacatctacatcaacattacctgccccagcggcctgaaagccgacctgatgcgcaagaacaccacgggcagcaacaccgactgtgccgacgccatccccagcgagtcgataggctggcggtcgggcaacaacgccaatgccggcgccttcttcggcgacgccaacgacgaggaggcgagctacagccgctacgcctgcgactcgacggccaacggcaacgagccgggcacggggtggaactactgctggagcaacagcaccacacacggctactcctacgcccccggcgacggatacatctaccgcgccgacaacgcctcgtacgtcaacagctacagctactacggctacggacactatgtgatcgactcgtccaacgtgcacctcggcaccaacttctaccaccccgacgacaacttctcggcgctgctgggatgccccctcaacggcgaatggtatatcgaggtggtcgacggctacggtcaggacaacggctacgtcttcgaatgggagctggcgctcaacgagcacctcatccccgcggggcagtgcgacatcagcggctacgacatcgtaggtcccggcgtgaccgccgtcagcgactcgacattcatcgtggtgccccctgccggcctcacccacgacagcacggccacctacaccttccgcgtcgtcaacagctgcggcgaatatatcgacaccacggcgagcatcaccttccacgcgccgcgctacgtcgaggcagaggacgagggctgcggcacctaccgctggcacggcgtggcatacgacagggacacctgcctcacacggcacgacaccacccgctggggttgcgacagcacccacactctctgcctcaccatccaccccacctacctgatgcgggtgagcgagaccatcgtggagcgtgccctcccccacacctacggacgctacaccttcaccggtgccgtcgccgacacactcctcaccgccacctccgtgcagggctgcgacagcaacaccgtatatacgctcatcgtgctgcccgctcactatgcctccgtcgacaccgccgtctgtgccgacgccctacccttccgctggaacggccgcagctatgtgcgcagccagcgcgacaccatcaccctcagcgccagcgacggcgccgacagcgtggtgatgctgacactcaccgtgctgccaacctacaccagcgacgtagtgtggcagcgggtggagaacgacctccccgtggagttcctgcagacctccttcgccagcgatggcgacaccctgttccacctcgccagtgccgcgggatgcgacagcgccatccacttcaccctcgtcgtccacaggaaccacacctaccactacagcagtgccatctgtgccgacgcgctgccctacacctggctggggcacaccttcaccgatacggagcagaagcagatagtggcccgcgaccgctacggtgccgacagcatcgtggtgctgagcctcaccgtccaccccgtctacagcgtcgacaccacggcgacgctgtgcgagggacaacgctacccgacggtggtcggcgaccttgacagcggcggccgctacaccctgccgctgagcaccctgcagggctgcgacagcacggtgcacctcaccctcgtcgtgcatccctcgtacgacaccgtctaccgcgacacgctgtgtgcggcgctgacgccctaccgcttcgggcgcgacctcctctaccattccggcacctaccgctaccccttcgccacggcctacggctgtgactcctccgtcaccctccagctcaccgtcaagggcgaaggcctcgaggccgccatccgtgccatccccacgctggtgacacccgccgaccccatggtgcgcctctacgacgccagcagcggcagccgcaccaccctgtggaccatcgacgacgagccacgccagttcacgttcctcgactacagctaccctaccgaccgcgactcgatagtgctcacccttgtcgccacctcggacgacgggtgctatgatacggcacgcaccgtgctgcgcatcgaccgcgcggcgttggtgctgcccaacgccttcacccccaaccgcgagagcaacaacacgtggcaacctgtgctgcgcgacatcgaccggctggagatatggatctacaaccgcgacggcctcctggtgcagcacggcaacagcgtcgacttccgctgggacggcaccgacctctccggcaacgcctgccgcaccgccgcctacgtataccgcctgcgctactccacacgcctgaagcccaaccagacacaggagcagtcgggcaccatacaccttatccgctaatatgcaaacactgatagaaaaagcctgggaagaccgcgcgctgctttccgaccctgccaccgagcaggccatccgcgccaccatcgacgccctcgacaacggcaccctgcgcgtagccgagaagaaagagggcgtatggcaggtcaatgcctgggtcaagaaagccgtactcctctatttcccgctctgccagatgcaggtcctcgaagcaggccctatggagtatcacgacaagatacccctgaagcgccactatgccgaccggagtgtgcgtgtggtgccgccggcggtggcacgctacggtgcctacctggcgccgcagaccatcctcatgccctcctacgtgaacatcggcgcctatgtcgacagcggcaccatggtggacacctgggccaccgtgggctcctgcgcccagataggcaagaatgtgcacctcagcggcggcgtgggcatcggcggcgtgctggaacccgtgcaggcggcccctgtgattgtggaggaccactgcttcatagggtcgcgctgcatcatcgtcgaaggcgccatcatcgagcaggaggctgtcctcgctgccggcgtcaccatcacggccagcacccacatcattgacgtcacgacgaacacacccaccacctatatagggcgcgtgccggcacgcagcgtcgtggtgccggggtcgtacaccaagcattttcccgctggcgactacaacgtcaactgcgccctcatcatagggcaccgcaaagagagcaccgacaagaagacctcgctcaacgacgcgctgcggatgttctgagaaatggtgttgaaagattgttgataaagagccaccgcgacaggggcggcatatataaatatatgtgtacctttgcaaaccgaaaaacgcaaacaaaaaaacacatcacaatatgaaatttatcgtcaatagccagcagttactcaaacagttacaatcgcttagcggcgtcatctcgtcgagcaacaccatgcccatcattggctgtttccacctccacctcgaggaaaataccctgaccatcaaagccacggacctctccaccacgctggtggccaccatgcccgtcgagacggcacgtatggaacgtcccgaagaggtggccatcccgtcgcgtatgctccttgacatcctgaagactttcgacgatgtgcccctcaccatcgatgccgatccgaccaatttcaccatcgacatcgtctcaggccagggcgagtaccgccttgccggcatggacgcctcgacctatcccgccatgcccgccacggagagcaacggccgcatcaccatgaacagcgccgcgctcatcgaagccatcaacaagaccgtcttcgccaccagcaacgacgagatgcaccagcagatgagcggcatctattgtgagatgacccccgacggcgtcaccttcgtggccaccgacgcccacaagctcgtgcgctaccgtcgcaaagatgtcgcctcggacctcagcaccaacttcatcctgcccaagaaacccatcatcatcgtcaagaatatccttgcggcccacaaagaggataccgatgtgaccatcgaatacaacaacaccaacctcttcatcaccttcgccgacttctacatcgtctgccgcctcgtcgacggccgctatccaaactacgaagccgccatcccgaaggacaaccccaacaagctcatcctcgaccgggtgtcgttcctcaacaccctcaagcgcgtcagcatcttcgcctcggaggccacacgccaggtgcgcctgtcgattgccgccgaccacctggtcatctcggccgaagacctggagctctccaacaacgcccacgagtcgataccgtgccagtacgaaggcgaccccatggatatcggtttcaacgccaaattcctcaccgagatgatttcctacctcgacaccgagcaggtgctcgtagagctctcgcatccctcgcgcgcgggtatcatattcccctatggcaacgacgaagagggtaagaaggacgacatcctgatgctcgtgatgcctgtcatgttggccaattaaagtttaaggtttaacgtttaaagattaacggttgaagaacaaggttaacctttggggctcccacggcaccacgatactgggtatcgcgctggtgctcttcatgctgggtctcctgctcaccatcgagtaccactcctaccgtatcacccatgacacgcaggagcgcatcacctacaag

SEQ ID NO: 1291 - DNA, 18684 bp, synthetic construct
  source 1..18684: mol_type = other DNA
  misc_feature 1..18684: note = Synthetic
tcgttttccctaccgctactagtactgtttcctttaaccctttgagtaacgccaaagctagctcaatggactttggagaagaagagaatgcagaacagcttatccaaattttacaatcatcacccttgagaaataaaattatttctcaatttaatttggctgaggtttacggtcttgaagagggagaaaaaagttattattataaactagggaaagagtataatgaccacattcactttgagcgaacaagatacggatcaattaatatttcggttttagatgaagaacctcagcgagcagcggatattgctaacaagattgtacaattaattgatacagtaaaaaatgatttaataaaagagcgtaccgttccagcatttgaaataaataaaagaaagttggaacaactgaaaactgctcaagaaaagttaaatcaagagatggacagcctttcacagcttggcgtagtcaatgcgaaatcaagagccagtttatttgctgcttttaacgaatctaaaactcaagaagataaagctttttttaaaaatcaaattgaggttaacctgaagtacggtgcacggtacgatgctttatccgatttacgtgaatttaggatagagaagatgacagatcatgaggtttcatttgagcaatcagaatctgatgcacttgaaaatttcaatcacaaattcgtcgttgaatcagctgttgcttcggataaaaaagcaaaaccaaaacgcatgattattgttttgatcgcgacaatttcagctgttatttttatgttcatcattctgctcatcagggaacgttttcaaagtatccagcaaagcaaataatttgaatctcttaaaaaataaagggcttatttatgcgctgattgtcttatttataggactcaatgcctattttatatataatgataactattttttcaatttgcttcccattatattagtgattgcctatcttgggatttatcatacaaaaacagcctttttaatcattgcttttttggcgcctttatccataaaccttgaagaatttactgatggaaaaataggtttattccttcctacggaacccattttattcggtttaatggtgtggattatatttagggaactcaaacattcaattgtcaataatagtttttggaaacacccaattatatatacacttgctttttatttgttttggatatttatgtcctcaataaccagttcacatcctattgtttcttttaagtttctacttatgaagttgtggtacatcatcccgctaatcatgattggttttacaacattaaacaaaaaagaaaatgtagctaaatttttgtggtgttacgcaatcggaatgaccattgtaatcatttacacactcattcatcatgctggatacaatttcagagagaaagaagggcattgggtaatgtcgccattctttaaagatcacaccagctatggtatgagtgtagctattagtcttttatttataattggtttaattacctataaaaaacacaatattcaagcacaagtaattctgtggacaattttagtcataacattaattggtttgtattttagttacactcgaggagcatggttgagtgtagtttttgcgtttgttgtatggctactcattaaataccgtataaagttcaagtacctgttaacattaggactctcagttttagcagtgatttttattttttggagtaaaattgaaatggagttagaacgtaacaagcatgaacataccacaacaaactttaatgaaagaatcaggtctgttgctaatatttcttcagatgcgtctaatttagaacgtttaaaccgatgggaagccgcatggaatatgtttttaacgcgacctgtttttgggtatggacctggaacttatgcttttgaatatgcaccacaccagaatccagaaaagcttactgttatctctaccaactttggagatcaaggaaatgcacattctgaatacttaggacctctttccgaaacaggattaattgggatgctctcggttattgcttttgtatctgccctattttattctggaataatgttgcttattcgattaaaaagatatttccctgctgaacgtggtatgtatttattgatattatcaattgttttggccttatcaacttattttttccatggtctgctcaataattatctagataccgataaagcagcagttccaatttatggagcagcagcattttttattgcacaagaattaaaattacgcaagagaataaacgcactaaaattgaaagaacaaacaaaatagttcctttttaaaaaatcaattttaaattcattaataattataaagattaagattattgataatgataaaggcaattaattataaacttgagtaagctctgtctatcctattcatttttacaaaatcttattcaaaaaaagggtaaaaaataatggcatgatgcaacatcactttttacccctcattttcatctggtcggttttattagagatacttcccttcaaacaaataattctcaacgtaatcggttattccctgctccagcgtatgaaaaccttttgaatagcctgcagaaattaatttattcatcttcgcttcggtaaaatattgatatttatcacgaatatcagcaggtgtatcaatgtaactaatatttacttctcgattcatagcatgaaatgtatcaactgccaagtttttaaaagttctcgcttttccacacccaacattatacaatccactctccggttttttctccattaagaaggtgcaaatattgtgtacatcttttacgtaaataaaatctcttttttgttctccatcatcatacttttcgttgtgagatcgaaaaagttttaattttccagttcttgaaatctgacgataagcatgcaatacaactgaagccattctacctttatgatattcatttggtccataaacattaaagaattttaacccagcccaaaacggtggttttatcgcctgctcaagcacccatttatcaaaatcatttttagattctccataaggatttaatggctttaattgctcaaccaccctgtgattatcatcataaccatgctctcctagtccgtatgttgctgctgaactagcataaaccaatggtatactgtgctgcgttgcatagcgccatatatcttttgaataatttagatttaatcgatcaaatatttctgtatcaaattcagaggtatctgttctagcgccgatatgaaaaatgaaattaacatcctcaccgttgtcttttaaccaatcaataaatacatttcgctcaacgcgttcgatatagtttttaccgacaagattatgttctttctcaacttcagagaaatcatcaacgataataattcgcttaattcccatatcattgagtttactaactaaaccacttccgataaatcctgctgcacctgttacaactatcattttatttaattttaaatttaattctgtttacccttatcgttacaaaaatacgcataaaaaaacctcatgcaatctcatgaggttttaaaagttatattttttgacaaatagtcagattcaaatctgaatacctgttataaatacgttatttataaggagttaattgagaggctctccaactttaactgcacaatcatgacctggttgaccatgaggagggtttagttttacactcccatccatactaggctgattcagctctgtagaaatagtagtattggctgaaggtaatggatcacctacctttaccgcacaatcatgtcccggctctccatgcggtggattaatcttcacatcggcagaactagggttgttcatttgaacgggtgtattgagtgaaggtttctcttctggagtttctgttgcgatttcagttgaagcgtcatctgattcaacgtttattttttcggttgatgtctcttccgtattagcttcttcactttcttgaactggctcttcacctccacaagaagtaaaaacgaacagcgctcctgcacatacgagcaaaggagactttctaaacaattgtttaaacatattgatttattattttttagttatcaagcgaaattaaaagaaacttaggagatagttaaagaaaacatgttaaaatatacattttatgctctttaagtggaaaggtggacatgacttaaactcacgatataaccaaaaataaaagtaggtataaaattaaaaagggttgacgaatatacgccaaccctttctctatcaaaaaactacatattatgcattgctatcttgcgcaatcttaacatactcatcataatctacttctttttcattcaactttacagtttctttgaaatactttgttagtttttcttctgctaacatatcatagatttgttgcgcttctttttggtttcctaaaacttgctgagctgattgcgttaattctgcatcatctggagctggcattccgtattgtgcatactgattcaccaacaatcctttcgtgtaattaagtgcctcttcttgctcaactttcatttctgcatctttgaagattttattttgaatcaattgccaccttaggctacgggcataattttcataatctttttcaacctcttctttggtgataggttctttttgtgatgctaaaatccattttttcaaaaactcatcaggtaaacttaaatctgtttttttgattaagtcatttgaaattcttcgtgttaaaattttatcgctgtccttttcaaacatttcagctaaatctttttcgattttagctctcatttctttttctgacttcacctctccttcaccaaaaagtttatcaaataattcttgattcaactctgctggttccattaccttcacttcattgatggttaattggaatttattggaaacattttcaagttcactttcttcaatacctaacattgaagcagtgtcactttcaccacgagacacgcttcttggatctagcgtaattttatctcctggtttcttcccaatcatttcttttttgagtttttcatcttcgacaaactccatagaaatggtagaatcattcattactccaccttctaagatctcgcctttatcgtttagttcaacaaacttacccatgaccatatcacgttcgccaactttttctccagaagaaagttttccgtaacgacgtgttaaatcttcaagttgtttatcaactaattttttatcgattttaactttcgtatattcatatttatttcttcctgagagtttaacatcaaccttgggtgcaataccaatttcgtatgtaaactcaaaagtatctggattgttaaagtctccttttacctcaacatcattttttgggagtggatttccaagtacttcaaagtcttgttcatcaacatatttgaataagccttcactgacgattctatttaattcttcgcccaatatattttgaccgtattgctttttcacaattcccataggtacttttccttttcggaatccaggaatattggcttttttacgataatcctttaaagtcgaatcaactttctcttgataatcttctttctcaacggtaacctttaaaattgcgttgagctcgtcaacattttcttttgtaatattcatattgattgaaataaacttttactttttcttaattggagtaaaacaaaaaatggtataagctaaacactcataccacttttaatttggtgcggatggagggggtcgaacccacacgcctcgcggcactagatcctaagtctagcatgtctaccaattccaccacatccgcattttttaaaacaataccgaaacgtttttcgatatcttgactacttttacaattaaaagcgagtgcaaatttaattaaattttctttaagcgaaatactttttcagtttttatttaaaaagtttttttgattcggtgattactcttctcgatttaaaagtaattattcattaaattctaaaatatctttagaattgaatccaatattaatggtatcagcaatatttttatctcgagttgtgacagttagtttctcacctgtctctagttttaaaaccaattgaactgcatctcctaaagcaatctttttaataacttcagccgttgtgatataatcgcaatcggttgtgagttcatcagggtttactttaattttctcattccttatggcatgacagcattcttcgttgagcggacaatgaaaagcattttgtaaatctttattaatgcgaacggtatttccaaaaagtgaagctacatagagattatttggtttaacatataaattagaagctgcatctttttgtaccactttcccgttttgaagaataagaatttcatcggctactgatagcgcatcttgggtgtcgtgagtaacaaaaagcacggttactcccgttttctcaataatttcaaacacttgacttctcagctgagtacgcaacatggtatccaaattactgaaaggctcgtccaagattaataaagaaggattgggcgccaaagctctcgctaaagcaactctttgttgttgaccacccgataattgatgtggatatcttcctcccatttcagaaagtccaactaagtccaacatttcttgcgctctttccttcttgtctttttgtttagctatgccgtaaaggatattttccaaaactgtaagatgtggaaacaaggcatactcctgaaaaaccaatccaatttttcgtttttcgggttgtgtaaactgatcaactgatgacaatactttgcccgataaagaaatactgccttcatctggtctttccagtccagcaatcaagcgtactaaagttgtttttcctgatccactttctccaacgatggcacatacatcacctgacttaagctcaaaactcacatcttgtaatgcgtagttcttacctttatcgtaactttttgaaagtgaatctatttttaacattttacttttttatcaatagtttatttaaaaatataaccggaatcattgcagtaaagataatgaaaagtgagggaattgccgcttccattaccatttcatcgctggcatattcgtaagcgcgcactgctagagtgtcaatgtgatagggtttcaatatcaaagtcaatggcaattctttcattacatctataaaaacaagaattacagcactaaagattcccgttttgattaaaggaaattcaattttaaagaaggtttttaaatttcctacacctaaaaccttcgaggaatcaggaattgaattgtctacttttagagctgtagattcaattggattgtaggccacagccagaaaacgaacggcataagcataaaacaaagcaatcaaagttccgttgatgataagtccagtttcgatgcccatgtttccaaggactttgatcagccatttatctagagccaatgtaggaatcataattccaattgcaattactgctcctggaatggcgtaacctaaaacaccaacacgcgccacgtttttaattaaacgcaaagcactccatttggagaagtaaatcaaaagcaaggcaaaaaagacagtaattaaagcagaaacaatggagattccgaaactttggagcgaaacccaaagaaaatccatgttaaaaactttacttgccgttagaaaagcccaataaatcaattgtaaaatgggcaatacaaaacctaataaaacgggaataaagacaactgcgaaaatcaaccatttctgtgatttcttaggtacttttctttgaatttgttgattattggtcttcgcagagctaaattttacctttctcacctgccatttttcaatgagaataagcgagaagataattacaattaaaagcgcggaaagatacacagctgtttctggctcctccaatgaaaaccaagatctaaaaatcccggtagtaaaagtatttacaccataatatttggctgctccataatcgttgagtacttccattaagaccaaaaccaatcccgctacaattgctggtcgtgccaaaggtagcatcaatttaaaaaaggtttttcgttctcctacaccaagcatattggaagcttccaaaagattattggcttgattgaggaaaaatgcgcgcgcacttacataaacataagggaaaagtgaaatactcaacacaaaagccaatccagcgcggttcataatgtcgatgcgaacaaaatcgaggttaacagcttccattagcaaggctaaactccctccataatcaaagattccggcataggcataaccaacgatgtaggaaggaatcgccaaaggtagaatgagtaaccattccaaggcttttcgcatgggaaaatcaaatcgggaaaccaaccaagcggaggaaacgccaaaaacgagaaccaaaagactgcaaaacacaataaggaaaaatgaattccatatataatctggcagtaggtattcaacaatgtgactccaagtttctcctggcccagcaaacaattcaacgccaataaaaagtatgggcaatgccaagaaaacaacgatggccaacgtaagagctgaccatctattgttgtctcttttaaatctttttaagcgagattttaaagaaaatactgtgtttttatttccagcctgcttcatcaaaaagtaaaactgcttttttattgttttctcctagtttggtaagattcaaagtatcttccttgaaatcaccccatgcttttatatctgctgttggggctacactttccaatacaggatattcataattggcatctgtaaagatcttttgagcttcttcgctaattaaaaattcaataaaacgaattgcattttctttattcggcgcatacttagctacccctgctccactcacgttaatgtgcgttcctctaccgtcttgatttgggaaaaacaaacctatttctttggcaactttcacttcttcaggatctgcagaattcaacattttcccgatataataagaatttacaatggccaagtctccttctcccgccacaacagcttttacttgatcacgatcagatccttttggagaacgcgccatattctctaccattccagcagcccatttcttagcgatatcttctccatcattggcaataattgaagccattaaagattggttataaatattagaagatgaacgaaccaagattttatcatcccacttttctgtcaccaaatcttcgtaagtcgttaggtcttccggttgaactctatcttttgcgtaagcgataattcttgctcgtttcgttaatccaaaccaatgattatcgacatcttgcaaatgtgaaggtatattattttccaaaacattagactctatgcgttgcaacaaaccttgttctttggcacggtgcaatcttccggcatcaacggtaatcaaaacatcggcaggagattgctctccttccattttcatcttttggatcaattcgtctgcactcgcattaattacttttacctcaattccagtttcatcttcaaacattttaaagattttttggtctggctcataatgtctgtgggtataaacattaacgacttgtgctttttcagtagtttccacattctctgttgtggtttcctcttctttgttaccacatgaagcaaaaacagccaatgcagtagttaaaacgaatatttttctcatctgatctataaattttattccctgcaaatatagtaatttagaatgggtttaaatagggaacatagaatgaaagttaagccgttttgaattttttaggagaaaaaagaatcagtggctcagtttgggagagcacaaaaaagaaaacgaggcgaactaaaagttgccccgttttaaatgttttcacaacggaataatccttattgtgaattgattcattttgatgtttcaaatatagtataatttcctcaaaagactagcaaaaactataaaaattagttaacttggaggttttctaacttaaaaaccaaattacactatgaaaagagtattaggattagacttaggtacaaatagtattggatgggctttggtggagaacaactttgaagaaaaagaagggaaaatcattggactaggtagtagaatcataccgatggatcaaggaatccttggaaaatttggagaaggtaattcaatttcccaaacagcggatagaaccaaatacagaagtgcaagaagactaagagaaagacaattactaagaagggaaagacttcatagagttctcaacgtgatgaatttccttcctacacactactccaccaatattgactttaaaaataaattaggacaattcaaaaaaaatacggaaccaaaattagcttggagaaaaagctcagaaggaaaatatgattttatatttaaagattcattcaaggaaatgatagaagaatttaaatctaacggaatcaacaccaatattccatatgattggactctatattatttacgaaaaaaagctataaatcaaaaggttagtaaggaagaattagcttggattattctaaattttaatcaaaaaagaggatactatcaacttagaggagaggaagaagaagagaacaagaataaattagtcgaattctattcattaaaggttatagatgtcaataaagatgacgtttctaataaaaaaggtgaagcatggtactcaatgactctagaaaatggatgggtttacaaacgttctagtaaaaccgatttgtctgactggaaaggaaagattaaagattttatagtaacaactgatataaacgatgatggatctataaaaactaacaaagagggtgatgaaaagagaagttttagagcaccaaaagaggatgattggactttagtaaaaaagaaaacggaacaagaaattaaactatcaggtaaaactgttggtcaatacatttttgacaatttacttaaaaatccagagattaaaataaaaggaaagttaatcagaacaattgaaagaaaattctataaagccgaattagaaaaaattttagatacacaaattaaattacaaccaaacttattcaacgaggaaatatatcacgctagtattcgagaattatacaaaagtaatgcatctcatcaagtggaactcatgaaacgtgggtttaaacacttactcataaatgatataattttttatcaacgccctttgaaaagtcaaaaatcacttataggaaattgtacacttgagaaaagattttttaaagataaagagggaaatgttcaaattcaaaacctcaaagtaattccaaaatctaatccatattatcaagagtttagagtttggcaatggctatataatttaaagatatacaccaacgaaaacaataaaaatgtaacggaaagctttataaaaaatcaaaaggatttggtgaaactctttgattttctgatgactaaaaaagaagttaaccatattgatttattaaagttctttatagaaccagcagtaaaagaaaaattccctaaagcgaaacctaaagcttttaaaaatgaattattaaaagaaatcgctaaatatcgatggaactatgtttacgattcagacaaaaacgaatctaaatactatcccatgaatgagactggttatgagataaaaagaagactttctaaagttattgatgttccgaagaactttctcacccaagaagtagaacttcagttgtggcatataatatactcggtaatagacaaaattgaatttaaaaaagctctaataacttttgcgaaaaaacacaaattaaatgaagaatcattcttggataattttcttaaattcaaaccatttgacagtgaatatggaaaatattcagaaaaagccattaaaaagctattgttattaatgagagctgaaaaatattgggaatgggaaagaattgatgataaaataaaagacagaatagataaaattatcactggtgaatatgataaggaaattaaaaatagagttcgtgaaaagtctatcaatctaactcagaaagatcattttcagggattgcaattatggcttgctcaatacatcatttatgataggcattccgaatcagagaacaatgattattggagtactcctaatgatattgaagaatacttaaaagaatttaaacaacattccttgagaaatccaattgttgaacaagttgttactgaaacacttcgggttgttaaagatatttggaaaaattacggtaatggtggtgaaaattattttgacgaaatacatgttgagcttggtcgtgacatgaagaattccgcagactctcgaaaacatttatctgacatcatttcaaaaaatgaaaacactaatattcgaataaaaacaatactaaatgagctattaaatgatagttctgtcgagaatgtgagaccatactccccaatgcaacaagaagctttaaagatatatgaagatggaatactaaattctggaattgaaattccagatgaaattgaaaagattagcaaaaaatctgaaccaacaaaatcagaagttcagcgttacaaactctggttagaacaaaaatatcgatcaccttatacaggcagaccaatacctattagtaaacttttcacaagtgcatacgaaattgaacatgttatacctcaaagtcgttatttcgacgacagttttactaataaagttatttgcgaagcagaagtaaatagtctaaaagacagacaacttggtttagaatttattaaaaaccattttggtcaaaaagtacatacaacatttggagaagttgaaatactctctgagggcgcatatactgatttcgtaaaggaaaattatcagaaaaacagaaataaaagagataaattattgttggaggagattccagaaaaaatgattgagagacaactaaatgatactaggtatattagcaagtttgtttccagccttttatctaacttagtacgatcaaccaaaaatgatgaagggattaattctaaaaacttaataccattaaatggaaagattacaaataaactaaaacatgattggggtctaaacgatgtttggaatgaactcattttaccacgttttgaaagattaaataaaattacaaatagtaatgattatacttcatggaatgaaaaacatcaaaagtttttaccaacagttcctttagagctggctcgtggtttcaataagaaaagaattgatcatcgtcatcatgctttagatgctttggtaattgcatgcgcaagtagaaatcatgtaaatttattaaacaataaacacgcaaagtctaaaaatgaaagatatgacttgcaacacaagttgagaaacactgctgtgtggatagatgatcaaggccataaacgaaccaagttcacaacatttaaaaagccatggaatagctacacttccgattctaaaagcaaattagaggaaataattattagttttaaacaaaacctgagggttataaataaagcgactaattattatgaaaaaatcatcgacaataaaaaaacaaaagttaaacaagatgggttaaattgggcaataagaaaacctatgcataaagagatggtctatggtaaagttgatttacctagaattaaagttccaaaaggaaaagtccttactgcaattcgagaatcattagatccttcttttaaaacttctcgaatagaatctataactgatagcgggattcaaaagatattactgaatcatttacaaacttatgatgaaccaagatttaatttctctggaaacaaagtttctgaacaaatatccaaaagaaaggaactaattaagaacaaacaattgaaagaacatccagagctagccttttcaccagaaggagttcaagatatgaataacaatatcactaatcttaatgacggaaaattacaccaacctattttaaaagttagagttttcgaagtaggatctaagtttcaagtaggttacgatggtaataaaagtagaaaatatgttgaagcagcgaaaggtaccaatttgttttttgctatttattgggatgaaaataagcaaaaaagaaatttcgaaacaatacctttgaacgtcgttattgaacgtcaaaaacagggcttaagttctgttcccgaaattaatgagagaggacatcatttgatttttcatctttcccctaatgatttagtatatgttccagatattgatgatattcatagtcgaaaatcaataatcaattcaaaaaatatctataaaatggttagcagcactggaagtgaatgtcattttattcatgcaaacattgctcacctaatcaaaacttatgaatcaaaaacaaaaattggcgaattaggtagcctgaataagcaagaacttactttagataatacaataagaataaaagaacagtgtttaaaattaaaaaccaatcgtttgggtgaggttttagtttgaaaaatttagcattaatctaaaacaactccaactgttgatgaggactttctttctccacttcttttaccccgtgaaaaagttccatcattccaaattgacgatccgtgatttgtaagattcctaccttcccttttttggggaggaggagttttactcttttggtatgtacgtctgcattttctcgactggcacaaaatcttaaataaatagagaattgaaacattgtaaaaccatcattgagtaatgactttctaaatttactggctgctttccgctccagttttgtttctgttggtaaatcaaaaaatactaaaatccacatagttctatattggtttaaacgggttaaaaaaggattatctttcataatgttgggtataaaattttacgagaaattccagaaaaacattcaaataaagaatgtgtcgtgcggctcatggctaccatcaatggacttcctttcccatctatagtaacatcaatggctggtataattaaaagttgttgctttaaatcacgtgtaagttgatcgatattagatgtttgctgcactaaagcatgtaccacttgatctacaaacggtcgatacggctccataatatcatccgctaaacaataagcgttatatttattcgcatgatgtattcccagagcaggcaacattccactcccaataattgaacgtgcgcaaaccgctcttaagattgcatacccataattcaataaattatttggaggaatttccttttgtccacgataaaaaccaggtatttcagagaataattgctcccaataatacgctgcagcatgactttctttattagtagagtcacccgacaaaacttccccactccactttctgagtttactatttaccttgtcgagttttcccaaaagatttgcctgatttgagattttggcaataatggtttgttgccaaagattcttttttaatggttgagaagcttcaagttgatagcgcagtctttcattgtattctgaatgaccactcaatggagaaattaaacttaatggtaaatgttgttgattacaacacactattgctgcattttgataagtcagtttttcaataaggtgatttgtgaaagtgatttgttgatgttccaaaaccatcatcccgatatcttcaattgggacagtttttgtttgttccgtttcaattagcctaaccaccaattgattatttttcgtactcaggtaagcggggttttcaaaaaacaaggtgcgtttgatcataagcttaagtattgatttctaaactactattacgccatattcaaaaaaaggtttcaaaatcaacaatttagaaataaaaaagtagaggaataaagctagaatctaatcaaacccaatgcatattttcatttctaataaactcttaaaacacaaaaagaccgctcgtttgagagcggtctcttgtgaatcctcacgtaaaagtatcaaaatgaaatcaattcacaacggtggccacttttacgaaataagtatctgccttgtgaatcctcacgtaaaagtatcaaaatgaaatcaattcacaacgaactttaaaatcttcaccgtacatgatatcttgtgaatcctcacgtaaaagtatcaaaatgaaatcaattcacaactggggccaactaattttagtttttgaaacacttgtgaatcctcacgtaaaagtatcaaaatgaaatcaattcacaacgaactttcaaatcttcaccgtacatgatatcttgtgaatcctcccgtaaaagtatcaaaatgaaatcaattcacaacggtcatcaagattgaaaggcgtatctaagacttgtgaatcctcacgtaaaagtatcaaaatgaaatcaattcacaacgtcaatcgttgacaagtcaccatcaactttcttgtgaatcctcacgtaaaagtatcaaaatgaaatcaattcacaacctacgccattataaagtctacagtcgtaaacttgtgaatcctcacgtaaaagtatcaaaatgaaatcaattcacaactatagcttctaaatttgctctaggccctatcttgtgaatcctcacgtaaaagtatcaaaatgaaatcaattcacaacaagttctttgtttccagcaaggatttcactacttgtgaatcctcacgtaaaagtatcaaaatgaaatcaattcacaacgcacatctatatacttcactgttacattgtcttgtgaatcctcacgtaaaagtatcaaaatgaaatcaattcacaactatagcttctaaatttgctctaggccctatcttgtgaattctcacgtaaaagtatcaaaatgaaatcaattcacaactctagcttctaaatttgctctaggccctatcttgtgaattctcacgtaaaagtatcaaaatgaaatcaattcacaacagtatagactattaccaatcaacacacaaccttgtgaatcctcacgtaaaagtatcaaaatgaaatcaattcacaacagattttggaagatccacaagaaaggaaaacttgtgaatcctcacgtaaaagtatcaaaatgaaatcaattcacaacgggctttcactcccacttcgtcaaacacctcttgtgaatcctcacgtaaaagtatcaacatgaaatcaattcacaacaatacctaatcgctctacttaaaaaccaagcttgtgaatcctcgcgtaaaagtatcaaaatgaaatcaattcacaacaatacctaaacgcactacttaaaagccaagcttgtgaatcctcacgtaaaagtatcaaaatgaaatcaattcacaacacatgtattcctcttgcttcatccctttatcttgtgaatcctcacgtaaaagtatcaaaatgaaatcaattcacaacgtaatgcgtggttttctattttatcgagtgcttgtgaatcctcacgtaaaagtatcaaactgaaatcaattcacaacaatacctaatcgcactacttaaaaaccaagcttgcgaatcctcacgtaaaagtatcaaaatgaaatcaattcacaacagattttgtttcctttacctgaaagatacacttgtgaatcctcacgtaaaagtatcaaaatgaaatcaattcacaacaactttatgataaaccaaaagaatttttaacttgtgaatcctcacgtaaaagtatcaaaatgaaatcaattcacaacagcttaaccgttattaaaatgtatggatcgcttgtgaatcctcacgtaaaagtatcaaaatgaaatcaattcacaacggtttctttccaacaaagaaatgaagtcctcttgtgaatcctcacgtaaaagtatcaaactgaaatcaattcacaacgcatacaacctacacacttattcatccaagcttgtgaatcctcacgtagaagtatcaaaatgaaatcaattcacaacactcctgcagttgctaagaaagtaaggtaacttgtgaatcctcacgtaaaagtatcaaaatgaaatcaattcacaacggcaatgtattacaagacaggaggtgcggtcttgtgaatcctcacgtaaaagtatcaaaatgaaatcaattcacaacgcatacaacgtacacagttattcatccaagcttgtgaatcctcgcgtaaaagtatcaaaatgaaatcaattcacaacggcaatgtattaccagacaggaggtgcggtcttgtgaatcctcacgtaaaagtatcaaaatgaaatcaattcacaactacggatcatcttcatctttaaaatctttgcttgtgaatcctcacgtaaaagtatcaaaatgaaatcaattcacaacggctttataagttttaacaactgaaatgctcttctgaatcctcacgtaaaagtatcaaaatgaaatcaattcacaacggctttataagttttaacaactgaaatgctcttgtgaatcctcacgtaaaagtatcaaaatgaaatcaattcacaaccgcaatagagatgcagttcttttttctattcttgtgaatcctcacgtaaaagtatcaaaatgaaatcaattcacaactggctctaatcatgagacatggaaagaaaccttgtgaatcctcacgtaaaagtatcaaaatgaaatcaattcacaactgaacttggagcaaacgcaagagcgaacgccttgtgaatcctcacgtaaaagtatcaaaatgaaatcaattcacaactgaacttggagcaaaagcaagagcgaacgccttgtgaatcctcacgtaaaagtatcaaaatgaaatcaatt

SEQ ID NO: 1292 - DNA, 18657 bp, synthetic construct
  misc_feature 1..18657: note = Synthetic
  source 1..18657: mol_type = other DNA
gccgtgacgcttatcatagcagccaagccgttggcagctttggcacacaagcgcgtcaagcattgacgacacacaaaaaaatgagtagctttttattcatcaaaagaaaagataaatcgctcttgccctgtcggccttggcgttcggcaggggcaggaaagagagaaggcggtaaggattgatatttccttaccgccttctgcttatttgtacgctatattatgcagctaatcaggcaatgccatgagctacagcgtccttgtcaatcttcttgatgaggccctgaagtacagcacccggaccacactcggtaaagtcagttgcgccatcggcaatcatgttctttacagtctgtgtccagcgaacagaagcggtcagctgagcaacgaggttcttcttgatttctgccgggtcagtgtggggcagggcgtctacgttctgataaacggggcacttcggagtgtggaagtcagtagcgttgatagcagcttccagttccaccttggccggattcatcagcggagagtggaatgcgccacctaccttcaggggcagtgcacgcttggcaccagcagccttcatcagttcgcaagccttgttgatgccttcgatagaaccagagataacaatctgtccggggcagttgaagttggcagctacgcaaacttcgccttccttgcttacctgctcgcagatttcttctaccttctcgtcgggcagggcaatgatggcagccattgttgagggttgagcctcgcaagccttctgcatggccatggcacgagcataaaccagcttcagtccgtcttcaaagctcagagcgccggcagctaccagagcagagaactcacccagcgagtgtccggcagtcatttcgggcttgaagtcttcgcccatgcacagggcagagataacagagtgaaggaatacggcaggctgagtaaccttagtctgacgcaggtcttcgtccgtaccgttgaacataatatctgtaatgcgatatccaagaatctcattagctttctcaaacagttctttggccaaagccgagttttcgtacaggtcttttcccattcctacgaactgggcaccttgaccgggaaatacaaatgctttcatttttttacttatttggttaaatattcagtttgcaagtttcggatttgcctttgacttgttggtactaaagcaagtacctctcatcataatacccctttggttgtatattaaaataaggtataaaagcggcttttccttttgtcatttcaaaaatgcggtgcaaagttaggcctttttctgttaacaaccgcacaaaaacacgttttttgtgcatttgcctgccgtgccccgtgctgatatacaataacccttccactcctgccatcggtctgcataagtcagaaacccttatatattagacttttgcaccatattgtacatgctacaattagtaccctattccgctcttttcgcgttcatattgtatatgatatgataacccgtattgctgatattgtatgatataagataactattttactgaaaaatagtgttttataacatgattaatttatagtttctttcttttccgtttctgaaaacttgtatatctttgtgccgcttaaaagaagatattatgcagaacatggaacatacaatgcccttggccaacaatcatatttcggtagattgtgttgtgataggatttgacggcgagcaactgaaggtcttgttggtgaagcgaatgggagaggagcagggtgaggtattccacgatatgaaacttcccggtagcctgatatatatggacgaggacctggatgaggccgcccagcgtgtactcaatgaactgacaggcttgaagaatgtcaacctgatgcaattcaaggcctttggctccaaggacaggaccaagaatcccaaagatgtgcactggctggaaagggccatgcagtcgaaggtagagcgcattgtgaccatagcctatttgtcgctggtgaagattgatcgtgccctcagccgcaatctggacgaataccaggcctgctgggtagctttggacgatgtcaaggacctggccttcgaccataacctcatcatcaaggaggccatgagcttcatcaggcaatacgtagagttcaatccttcttccctgttcgacttgctgccgcgcaagttcacggctttgcaattgcgtcgtctcttcgagctggtgtatgccaagcagatagacgtacgcaacttccataagaagatagccatgatggagtatgtggtgcccttggaagagcgtcagcagggcgttgcccatcgggcggcacgctactatcgcttcgaccgaaaaatatataataaggtgaggcgatgatggctaatggccaatgattaatggttaatggtaaacggttaataagcttatataattcttcattcttaattcttcattaacatgtacttattaggttatgacataggtagttcgtccgtaaaggcgagcttggtaaatgccgaaagcggcaagtgtgtatcctcggccttctttccaaagagcgaggcacccatcctggcagtgaggcagggatgggcagagcaagaccctgaaagctggtggacatacctgaagcaggctacgcaggccatcctggccgaatcgggcatagacagtgccgacatcaaagccatcggcatctcctaccagatgcacggactggtgtgtgtcgacaagaatcagaaggcattgcgcccctccatcatctggtgcgactcgcgtgccgttccttatggacagaaagcctttgaagcgctgggcgaggagaaatgcctctctcatctgctcaactcgccgggcaacttcaccgcctccaagctggcctgggtgaaggaaaatgaaccgcaggtctacgagcaaatccataaaatcatgctgcctggcgactacattgccatgcgcctgagtggcgagatttgcaccacggtgtcgggcctctctgaaggcatgttctgggacttcaaggagaaccacgtggccggcttcctgatggattactacggactggatgcttcccttatagccgacatacgccccacctttgctgagcagggacgtgtcaatgccgacgccgcccgcgagctgggactgaaggaaggcacccccatcacctatcgtgccggcgaccagcccaacaacgccctgtccctgaacgtgttcaaccccggcgaaatagcttctacggcaggcaccagcggtgtggtctatggcgtgaacggctcggtaaactacgaccccaagagccgtgtcaatacctttgcccacgtcaaccattcggatagccagacccgtctgggcgtcttgctttgcatcaacggcacgggcatcctcaattcgtggatgaagcgcaatgtggcccccgaaggcatatcctacgccgacatgaacgacctggccgcccaggcacccatcggcagtgcaggcatcagcatcctgccctttggcaacggtgccgagcgcatgttggagaatcgcgagacgggctgttctgtctgtggcgtcaacttcaacctgcatggcaagagccacctgctccgtgcagcccaagagggtatcgtcttctcgttcaagtatggcatcgacatcatggagcagatgggcatacctgtgcagaagatacatgccggccatgccaacatgttcctcagccccatcttccgcgacacgctggccggcgtgacaggcgccaccatcgagctctacgacaccgacggttcggtaggtgctgccaagggtgcgggcataggtgcaggcatctacaaggacaacaatgaagcctttgccacgctcgagaagctggccatcatcgagcccgacgcagcccgtcgccagcaatatcaggacgcttacgcgctttggaagcaacgtctcgaaggcgttggttgaaggaggtagttatgaggagttagagaagttctataggagttaaagctaatggccgagaggcaacaggttttccatttacgaaactatcggcttttaacttctaacgaagcgcagcgaagtgataacttctataacttcttaattctcaaagaaatatttaaacagaaaattcaataataaaccagaggcttttgcctcactaaaaacatttaaagatatggcaacaaaagagtactttcctggtataggaaaaattaagtttgaaggaaaagaaagtaagaaccctatggcattccgctactacgatgccaacaaggtaatcatgggtaagaagatgagcgaatggctgaagtttgccatggcttggtggcacaccctttgcgctgaaggcagcgaccagtttggcggtggcacgaagaccttcccctggaacgactcagacaatgccctcgaggcagccaagcacaaagtagatgccggctttgagttcatgcagaagatgggtatcgaatactactgcttccacgatgtagacctctgcaccgaagctgccaccatcgaagaatacgaggccaacctgaaggaaattgtggcttacctgaagcagaaacaagccgaaacaggcatcaagctcctgtggggaacagccaacgtattcggccacaagcgctatatgaacggtgccgctaccaaccccgacttcgacgttgtggcccgcgctgccgtgcagattaagaacgccatcgacgccaccatcgaactgggcggtaccaactacgtattctggggcggacgcgaaggctacatgagcctgctcaacaccgaccagaagcgcgaaaaagagcacctggcacagatgctgaccatggcccgcgactatgcccgcgcacacggcttcaaaggcactttcctcatcgagcccaaacccatggaacccagcaagcatcagtacgatgttgatacagaaaccgttattggattcctcaaggcccacaacctcgacaaggacttcaaggtaaacatcgaagtcaaccatgccaccctcgccggccacaccttcgaacacgaactggctgtagctgtcgacaacgacatgctgggctctatcgacgccaaccgcggtgactatcagaacggttgggataccgaccagttccccatcgacaacttcgaactcatccaggccatgatgcaaatcatccgcggcggtggcttcaaggacggcggtacgaacttcgatgccaagacccgtcgcaactctaccgacctcgaggacatcttcattgcccacattgccggcatggacgccatggcacgtgccctcgaaagcgctgcacgcctgctcgaagagtctccctacaagcagatgctggccgaccgctacgcttctttcgatagcggcaagggtaaggagtttgaagaaggcaagctgaccttggaagacgtcgtagcctacgccaagcagaacggcgagcccaagcagaccagcggcaagcaagagctctacgaggctattgtcaatatgtacgcctgatgattgaaaatttcagagttcagatttctgatttcagatttctgaactctgaactcataacttataactcacaacttataactcataactctgaattcctaaattctaacatcatgacaaaccaaaccgaaaacggtagcaaagcctacctcttctccatagtgctggtagccgtgctgggcgggttgctcttcggatacgacaccgccgtcatctcgggagccgagaaagggcttcaggcattcttcatgggggcttcagactttgtctataccgatacatggcacggcatcacttcgtccagcgcgctcatcgggtgcatcattggtagtgccctctcaggcttctgcgcctccaatctgggccgcaagaaatcgttgtttgtagccggcgtcctctttttcctctcagcactggggtcatactatcccgagtttttgttctacgattacggccagcccagctattccctgcttctggctttcaatttctaccgcgttttgggtggtgtaggtgtaggtctggcctcggccatctgccccatgtacattgccgaaatcgcccccagcaacatacgcggcaccctcgtgtcgtggaaccagtttgccatcatctttggccagctgctagtctattttgtcaatttccttattctgggcgacaacatcaaccccgtcatcaaggccgttgaaggcgtcaaccagatactcaaccccgacgcggccgcctggaccatcgaaacaggctggcgactgatgttcgtcagcgaagccgtacccgccggactcttcaccctgctggtgctcctcgtgcccgaaacaccccgctacctggccatgacaggcaaggacgacaaggcactctacgtcctgggtcgcatcaacggaacagcacaggcccacaccatcctggccgacatcaaggctacggcccacgagaagaccgaacgcctcttcacctacggctggctggtcatcttcatcggcatcatgctcagcgtcttccagcaggcagtaggcatcaatgctgtgctctactttgctccgcgcatcttcgagagcatgggtatgggcaaccccatggagcagaccgtcatcatgggtatcatcaacatcctgttcacccttctggctgtattcaccgttgagaagtggggacgcaagcccctgctcatctacggctccatcggcatggccatcggcgccttcggcgtagccctgtgcaatgtgctcacaggccttcccgccatcatctccgtggtcagcatcatggtctacagcgcctcgttcatgttcagctggggccccatctgctgggtgctcatagccgaaatcttccccaacaccatccgtggtgcggccgtcgccatagccgtcgccttccagtggatattcaacttcatcgtgtcatccaccttcgtgcccatgtacaacatgagcctgggcgatatgggcgacaagtttggccacatgtttgcctatgccctctacggcatcatctgtgtcattgccgccatcttcgtttggaggctcgtgcccgagaccaagggcaagacgctggaagacatgacacgtctgtggaagaagaaataagccggcctctgtcgagcggttagaaaacaatatattcccccagctacgcatccgcttcatcgggcgtggctgggggattttttatgtgcgcggtgagagttgagagttgagagttgagagttgagagttgagagtggagagttgagaggtgagagttgagaggggagaggggagagttgtttagcagcgtttatcagtgattagtaactttggcatatacatataacttaagtttctgatttgatatttcactggaagttaagaagttatagaagttatcacttcgctttgctctgttagaagttaaagccgatagtcttgcaaaagaaaaaattggcagtaacaggtctattggcctttaacttctaagcccaccttggtgggcgataactccttttaactcctttaactccttcaagtttggcttcgccgattttcaattcggtaaaaccgaaacttgaacatataatcttagtcttttaggcaagcaagtggtataacttttactccatctgctcgggtataggccattttaccgcctgtcaaaactattaaaagatccggttcccgtaatggagcttgtttttccgtcttgttatattcttggataagccgtctgatttccaacagatgtttcgcaccctcttctatttcttgactccccagtttgcattcaatcaaagcgtatctttcatcttctaaatgcaacacaagatcggattccaaaccatagcgatcacgatagtaggatatgcggctgttgaaatcagtagtataagccttaagatcgcgtacacacatctgttcaaaaataaacccgaatgttttaagctgtatctccaatgcttcagcaccgatgttcattgccgccacggcaatggaagggtcggtgaagcagcgtttgggtgcactacgcaatgcagttttgctacgtatggcaggacgccaagcatctatgtcctgaatgacaaacaatttttctaatgcctccatataatcatcgtaagtatccatagagattgttatatctccagatgctgtaatatcggcaaggatactggtctttttagccagtgtgctgatattcctggcatacgatttcattatttgtcgtgcgattttcggattacgttgttttccgtctactttagaaatatcattctcacaaacgctgttcacataatctttggctacgagcatggcagatttctgactcatttgcagagttgcgggccaaccgccacggcaagccacacgtattaactccggaacatctaacttacttgaagcaccatctatgtcataatttggattgtcaaataattctcgtatagaaacttcaccggaagattccagcgattcccacaaactcatgggatacatcttcattttagtaatccttcctgttcctgaatgccttatttgggtcttatccacagcattgctccccgtcaggatatactgtcccggaattccattggcattatctacggctgttcgtaccgcatcccatataacaggagcgtcctgccattcgtctatcagtcgtggcttttcgcctttcaacaaaagtgatggcttggtagccgctgtggcgagatattcatcagccatatcaggatcttgtaacttaatgaagcttttagcgtgttgttctgcagtggttgtctttcccgtccatttcggcccctctatcagaaccgcaccaaatgtttcaagccgttcttgtagtatcttatccgctactctatgtaagtacttcataatcgcaatcttttaatggtgcaaatataatttttttattcttattcgcaatgtaaatcggtatttttgtggtatttcaatcggtgtttttgtggcgtttcagtcggtttttttgcgctactttggttcacctcatcgggcgtggctggggattattttatgtgcgcggtgagagttgagaggggagaggtgagagttgaggggggagagtttagaggtgagagttgagaggggagaggtgagagttgaggggggagagttgagaggtgagagtggagaggggagagttgaggggggagagttgagaggtgagagttgagaggggagaggtgagagtggagaggtgaaaggggagagtggagaggggagagtggagaggggaaaacttgtcagctcaaaataaataattcgcctcattcgccgcttctaagaattttggagttaaagccgacgtaaaacgaaggactaccatgctggcgatgagcggctaacttagtagagacggggcgtgctccgtcttgagaatgattaggtattgaaatgtttgttaatcaatgaattaaatcaatctgtttacgtagacgcggcacgccatatctctactaagattaccatttatctgtgtttatccacctcatcctcgtctaagaagtctgttcctcgtccacttgtccactaacacgtcaattcaaaattgactaattgtgatttgtgatgggtggcgctcattgggggataaggaacttaaagatgagctgtgctttgaataagataaggagataagggtatttttgaaggttggctttgcggacggtgaggagtgcggactttgtgagcattcggcaaggcatgtgttttcatcagcttttccattaattactttgcatccttcattttatcagtcggtaatattttcagatatcagtagttgggtaagcagaaacaatcatggaatgtatgttttaatatttgctatttggtagagtttaaggtataaaaaatcccccgttaaaggacgagggaaacctaatgttttcacaacggaataatccttattgtgatttgcttcaaattagtaatgcaaaaatataaagaaaaaagtatgtaaacaaatgttttttcaattttttttgtagttttgttgtcatatcatttttaactagattgaattttgctatgaaaagaatacttggacttgatttgggcaccaatagtattgggtgggctgtgataaacaaatctattgatgagaatggcaatgaaacctttaagggaatagaagcagctggaagcagaattattcctatggatgcggctatattaggagactttgataaaggaaacaatgtttctcagacaaggaatcgaacacaggcgcgaggtgtcaggcatttatatgagagggcgcgattgcggcgtgaaagacttcaccgcatattgtctctgataggtttcttgcccgagcattatgctattcaattagatcgctatggtaaatttttgcccgataaagagccgaaactggcttggtgtaaaaatgaagtaggaaaatatcagttcttgttccaaaattcgtttgctgaaatgcttgaggagtttaaaaaacacaatccggattttgtagccaatgaagtcaaggttccttacgattggactatatattatttgcgtaaaaaagcattgacacaaaaaatagcaaaagaagagctagcttggatattgctgaactttaatcaaaaaagaggttactatcagttgcgagatgaggaagaagaacaagtatcggctaaagtacgtcaatattttgataggcaacaggttgttgatatcatcgatacgaaagaactttacaaaggaatgaacatatatcgggttgtcttagccaatggaatcgcaggtaaggttttcaagaaagaaatgcccgactggttagggaaagaaaaggacatcattgtaacggtggatatcgataaggaggggaaggataagcatgaagaagatggttctctttcctgtcgttttaaagttccctcagaggctgaatgggaaactgaatggaaattgattaaggaaaagactcagcatgacctggatgcatcgggcaaaagtgtaggcgaatatgtatttgatacacttctttataatccgatgcaaaaggtgcgtggtaagttagtgcgtaccattgaacgtaaatattataaggacgagttgattcaaatcttgaggaagcaaaaagagtttcactctgaactgaatgatagtgggctttaccagaaatgcttggaggaattgtacgccaacaatccagctcatcgaaatctgatggcttcgcatgatttgtcgtacttcctgataaatgacatcctcttttatcaacgtccattgaaaagtaaaaaagcattgattgacaattgtccttatgaaggccatgaatatcttgataaagaaactaacgcaaagaaatatgttcctgtaaagtgtatatccaagtctcaccctctgtttcaggagttcagactatggcaatttgtttcaaatctgcgcatttaccaaaaggaaaagctggttggcgacaaagtgaagactgatgtggatgtaacacaagagtttctgaaaaatgaggatgattatgtggccttgtttgaatggttaaataacaggaaagagataaaacaagagcaattcctgaaatatccgccctttggtttgaaaaaggaagttggcaaatacagatggaattacgtagaggataaaatttatccttgcaatgaaacccactccatgatgctgactcgtttggaaaaagctggaatttccgcaaacttcttgacgtctgagcacgaggaggctttgtggcatgtgttatactccgtatcggggaaagaggaattaaaactggctcttaaatcttttgctgccaaacacggactagatacaccttttgtagatgcattccttaacactcctccattcgaaaaaacatatgggtcttattctgccaaggcaatcaagaagttgttgcctttaatgcgtatggggcattattggaaggcagaaaacattgatactcatactcgtgaaagaatagataagattatgaccggggagtatgatgaaagtatccgaaatagggtcagagaaaaggccattcacttgacagaactttcttcatttaaaggattacccttgtggcttgcctgttatatcgtatatgaccgccattctgaatccagagaaatcaataattggaaatcgcctgctgaaatagatgagtttctggctggctttaaacaacattcactacgcaacccgattgtggaacaggttgttttagaaactcttcgcactgttcgtgatatttggaaacagaacggacagattgatgaaattcatgtggaattggggcgtgaaatgaagaatcctgccgacaaacgcagaaaaatgagccaaaagatgcaggagaacgaaaatgccaatttgcgtatcaaggcactgctcgtagagtttatgaatcctgagctgggtattgaaaacgtacgtccttattctccctcccagcaagatttgcttcgcatttttgaagaaggagcgtggaacgcttcgtgtgcgaccgatgaacaatatgatgagatgctcgctatattgaagaaatttaatgagtcggatgccaagaagaggcctactgcatcggatataaaacgctatcgtctatggctggagcagaagtataggtcaccttatacgggtgttgttattcctttaagcaagctgttcaccccggcatacgaaattgaacatatcattcctaagtcccgctattttgacgattccttcagcaacaaggtcatttgcgagtcagaggtgaacaaactgaaggataatcagctgggctatgagtttatcaagaatcatcatggcgagaaggtccaattatcagccggggctacggttcagatactctctgtcgaagcttatgaacgactggtaaaagacagctacgcacaagctcgtgcaaagatgaagaaattgttgatggatgatatacctgagcaatttattgagcgtcagctgaatgatagtcgttatatcagcaaactggtgatttccttactctcgggtgtggtgcgtactgacgatgagcaggaggctgtttcaaagaatgtggtggtatgtactggtggggtaaccgaccgtctgaaaaaagattggggaattaatgatgtatggaataaaataatcttgccacgttttgaacggatgaatcaattgacgggtacttccgattttacatcttccaataccagtggacatgctattcctgccatgcctttgcatttgcaaaaagggttcaacaaaaaacgcattgaccatcggcatcatgcaatggatgctattgtgatagcctgtgcatctcgcaatattgttaactatctgaacaatgaatcggcaagcgaaaagagcaaaatttctcgctatgacctgcaacgcctattgtgcacgaaggtcaaagaaggcgaaggttatcaatggttggtaaacaaaccgtggaatacttttacacaagatgtgtatgacgtcttaaagcaattggtagtcagttttaagcaaaacttacgtgtcatcaataaaactgtaaattactatcagcgtaaggaaaatggtaaaacaattctatccaagcaaactaagggagacaattgggctatccggaaacctatgcacaaggatactgtttatggagaagttaatttgcgcaaagaggccacagctcccctcaaagtagtcatggctaatcctatgaaggttgttgacaaggatttgaaacataaattggtagagttgctccgcaaaggatggaatgaaaagcaaataaagaactattttgaagagcatcaggatagctggcaagaactgaatctgaagaaaataccggtttattattttactaaagaaaccaaagaacgttttttcgcttcgcgtaaggcgctagatgctacctttgatgaagaaacaattgaagggagtgttaccgatactggaatacaaaccatattgttgcgtcatttagaagcggaaggtggtaagccagaagtggctttctcgcctgagggaatagagcggatgaacaaaaatataacggcattgaatggtggacgcaaacatcagcctatttacaaagtgcgcaaatatgagaaggcagataaatttgcgattggacaaaaaggaaataaatcttccaagtttgtggaggctgctaagggcactaatctgttttttgctgtgtatgagcaggaacaggtcgataagaaaagtggtgaaatagtgaagaaacgtacctttgctacgattcctctgaatgtggcaatctatcgtctgaaaaatggactatcacctgctccagaagatgaaaacggtaaattgccggcatttatattatcgcctaatgatttggtctatgtacctactcccgatgaacttagggagaggaaatatcctgatggtgttaatcccgaacggatatataaaatggtgagctgtactgaaagcgaggcacattttgttcctgcaagcattgcaagtcctgttttacagatagttgaattgggaagtaataataaagcacagcgggcatggacttcagaaatgattaaggaaatatgtattccattgcaggtagaccgtttaggtaatatatcttttaaaatataggctgcatgataaagaaaactttgtattttggcaacccaacttatctttctttacgcaatgggcaacttgttattaaacttccagaagtggaacatagtgcttctcttccggaagtcatcaaacggcaggctgacattacaagagccattgaagatataggggttgttgtgctcgaccataagcaaattaccataacctctgggtgcatggaagcactgttggagaataattgcgcccttattacttgcgatagtaaaagcatgccagtgggactgatgttgccgctctatggcaatacaacgcagaacgaacgttttcggaagcagttggaagcttccctgcccctaaagaaacagttgtggcaacagacaatacaggccaagatacgcaatcaggcgatggttctggttgggtgtcgggaggaagaagtaaagtgtatgcatgtctgggctaataacgttcggagtggtgatcccgataatttggaggcccgggctgcagctttttattggaaaacactttttgtcgatgtagaagggttcacacgcgacagggagggtattcctcctaacaatcttttgaactatggctatgctatattgcgcgctgttgtggctcgcggattggtgataagtgggttgttacctactttaggcattcatcatcacaataggtacaacgcttattgtttggccgatgatattatggagccatatcggccttatgtcgaccgtcttgtttattctctttataaaagaagagagagtaatctgagtcttgacaaagaaatgaaagcagctttgctcaccatacctaccttagaagtgaatatcggaggcaaacgtagtccgttaatggtagctgtaggtcagactacggcttcgctctacaaatgtttcaatggagagctaagacaaatacgctatcctgtggaggaataatggagcggtttagtgagtatagggtgatgtggatattggtattttttgatttgccaacagaaacaaaaaaagagcgaaaggctgcttccgattttagaaagctgcttcagcgcgatgggtttaccatgtttcaattctctatctatgtgcgacattgtgccagtagtgaaaatgcagatgttcatatcaagcgagtccaatcttttcttcctctattggggcaggtaggtattctttgtattaccgataaacaatttgcacagattaagatattttatggaaagaaagctgttgaagccaatgctcctggccaacaattggaattattttgaaaaataaaatcctgcaaacttgcaggattcttccataatagaacaacaaatttattatttctaaaacttattttaatctattgaatcatagatggttgcatagaatgtgttgttctttataggtcaaagatactaatttgaaagcaaatcacaactatcaagtacccgtactggcaaaacaagagttgttctttataggtcaaagatactaatttgaaagcaaatcacaacagtttcaggcgtccgacttcatcggccgctgttgttctttataggtcaaagatactaatttgaaagcaaatcacaactgctcttgccaagcaatacgcgcgctattgttgttctttataggtcaaagatactaatttgaaagcaaatcacaacgggtagttgtggctacaggtataagttctgttgttctttataggtcaaagatactaatttgaaagcaaatcacaacagtaccgtaaattcccgaacgaagtgagcgttgttctttataggtcaaagatactaatttgaaagcaaatcacaactgtctggcctaacgtgtttgttctgcgcagttgttctttataggtcaaagatactaatttgaaagcaaatcacaacttcgttcattagttacgtttctgatgcaaagttgttctttataggtcaaagatactaatttgaaagcaaatcacaactgtcgcatgaaattccttttttgtcgcacggttgttctttataggtcaaagatactaatttgaaagcaaatcacaacagtcccgtatgacagatgaacaactttgtagttgttctttataggtcaaagatactaatttgaaagcaaatcacaacagaactgaataatttcagaatcagaactcagttgttctttataggtcaaagatactaatttgaaagcaaatcacaactttgcggtcacggtctgactacctttgtggttgttctttataggtcaaagatactaatttgaaagcaaatcacaaccaaacatagctaaatagttaagagttaatagttgttctttataggtcaaagatactaatttgaaagcaaatcacaacggaattctttctcgcaaagtattcggctggttgttctttataggtcaaagatactaatttgaaagcaaatcacaactaagcttacggcttttgtttatcaggaattgttgttctttataggtcaaagatactaatttgaaagcaaatcacaacagaagtaacttcgctgtgtgatgcggagtggttgttctttataggtcaaagatactaatttgaaagcaaatcacaaccagcttatctgattccacaacgcagcgaatgttgttctttataggtcaaagatactaatttgaaagcaaatcacaacgcgaatagaacttatatttttccgacagctgttgttctttataggtcaaagatactaatttgaaagcaaatcacaactacgcttttcttattaaaaagtgatggacagttgttctttataggtcaaagatactaatttgaaagcaaatcacaactaatgaggaagaggagattcttaaatgaagttgttctttataggtcaaagatactaatttgaaagcaaatcacaactatcagatcttccatgtcagtcacacggaagttgttctttataggtcaaagatactaatttgaaagcaaatcacaacaaaatttattgttatcaatgttaacttgcgttgttctttataggtcaaagatactaatttgaaagcaaatcacaactcacggttgggaggacttataggagtagcgttgttctttataggtcaaagatactaatttgaaagcaaatcacaactagctggcgctggcgtatctgctggcgctggttgttctttataggtcaaagatactaatttgaaagcaaatcacaactagtaaatgtgttgaagcaagctacattgagttgttctttataggtcaaagatactaatttgaaagcaaatcacaaccgaatgttacccgacaaacttgtacatcggttgttctttataggtcaaagatactaatttgaaagcaaatcacaactgatatatccttcagtcgaatgtttgtcaagttgttctttataggtcaaagatactaatttgaaagcaaatcacaacctgcggacgcgacagcaaaaaagataactagttgttctttataggtcaaagatactaatttgaaagcaaatcacaacttgtagcagtaagccccgatatcggaacaagttgttctttataggtcaaagatactaatttgaaagcaaatcacaaccatatatcccagagcctgattagacaagctgttgttctttataggtcaaagatactaatttgaaagcaaatcacaactctttggcatttctgctgctatcacctgacgttgttctttataggtcaaagatactaatttgaaagcaaatcacaacagtcgtggctagcctatcaagctgtggcgagttgttctttataggtcaaagatactaatttgaaagcaaatcacaacccaaagtacctttttatgtatgatggtttgttgttctttataggtcaaagatactaatttgaaagcaaatcacaactggacactagtcaaggcggtagcttgaggtgttgttctttataggtcaaagatactaatttgaaagcaaatcacaacaaatacaaagttgttgcatgtgcaataaagttgttctttataggtcaaagatactaatttgaaagcaaatcacaactcttcgaatgcttacggtaaaccacgttgcaaattttgtgaattagttccgaatcggtgctattcgtagtcgattcggaactaatagtatc

SEQ ID NO: 1293 - DNA, 18621 bp, synthetic construct
  source 1..18621: mol_type = other DNA
  misc_feature 1..18621: note = Synthetic
tctcgtagtccatagctttctccacaagcatggtcagatttgcaaaacgctgctcccctcccggaagtgcccttgcataatctccatacccggtttctttcagcacataaaggatcagttcgtgaaccggcgtatatgcagccatatttcttaccttttccagaaggctcagaaatccttttaatttaatattcagggaattcttttcattttctcctgcatatgcagaaacactctcatagagcagaccatcaggatactgtattctaagttctgccagttcctgggatgtgcatccgacgatcggtgaacgaagcactcccataagcggaatatcctgcagcggattgtcacacaccttaagataattcaatacagtcacaatctcggttgcagagaaatatcctgttcttgatgtacaatatacgggaatcccctgagatgccagtacttccctgaaggtttctgcccatccataggcagttcgcagcaagattataatatccccgtattccacaggccggtattccttcgtctctttatctacgatctgttcttttcccacaatttctttaattctctgtgcaatggccagcgcttccagttcctgcccggtctgattttccatttccctgcggtttcccgatacacctgagtcttcatagtcctgtcattatgtattcaatatcaaaggcaatagctacagactgattgtagtgataaaattcactataaagttcgtttatattcgttttataggcactcatgccgagtatgataagatagctgattgttcagttttataattaaacagaatcggcaattaccgatcaaccaagagccatgacaaagatagaaacaaaagctcaatacgattgggcagtaaaaagagttgaggaattacttccactggttacagatgaaacccctctggataatcctcacagtatagagttagaattactttctaatctcgttgcagattattctgaggagcatttcgcactgggagaaccaacgctggttgatgtcctcaaacttcgtatgtatgagatgggacttaatcagaaatctttagcaaaattaatcggagtcagtccttcacgcttgagtgattatatttccggtaaatgtgaaccgaccttgaaagtagcccgcgaaatcagccagaaattgaatattgacgccaatatagtactgggtgtttaatatgagtatagaaaacagaaaaaccgcttaattcaccatggaataagcggttttaagtcggagccgaaagcgggactcgaacccgcgacttactcattacgaatgagttactctaccaactgagttatttcggcaacgtgtttcgttgaaaacggttgcaaaattactgttttcttgaaaacagccaaataaaaaagagatttttttccgagaaactacatttttccagcccgtacaacccgtttccgttacatcgcaggagcatttgacacattattacgtgtaatttgtacaatagtcccttgtctgccttctgccgattttctacttttacccgcaaaatgaaacattacactaccatgaaaaagaaactgataatttcactgctggcactggcttcgctgggagccggagcacaaaacttgcaaaagggagactacggatacttgtactgccacatgagcggacgaggagaatggacggcctacgccctgagccgtgatggcgtacactttcacgacctgattgatggcgaccccgtatacaatgtagaagaaatgtcaaaaatagagggaggagcacgcgatgcctttatctgccgcacgtccgacggaaaaggctatctgatggtgactaccgacatgagcaacgccaagagccgctcgtggttcaactacggcatcaacctgctgaaaagtgacgacctgattcactggacttctaccaccttcgacttccgccggggaccggacattttctgtgaccctcagtcgcccgacgtctataaggactacagcaccatcaaacgcgtatgggcaccgcaaattttctgggacccttcgtacgtatggactgatggcacgaagggcggatacatgatatactattcactgcttaatccggcagaagaccagtacgaccgcgtgttctattcctatgccgacgccacctttacacgtctcactaaaccccgcctgctggtggactggggatatgctaccatcgatgccgacattaactatgtgccggccgacggactctatcacatgctcatcaagaaagaaggaggtacacccggcatctttgccgctacagctacaaaactgaccggtctttataaaataaaagatgaaaacgattatgtgaagtttgaaggcaacaaaaagtgtgagggctgctctgccttccagttggtgggcgactctacctggcgcgtggcctacatcgaatactcctccaaacccaaaagataccgcatctgtcaggccgacgagaaactctccaacttccactcccccgtcaccatggagggcgtgaaacatccgcagcacggctcgttcatgcggctcaccgaagaagaatacaagcgcctgcaggagtggtcggacagcatcatgcgcgaaagagccgcccgccacagcggagaaaagaagtaaaaagaggaaaatgaaatatttttgtaaaaacttttggcaaacatcctttcatttgagcagaaaacattatctttgcactccgaattatgacgtgacaaaagagtttgatgtattactgttcagcacatagtaaaaagaataagcgcacattcggagttccggcgaaatggacaaatgccggaagctatttcttttttcttttatgtcacttatttcctgaatatttaagatttcctattttttcaaacacccggaactgcttttcggcaagtccgggcgttttttcgtatatacgagagtagaatagaaaaaaaatacaagatataaagattattagtaacaaggtaatgagaaatgtaacattgatcctcgacgacgggagccgctttcatggcaagtcgttcggctatgagaaaccggtagccggtgaagtagttttcaatacggcaatgaccggataccccgaaagcttgaccgacccttcgtatgccggtcagttgatgacactgacttacccgctggtaggtaactatggtgtgcctcccttcacattcgaagcaaacggactgcccactttcatggaaagcgagaaaatccatgccgaagcgattatcgtaagcgattacagtgaaaaatactctcactggaatgcagtggaaagtctgggcgactggttgaaacgcgaacagattccgggcatcacgggcatcgacacacgcgaactgacaaaggtattgcgcgaacatggagtgatgatgggaaaaatcgtgttcgacgatgaaccaaataacattcccgaagctacctatgcaggtgtgaactacgtagacaaggtttcttgcaaggaagtgattcgctacaacgaaggcgaaggcaagaaaaaagttgtgctggtagactgtggcgtgaaatcaaacattatccgttgcctgctcaagcgcgacgtggaaatcatccgcgtgccctggaactacgacttcaactctctgcagttcgacggtctgttcatctccaacggtccgggcgaccccgacacttgtgatgcagccgtacagaacatccgcaaggccatgcagaacgaaaaacttcctatcttcggtatctgtatgggtaaccagctgctttcaaaggcaggaggtgccaaaatctataagctgaaatacggtcaccgcagccataaccagccggtacgcatggtgggcacagataagtgcttcatcacctcacagaaccacggttatgccgtagacaacaatacactgggagccgactgggaaccgctcttcatcaacatgaacgacggttcgaacgaaggtatccgtcacaaaaagaacccctggttctcggctcagttccatccggaagcttccagcggtcctaccgacacggaattcctgttcgatgagtttgtaaagttgctgtaatctactaaaaaacaaagaagacaatgaaagaaaacataaagaaagtattgctgttaggttcaggagccctgaaaatcggtgaagctggtgaattcgactactcgggttcgcaggctctgaaagcgctgaaggaagaaggtatcgaaaccatcctgattaacccgaacatcgccaccgtgcagacttcggaaggtgtggcagacaaaatctacttcctgcccgttactccatatttcgtagaaaaggtcatcgacaaggaacgtcccgacggcgtgctgctgtcattcggtggacagactgccttgaactgcggtgtggctctctacaaagccggtgtgttcgagaaatacaacacccgcgtactgggtactccggtacaggccatcatggatacagaagaccgtgagctcttcgtacagaaactggacgaaatcaacgtgaagaccatcaagagtgaggcagtagaaaacattgaagatgcccgccgcgcagcgaaggaactgggttatccggtcatcatccgtgcagcttacgcattaggaggtctgggttcaggtttctgcgacaacgaagaagaactgaacgtgctggccgaaaaagcgttctctttctctccgcaggtgctggtagaaaagagtctgaaaggctggaaggaagtggaatacgaagtagtgcgcgaccgtttcgacaactgtatcacggtctgcaacatggaaaacttcgacccgctgggtatccacaccggtgagtctatcgttatcgctccgtcacagacgctgaccaacagcgaataccacaaactgcgcgaactggccatccgtatcatccgtcacatcggtatcgtgggtgaatgtaacgtacagtacgcgttcgaccctgaatcagaagactaccgcgtaatcgaggtaaatgcccgtctgagccgttcttctgcactggcatctaaggctacaggttatcctctggctttcgttgcagctaagttgggattgggttacggactgttcgacctgaagaactcggtaacaaaaacaacttctgccttcttcgagccggcactggactactgcgtatgtaaaattcctcgctgggacttgggtaagttccacggcgtagaccgcgaactgggctccagcatgaagtcggtaggtgaagtcatggccatcggacgtaccttcgaagaagccatccagaaaggccttcgtatgattggtcagggcatgcacggtttcgtggaaaacaaggagctggttatcgaagacatcgacaaagcactgcgcgaaccgactgacaaacgtatcttcgtcatctcaaaggctatgcgtgcaggctacacagtagaccagattcatgacctcaccaagattgacaagtggttcctcgacaagctgatgaacatcatgcagacttctaaggaactccacgagtggggcaacaaccatacacagctttcacagcttccgaacgagctgctctacaaggcaaaacgtcagggattctccgacttccaggtggcacgtgccatcggctacgaaggcgatatggaagacggtatcctggaaatccgtaaccaccgtaagagtgtaggcatcgtgccggtagtaaaacagattgacacgctggcagccgaatatccggcacagaccaactacctatacctgacttacagcggcgtggccaacgatgtacactacctgggcgaccacaagagtatcgttgtactgggttcaggtgcttaccgtatcggttcatccgtagagttcgactggtgcggcgtacaggcactgaacaccatccgtaaggaaggctaccgctcagtaatgatcaactacaaccctgaaaccgtatcgaccgactacgatatgtgcgaccgtctgtacttcgacgaactgactttcgaacgtgtgatggatatcctcgacctggaaaacccgcacggagtcatcgtatctactggcggacagattccgaacaacctagcattgcgcctggacgcacagaaggtaaacatcctgggaacttctgccaagagcatcgacaacgctgaagaccgcgacaagttctcggctatgctcgaccgtatcggcgtagaccagcctgaatggagcgcactgacttctatggaagatatcaacgcatttatcgaaaaagtaggctttcctgtattggttcgcccgtcatacgtgctttctggtgcagccatgaacgtatgttctaatcaggaagagctggaacgcttcctgcagctggccgctaacgtgtcgaagaagcatccggtagtagtaagccagttcatcgaacacgctaaggaagtagaaatggatgccgtggcacagaacggtgaaatcgtagcttacgccatctctgagcacatcgagtttgccggtgtacactcaggcgacgctaccatccagttcccgccgcagaaactgtacgtagaaaccgtacgccgcatcaagcgtatctctcgtcagattgcgaaagagttgaacatctctggtccgttcaacatccagttcctggctcgtgaaaacgacatcaaggtaattgaatgtaacctgcgtgccagccgttcattcccgttcgtcagcaaggtgctgaagattaacttcatcgagctggcaaccaaagtcatgttaggcttgccggtagaaaagcctgaaaagaacctcttcgacctcgactacgtaggtatcaaggccagccagttctcgttcaaccgtttgcagaaggccgaccctgtactgggtgtagacatggcttctacaggtgaagttggctgtatcggcgacgacacttcatgtgccgtactgaaagccatgctgtctgtaggctaccgcattccggaaaagaacgtcctgatgtctaccggtacactgaaacagaaagtagatttgcttcaggcagcgcgcgccctcaaggccaaaggttacaacatcttcgctaccggcggttcttctaagttcctggcagaaaacggagtggaaaacacccgcgtatactggccaagcgaagaaggtcagcctcaggcactggaaatgctgcacaagaaagaaatcgacatggtggtaaacattccgcgtgacctcactcctaccgagctggaaaacggatacaagattcgtcgtgccgcagtcgacctgaacattcctctggtaaccaatgcccgtctggcaagtgcattcatcaatgccttctgctctatgagcattgacgacatcgctatcaagagctgggacgaatacaaataatccgtaccgcttaaaaatatagataaaattaatcccctccggaactatttgtaatgaatgagttctggaggggatttttatttatagaaaatacaaaacaataaaaaagcccaccgataaaggacgatgggcaagcgcctaaatgttttcacaacggaataatccttattgtgatttgcttcattttagttttacaaaagtaaaaagaaacaatacaaaagacaagtttttttcataaaaaattagtagttttgagaaaattgaaaaaatacaactatgaaacacattttaggtttagacttaggcacaaacagtataggatgggcagttatcagttcaagctttgacgaaacaacccaaaaagaacaactaaaaggtatagaggctgcaggaagcagaataattcctatggatgccgcccaattaggagacttcaataaaggaaatacagtttcacaaacagccaaccgtactcaatttcgtggagtacgccgattatatgaacgcaaaaaactcagaagagaaagactgcatcgcatcctacaattattaggatttcttcccaagcattatgccaaccaattagacaggtatggaaaatttattgccaattctgagccaaaactcgcttggacaacaaatacgcatggacttccttactttatctttcaaagttcatttcaggagatgctcaatgactttttacaaaacaacagccaaataaaaaaagttccatacgactggactttgttttatttgcgcaaaaaggcattgatacagaaaattgaaaaagaagaattagcttgggttttattaaatttcaatcagaaaagaggatactatcagctgcgcgaagaggaaacagaaaaagcatcttctaaaacacggcaatattttgacagccagattgtaacagatattactgacacagggcaagtttataaaggattaaaaatattcacaataacacttgaaaacggagagaaaggaaagtttttcagtaaaaacatgcccgactggaaaagtcagaaaaaagatattattgcaatcatagaccttgataaaaacggaaatgacaaatatgatgaaaatggagagttaagccgtcgtttcaaaattcctaccgaacaagaatgggaagaacagtgggagcttattaaaacaaaaactcaaaaagatcttgacacatctcataaaacagtaggcgcatacatctatgatacactattacaaactcctagccaaaagattcggggaaaattgattcgcaccattgaacgcaagtattataaagacgaattaaatcagatattaaagaaacaagaagaatttcacccagaattgcgagactccaatttattagaagcctgcattgaagaactgtatcctaataacgaagcccatcgtaatgctattgcaaaatatagcattgcccaattgcttattgaggatattttattctatcaacgtccacttaaaagcaaaaaatcgcttattagtaattgtccttacgaagaatacacatacatcaataaagaaacaggagaaatatgcacttctccgttaaagtgtatagccaaatcacatcctctttttcaagagtttcgtctatggcaatttatatcaaacttgcgaatttatcaaaaggaaggaaccataaacggaaaattcactactgacatagatgtaacaagtcaatttctgaaaaccgaagatgcctacgcaaacttgttcgactggctcaatcagaaaaaagaaatcagacaagacacatttcttaaaaacccagcatttggattaaaaaagaatacagcaaattatcgctggaattatgtagaagacaagacatatccttgtaatgagactcactacaagatactttcatattgggaaaaagcaggaatagagcaatcagccttaacatcagaaatagaagagaaactatggcatattctatactctatttctgacaagaatgaactcagaaaagctttacagcatttcgctgataaaaactatttaagcgataaatttgcagatacttttcagcaaattcctcctttcgagaaagattacggttcctattctgccaaagctatcaaaaaactattgccacttatgcgtataggaagatattggaaagcagaaaatttcgacagtacaactcttgaccgtatagaaaaaatattaactggagagtttgaagaaaacataaagaaccgaaccagagaaaaaacaatccatttggacaatttatactcatttcagggacttccaacctggctggcatgctatatcgtatataaccgccattcagagataaaggacgttactaaatggcaacaaccttcagatattgatgcttttctaaacgcattcaagcaacattctttacacaatcctattgtggaacaaatcatcatggaaaccttacgcactgtacgagatatttggaaacagacagggcatattgatgaaattcatgtcgaattaggacgtgaaatgaagaatcctgccgagaaacgcagaaaactcacccaacaaatacaagaaaacgaaaacaccaatctgcgtatcaaggcacttcttgctgaatttgccaatccagaattgggaattgagaacgtacgcccgcactctccaagccagcaagatttattgcgtatatatgaagaagaagctctaaacgaaactaaagatataccagaagatattgctgttattttaaagaaattcaatgaagttgataccaaaaaacgcccgtctacatccgatgtcttacgttataaatgctggctggaacaaaaatatcgttctccttatactggagctatgattcctttaggaaaacttttcacccctgcatacgaaattgaacatgtaattcctcaatctcgttattttgatgattcattcacaaataaagttatttgtgaagcagaagttaataagctaaaaggcaatatgttaggctatgaattcatcaaaaacaatcaagaaagaatagtagaactaggattcggacaaaacgttaaaatacagacggttgaagcttatgagctatttgtgaaagaacattattcctacaaccgcactaaaatgcaaaagctattgatggaagatattccagatcagtttattgaacgtcaattaaacgacagccgttatattagtaagctaataaaatcattattatctaatattgtacgtgatgaaggagaagaagaagctacatctaagaatgttattgtttgtactggaagtatcacagaccgactaaaaaaagactgggggatcaacgacgtatggaataaactcattttacctcgtttcatacgcttgaacgaaattacggaaagcaatcgctttacgacaaccaatgcatgcaacaagacaattcctgctatgccattagatttacaaaaaggattcaacaaaaaacgtattgaccaccgccatcatgccatggatgccattgtcatagcctgcgccaatcggaatatagtcaattatttaaataatgaatcagccagcaagaatgcaaagatttcacgtcaagacctgcgacaaatattatgcaagaaaacaaaaaccgacaatttgggaaactatcaatggctcattgacaaaccttgggatacatttacccaagatgtgtattccattttaggcaacatcattgtaagcttcaaacaaaatctgcgtattatcaataaaacaactaaccattatatccactatgaaaacgggaaaaaagtaagttgctcacaaaaacaaggtgatagctgggctatccgtaagcccatgcataaagaaaccgtatatggagaaatcaacctgcgcagaacaaccactgctacattgaaagccgttcttgagaatcctcaaagaattattgaaaaagacttaaagaaaaaaataaaagagcttttaacgcaaggactcaatgaaaaacaaatcaaaaaatactttgaagacaataaagatatttggcaagaaataaatctaaagaagataccagtatactatttaccaaagaaactgccaacagattctttgcttgccgtgaatcaataaatacaactttcaataaaaagaaaatagaagaaaaagttgcagatacaggaatccaacaaattttactgcgccatttggagcagaatggcaataatccggaacaagccttctcacctgaaggtattgaacaaatgaataaaaatattatgtccctaaataataatggaaaatttcatcaaccaatttataaagtcagaacatacgaacaagccgataaattcgctgttggacaaacaggaaataaatccactaagtttgtagaggcagcaaaaggtactaacctgttctttgcaatatatgaaactgcccataaacgcagtttcgcctctattccattaaacgtagtcattgaacgactaaaaaaaggcttgtcaccagcacccgaaaacgaaaagggtaatctacctaaatttatattatcacccaatgatttagtatatgtaccaacaaaagaagaaatagaaaatggacatattaatcaaccaatacaaaaagatagaatttataagatggtgagttgtactgaaggggaatgtcatttcattccatatttcgttgcaaagcccataattcaaactattgagttaggaagtaataacaaagcacaaaaaacttggcaagatgaaatgataaaagaaatatgcatccccatcaaaacagacagactaggaaacattataacgtcaattagcctatgataaagaaaacattatattttggtaacccagcatacctatcattacgtaatgcccaacttgtcataaaacttccggaagtagaaaaatgtccttcacttccggaagcgatgaaacgtcaatctgaaataaccaaacctattgaagatataggcgttgttattttggataataaacaaatcaccattacttccggagctattgaagcattgcttgaaaataattgtgcacttattacttgtgacagtaaaagtatgcctgtaggattaatgctccctctctatggaaacactacccaaaatgagcgttttcggaaacaactggatgcttctttgcctttaaagaaacaactatggcaacaaaccattcaagcaaaaatcaacaatcaagcatcttccttatccatatgtataaacgaagatataaaatgcatgcgtatatgggctaacgatgtacgaagtggagaccccgacaatctggaagcacgtgctgcagctttctactggaaaacactttttcatgacatcgaaaactttacaagggaccgagatggcataccccctaacaatcttttaaattatggttatgccattctccgtgcagttatcgcacgttctcttgtaacaagcggattattacccacattaggcattcaccatcataaccgatacaatgcctattgcttagcagacgatattatggaaccatatcgccccttcatagaccggctagtctatcaactatactctgaaaacaaaatggaacttacaaaagaagtaaaagccagtttattatccatccccacaatagatgtcagaatcagtgggaaaagaagtcctcttatgatagcagcaagccaaacaacggcatcactatataaatgcttttctggagaatcacgaaaaatcatttatcctgaattctaatggaacgtttcagcgaatatagagttatgtggattttagttctttttgacctaccaacagaaacaaagaaagacaaaaaagcttatactgattttcgcaaaaatctacaaaaagatggattcacaatgtttcaattctctatctatgtacgccattgtgcaagcagtgaaaatgcagcagtgcatataaaaagagtaaaatcctttctacctgaatatggtcaagttggaattatatgtatcacagacaaacagtttggagaaattgagctattttatggcaagaaagcaagtggggtaaaaacaccaggacaacaattagaactcttttaaaataataaatcccatggttaatatgggatttattatttcaagaaacaactttttctttttctaaatttacttataacctactgatagacaacaagaaacaatcaacaagttgtttctaatggttcaaagatactaaaatgaaagcaaatcacaacgtgatatccgtatgggcttacaagtgatttgttgtttctaatggttcaaagatactaaaatgaaagcaaatcacaacggctgcgtctgagcgcaaaaattctgcgagttgtttctaatggttcaaagatactaaaatgaaagcaaatcacaacgtaggaagtgtataagaatgtggatattaagttgtttctaatggttcaaagatactaaaatgaaagcaaatcacaacggtactgtccgttttaggattttctaatagttgtttctaatggttcaaagatactaaaatgaaagcaaatcacaacttgatttgaatataaaagttatgaatatagttgtttctaatggttcaaagatactaaaatgaaagcaaatcacaacaggtaagataatgttataataaagttgaaagttgtttctaatggttcaaagatactaaaatgaaagcaaatcacaacttctcatatccaattcatatcaatatatctgttgtttctaatggttcaaagatactaaaatgaaagcaaatcacaaccggtacttaaagataaagaacgtggaattagttgtttctaatggttcaaagatactaaaatgaaagcaaatcacaactaagagattataaagcaaattagttgtgtgttgtttctaatggttcaaagatactaaaatgaaagcaaatcacaaccgaaggtgtgttccaggatttctatgtagcgttgtttctaatggttcaaagatactaaaatgaaagcaaatcacaacaagatagaaagtgaattgaaaggttgatatgttgtttctaatggttcaaagatactaaaatgaaagcaaatcacaacaagaagtacgaagaatagtatgagagttagttgtttctaatggttcaaagatactaaaatgaaagcaaatcacaacatattgatttttttcaagatttgagaattagttgtttctaatggttcaaagatactaaaatgaaagcaaatcacaacttgttgaagaaatattgttgcaattagaaggttgtttctaatggttcaaagatactaaaatgaaagcaaatcacaacatagtccacgcgaggtgtaatactagcaagttgtttctaatggttcaaagatactaaaatgaaagcaaatcacaacattatgaatgtatatgtagtgaattaaaagttgtttctaatggttcaaagatactaaaatgaaagcaaatcacaacttatagctaaagagatttgtgagcaaggaagttgtttctaatggttcaaagatactaaaatgaaagcaaatcacaaccaagtttttccatatcatttcattttaaagttgtttctaatggttcaaagatactaaaatgaaagcaaatcacaacacgccattaccttaccgataaattcaggagttgtttctaatggttcaaagatactaaaatgaaagcaaatcacaaccaatcctcaaatatccgtctttatatttcgttgtttctaatggttcaaagatactaaaatgaaagcaaatcacaacgtaaagatgtttgtatagtgttatttttgtgttgtttctaatggttcaaagatactaaaatgaaagcaaatcacaacagagatagagcgttttataataattgataagttgtttctaatggttcaaagatactaaaatgaaagcaaatcacaacaaaacgtaaataaactataatatatttaaggttgtttctaatggttcaaagatactaaaatgaaagcaaatcacaacagctttaattgattactttttggtattatagttgtttctaatggttcaaagatactaaaatgaaagcaaatcacaactataagtaaaagctaaacttctaaagaaaagttgtttctaatggttcaaagatactaaaatgaaagcaaatcacaaccttctcagcttggttatgttcctcgctatagttgtttctaatggttcaaagatactaaaatgaaagcaaatcacaactctccgtgtaggttattggagcaccatcctgttgtttctaatggttcaaagatactaaaatgaaagcaaatcacaacttgttttgcaatgatagtgatgcggtaagagttgtttctaatggttcaaagatactaaaatgaaagcaaatcacaactcttggctgcctgtgctcttgtcagttcgagttgtttctaatggttcaaagatactaaaatgaaagcaaatcacaacgcggtcgatgctgataaggctgaccatttggttgtttctaatggttcaaagatactaaaatgaaagcaaatcacaacatatatggtactgttttcattgcattaaatgttgtttctaatggttcaaagatactaaaatgaaagcaaatcacaacacaagaagacgggagctcttggagtgatagttgtttcccgttgtttaaagatactaaaagtttttctatatttaaatatcatttgtccctataataacacataaaaagctgcctccacaccagagtgttggagacagcctttcttcattaataaaacctataattaatcaaccaaagggaacataaagccttttccatcattgtcgtcaaacttagcccctgaaggaagagggagatgtttggcattgttactgaaatcccaaagcatggtttcgtcctcggtgatttctcctgtttcaaggttgcgcttctttccgttcaacggataatacagcagcagattttcgtcacttccgtctaccgttttccacatgaactgcttcaactgctggggtgtgcgggctgtcttccagaaacggatttcacgaaccagctcattcgtaccgccaatccagaaacccaccagaccgtaaggccctgtacggatttcacggtcggccaccagttcgccattcacatatacgtaatttttcttaccgtcgtacacgaaagctatcatgtaccaggtgtcgggctgcgctgtaaagacatccgccggcacgtcaatctgagaaccaccagtcttaaactgaagttggtcgggacggatagtcacgtcaccgaagcgaggatagatttcatcgagtgcaccggacccagacacgagtttggtaccacagatggaacggttgttgctctggtatgcactacggttcaccataacctccatcgtccactggtccaccttgaaatcgtccgggaacatcttggcatcttcactgccgtatccgtcaatgcgaagacacttcgtcttgatgcgctgctccagtacaatcagtgattcagattcactgtcaatcacgggtaccgtaccgccccccagttttaccggcaaggcgtagcttccctgcaaggagaatttcacatccttgaactttaccggcagatattgcagtgtctgcttggagttgaacaccacttccttgcccacctcatacatttcgggcggaagcatcaggtaatccgttccgtgcttcttgttgtatgcttccagctgctccttgttgccggcctctaccgtcaccgtcttagtatcattttcctgctgtaccagtgatacggtgatagacttcacgtcgacttcctttccttcttccacgaatacctgagaagattcgccagtcttgatgtaagccccctgtgccgaccggtactcactggttgcatccttgtataattcattctggcaggaacaaatcagcaaggttcctgcgaatatgctgaaatataaattctttttcataattcaaattttaatctaacttacccggataaaccacatttcccaagcgcaaggcttctctgagccatttgtaaggaggtgtatttccatagtcgtattccatgtgatacgtaccgatgccaccgatgcgtctgccgtcgggaaggtccagcgtggcataatcaaaaatctgacgtccttccggataagcattgatttccggacgtacgctggtgtactcatctactccacctgtctgccagccttgctcaaactctacggtgataatggtcttccgctcccagttttcaaggtgaggctgattgattttcctaaggacctgtgcggtggaacgttcccagtatgcctgataaatatagtggtcgatgtacttggaagcctcggtagaaagtttctcaggctgaccgtccattaccagcattctgccggccggacgcaaacggtctgaaagggttttgataaatacgaacatgtccgtattgcccgaagtttcgctgatcatctcaccgttggccatcgaacctgaatgaccatagccgggctcatagtcaatgtcgaaaccgtccaggttgtacttctcaatggtatcgcagatggcatttgcataggccttcacgccttccacaaaattgccccctcctttttcttcaatccagtatttcttcggttcctgtcccggaggagtcatctggtcgcccaggtcctgtacaatccagcacaacagcgcttttccgcccttgatttcctgaaagaacttcaagtcttttttctgttcttccgaaaggtttccacgcgtaccccacaaggatacgaagtccacgctgtcgggcagcatcttcaggtagttctgcgcattgctgcctcgtccggtccagttgccgaaccagccgaatcccttcacatgaggcgcctgacggtattctctcagtttggcaaaatagtcacgcatggagggagtcaggtcggcttcactttccgcctccagcaagggaatgtatttttccaggttctcctggttttcgaacgtttctctttcaggcatgttccattcggaacaggccacgaagcctgccgccagcagcagggctcctgcatatcttatgatttttttcatcgcttcatttgttacacttttccataaaactcatttctcatttcggctgtttgggacggttgttgcgcacccaccacagcttggttgctccctggtcttccccacccagcagcgcaggcacttccgacatgttgggatttgtaccatattctgccggagcaaagcggaatctttcgggcgtaatggcatcttcttcacctcctatgctcacgtaagctttgtcataagccggtttgagcaggtaaggatagcccgtccggcgatattcagtccaggcttccac

SEQ ID NO: 1294 - DNA, 18603 bp, synthetic construct
  variation 16782..16803: note = n is a, c, g, or t
  variation 17812..17926: note = n is a, c, g, or t
  variation 16448..16555: note = n is a, c, g, or t
  misc_feature 1..18603: note = Synthetic
  variation 16953..16966: note = n is a, c, g, or t
  source 1..18603: mol_type = other DNA
  variation 18076..18144: note = n is a, c, g, or t
cgcaggaatcctctccgaaggctattccgacattgatgcccgcggacggatacgcagtttcctggaagactcccggcctggagaatgctttttcgggaaggccctcccggtagattctctcagggtcatcggaagcactcagtccccttccatcaaacgcatagcctacgtcacgaaccataggagcgacaatttctacgcagagacccttcttcgaactctcgggcgcgagaaaaagggctccgcctcatacgcaagcgccctcgcggcggaaaacgaggagctggaggctctcggtctggacacttcccacggcatccatgtcgtggacggttccggccttgcccgccacaactatatcgcgccggaatttttctgtcgtttcctcagggccatgatggactgcaaagtcttcggcgactatctctacaccctcggacagcctggtaaaggaagttactcgaaccgcctcaaggatgcgcctgattccgtcaaatccagaatccgttacaagagtggctccatgaacggagtcgtctgcttcagcggctatatcgagccgtctgacggagaaaaagaccacacaatcgtcttctcggtgatgaccaacaatttcaccggcccttcatggaaggcctactctttcattgacaaagtaatagcccgtctggcgggggaaaactgataaggcgggctggaaagagacttgacgatcaatacggggaaagctgatggaagggagatataacagtgcggccggctattttaagcgcacctatggggagcgtctccagaaacttgtggtcgacgcgggcttcacctgcccgaaccgagacgggacaaaggggcgcgggggctgtaccttctgcgacaacgccgccttccatccgggctacagcaccccggacaaaccgataagacagcagcttgacgaggggatagagttccatcgcctcagatatcctcgcgcacgacactatctcgcttatttccagccttttaccaacacctatgctccgctggagcgcctcaggtctctctatctcgaagctctctcgcatccttcggtgacgggacttgtcataggcacccgcccggattgtgtcgatgaagaaatactcgatttcctcgcggacctcaaggacggaaagattctgaaagattggcggcgccttctcccgggtccggacggctcggggatggaggtaagcgctccgctcctcaccttggaatacgggattgaatcttgcaacgaccagactctcaggcgcatcaaccgctgccatgatttcgcctgcgcgcggaaggcggtggcgcttacctctgaaagagggattgattgcggggctcattttatactcggccttccgggggagacactcaagatgctcctctctgagtgcgataagatttcagccctgcctctgcgcacggtcaaattccaccagctccaacttgtcaagggaacgaggatggaaagagagttcgccgaaaaacccgcagatttcctccggctcggtctcgaggactatctcgacttgattacagacatgctggagcgcctccgcccgagcctctgtatcgaaagaatcgcgggtgaagtcccgccacgttttctcggggagacccagtgggggcttctccgcaatgtggatctgatacgccgtctcgaggcccggctggaagagagagacaccttccagggccgcctttacaggcccctgcctgaattgtccggccccgaaagccctgcctgaattcctggattatcctgtccggaggaggagaaatacttgcttcttgactcttcagaggggaaaagattaacggaatattttgtatatttgccaaatttaagtaccgtcctatgaaattagtaacctcagagattcctgaaggcctgaccttcgatgacgtgctcctcgtaccggcgcactcagatgttcttccgagagacgtggacgtctccactatgttcacgcgcgatattcctctccatgtccctattgtctcttccgccatggatacggtgaccgagtctgctctcgcaatcgcaatggcaagagccggcggcataggagtgatccacaagaacatgaccattgaaaggcagtgcgaacaggtgagagaggtcaagagggcggagaacgggatgatctacgacccgatcaccatcggaccggaccagacagtgggcgacgccctcaaactgatggccaggaaccatatcggaggcatacctgtcgttgactcaaaccgtttcctcataggaattgtcaccaaccgcgacctccgtttccagacgaacatgaagcagaagatctccgaagtcatgaccaaggagaacctcgttacggccaagaagggaaccacgctccaggaggcccagcagatcctgatgcgctacaaggttgagaaactgcctgtggttgacgctgaaggccgtcttgaaggcctcatcacctataaggacctcatgaagataaaggacaatccgatcgcctcgaaggacagcaagggccgtcttctggtcgccgcggcagtcggagtcaagaaggacacgaacgaaaggattgaaaggcttgtcgccgcaggagccgatgcagtcgtaattgattctgctcatggccatagcgaaggcgtgctgaaggtcatagccgatgcatgtaagtctttcagccataaggatatacagatagtcgccgggaacgtggctacggcggaaggcgccaaggccctcgcggacgcgggagttgacgccgtaaaggtcggaatcggacctggctcaatctgcaccaccaggatcatcgcaggaatcggaatgcctcagctcactgctgtcctccttgcttctgacgccctcaagggcaccggagtccctgtaatcgcagacggaggaatccgctattccggcgacatcaccaaggccatcgcggccggggccagcaccatcatggcaggctccctcttcgcaggcaccgaggagtccccgggggagaccatcattctcaacggacgtaaattcaaggcatacaggggcatgggttctctcgaagccatggaggccgggtccagcgaccgctacttccaggagaatgtcagcgatgtcgggaagctcgttccggaaggcatcgtagcccaggttccgttcaaaggttcggtttccgaggtcgtgtatcagctcgtcggcggactccgctccggcatgggctactgcggggccaggacgatcaaagatctgcgcaaagcccagttcgtccgtatcaccaatgccggctaccttgagagccatccgcacgacgtcaccataaccaaggaagccccgaattattccaggtagttgaagttcaagagattaatatcggccgttctgacggtctttccggtcttgctggtcggctcctgcaagaccatatcttcttttgtccatgagggcagggcagtagcgagggtcggaaggcacaagctctacagcccggaactggacgcctacatcccgaacggaattcctcccgaggacagcgtcaagatggccagacaatacatcgagacctgggcttcggacatgctcttcatggatctggcccaggaagagctgagtaagtccgacctggatgtgtccaaggaactggaggactacaagaggtctctgatcaaatacaggttcgagcagaactatgtcaacaaaatgctcgatacgacgatcacctccaaggaaatccagaactactatgaaagccatcaggacaatttcagactgcagaggcctatagccaaggctactttcatgacgataccccagggctcgcccaatctcgacgctataaggaagaagatttcctcggacaaggacgaagatctcttactcgtggacagtctcgccttcgcctccgccataaggacgacgaattacggaggcaaatgggtcgacgtcacagccatcgcccgagatttcgggacggattgggaaacggtcaaggctcacagcaaggaaggggtcgtggagatgaatgacgataatggcaatgtgctcatagcctacatctcttccatgatgccggcaggggagactgccccaatcgaattctgctccgaccagatccgcgacataatcctcagcaacagaaagcatgaacttgtcaccggtttggaacaagacttgttggataaagcgaggactaaaggcaaatttgagacatacgataaagatgaacaagatacttgagaccgctctcgccgcggcggccatgcttcttccgctttccggccaggcgcagacttacccggccgggctcattgacaagaccatagccgtggtcggcaatgagaagatcagcatcagcaacattgaggatgagattcagtacctcagggccaacggacaatattccgacaagaacatgcgctgcaatcttctggagagcatgctcgagtcgaaacttttcctcatgcaggccagaatcgactctctttccgtgaaccaggatatggtcgatgctcagctcaaccagagaatcgacaacgtgcgcaccgccctcggcggagacgacggcgtcgagtcttacttcggcaagtccctctacaagctgcgccaagattggaagacgaccctggaagaccagagcctcacccaggaggagcagaggaatgtggccggaagcatcccggaaatcactccgtacgatgtcaggcagtatctcgccgagaccgactcggcagacctcccgattgtccctatccgctaccaactgagtcagatctgcatctatccggaccgtgaagcggccaacctcgcagtcaaggacaaacttctggccctccgtgaaagaatcatcaacggcgagaaattttccacccttgcccgcatctattccgaggaccctggctccgcgcgccgtggaggagaactcggcatggcctcgaagtcaaccttctggccggccttctccgacgtcgccatgtccctgaaacctggcgtcgtatctcagatagtcgagacccctgacggcttccacctcatcgaggtcatcgaaaagaaaggcgatatgttcaatgcaaggcacatcctcatgaagcctcagtacaccgatgccgaccgccagaaggccttcaagaccctcgacagcctccgcaccgagattctcaacaaggccgtgaccttcgaactcgccgcgaaattctattcccaggacgaagcctcgagaacaaacggaggccagatggccgaccctggcactggttcttcctattttgagatcgaccagctcaaggctcaggactatgcggcgctcaaggacctcaaagagggggagatctccatgccttacgagtcgcttgacaatgagggccgcaacggcaatacagtctacaagatcatccgtctggacaagattatcccggcccatactgcatccttcgaacatgattactccgagcttctcgatgagactcgcaacaagcttgcaaccaaggctatagacaagttcctcaacgaaaagatctctgctaccaagatttacatcgaccctattttcaaggactgccctttctctagggaggcttggaagaaggttgccgaggaatcagccaaagaacaatagcggtagatgctgagaagacttctggccttcgccgcggcccttcttacggccttgcagctttccgcccagactgcgaaaaagtctgagcaggattccctcgtgagtcttatcagcgcaaaatccatggagcttttcgacaaggacggcgaaagtttcagaaaggtcaccggccccgcccagttcctccataacaacacctacctcatctgcgacacggctctgtggaacgtgaacacggaggaaatctatgcgataggccatgtcaagattcttcaagaaggaactcagctgacgggggacagcctgaaatattacatcaaccagaatctggcagaattcaggggacacatcgtccagctcgaggacaaggaccgcaacatgttgaggaccagaaatctggactacaacaccaaggattccgtcgccatattcaggaatggcgggtccatgaagagctctaagggcgatgtcatcgaaagccgcagcggaacctacgacagcaagatcaaccagttcactttttctgacaacgtcaacatgttcacggattctgtcttcgtgaacacgacgagcctgacctattacacggacaccgacctcgccgaattcggcctctttaccaatgcttggaaggacgagagtatgttgtcttcgaacggaggctggttcgacagaccgaagaatctctttttcttcacgaatatggtccatgcccaggacacttcgaaggaagcctgggccgacagtctcttctatcaccgcaacacgggagaccttgaagtcatgggcaatgtccaggttacggacacttcccgccatgtgaccgccttggcaggtctggcttcttacgtggactccatttcgaccctcaaactccagagggatcctgctatagtggggcgcgtggctcagaataatgacggtaaggatacagtctgggttgccggagacaccttgatttacaggaccttgatgaagtttcaggtcccggagtcggattctctggaggcggccaagaggctcgaagatctcgctaccgatgccgtgatgagttaccggcgccgtgccgccgaggaagcggctgaagccgcaaaaaaggctgccgaggaaaaccagaacgcccagtttcaggaccgcgggccccaggccgcccgcaagccggacaaggccgggaacgccgagaaatccgcagggccaggagaggccgtcagaggcggtcagctgccttcagtcccacctgatacggtcagtcatgaacctaaaatccctgagccggccctcccaacagccgactccatgaccatgaagcaagactcgaccgctcttgccatgaccgattcccttgcggcgaccgattcccttgtcgcggccgatacccttgcggcgaccgatactcttgtcgcggccgatacccttgcggcgatcgatactcttgtcgcggccgattcccttagactcaaagccgtcgccgattccatagccgccctcccgaaagattcgaccagagtggcatacatcagtggccttggccgagtcagagtctacaggtctgacatccagatgtactctgactccttgcagtacaacgacctggactccctcatccgcctctatgacaaaccgatagtctggaacgaagacgtccggcaatacagcgccgacagcatctttgccgtcatccatggcggccgcctgagcaaagccagcctcatgtccaacgccttcataatcatgcaggagtccctcgacacaaactgctatgaccagatccgaagtaccgaaatgctggcctacttcgactctaccgcaggcaagctctcgcgcttcgatgccctgggagatgccagcgccatattctacatcaaggaagacagcgtcctcgctacagtcaacaagagcgccgcaaagatgctctatgcctccttcaaagaaggaaacatcgaccggatccactacttcgaatcagtcagcaacgacgcctatccgagagcccagatgaccaaggaagaacgagtcttgaaaggcttcagttggcagccagacaaacggccgaagagccctctcgatatcacaagccgaaagatacgcgaatcccagatggaggaatattcatccagagtgcgtccgcgctatatagagaccgataaatattatcctggctacatttcgggcatctataaagaaatcgccaagcgcgattccctttcccgtgcccatgccgcctgggagaaagagcggaaagccttcctgcaggattcccttgccacggcagaagccaccctggtcctgcgcgactctctggccctgcgcgactctctggccctgcgcgactccctcgccctgcgcgactccctcgccctggcctccaagaactctgcagctgactctctcgccacccttgccgcagcagattccctcgtggcaatagattctatcgccgccactgacatccttaaggccctttccaagaaggaactccagaaacaacagcgcgaagctcactcgaaggcccgtgcccaggctaaggcgtccaaacttgccgccaaggagcagaggtgggcccgtctggacagcctcgattcggtgaaggcccaggccaagctcgacaaaaagaccgccagagaccgggcgaagaaattcgaggcatacaagcgccagatacatcaagaccagaaggacaaggccaaactcgaacgctacaaggcgcattattcggaacggaaagctcggcaagatgcccgcaaggcccgccacgactccctctccgctctccgctccggctccgtcactgacaccctcgccaggccggatcacgtcagtccgcccgacacccccgcaagcccttccgacaccctcgccattccgacaggcaccttgaacaaagtctccgtgccttccgccgccctgatcccgacacaacgtcctgtctcagaggaacataaaaaagccatatcttcataaagtgaactcccttcccttgtgaaagttcattattgttcctacctttggagcaataaatgcgaagatatgacaaaatttctcctgcttatttctagcctgacctgccttcttgcagtatcttcccttaagctgtcagcccagacaaacaacgaatcactctttgacgacccggttttccgagtgtctcacgaccccagagtcctgcctggacggatatcctacaggaacgggaagctctacgactccatgggaaacctcatacgtcccgaaatcgtcagctattacataggcgaccagatttatgacgaaacatatactggagcccgtaaacagttcagagccggaaagaccctggccctggtcggaatccctaccctcattgcaggaagctgtttgatgattgccgggatatgtaatttcagcgaggactccgataccctatggcttgcaggagccatgctcggctatgctggaggtgtctgcgtcgacgtaggcgtcccgctttggattatcggttcgaaacggctgaaatgggtcgccagcgactataacagccgtctttcctcatcccttgaccgtccagcaggcagccgtccacgtccgtacgtcagcacctcgtccaccggcataggcctcgcgctaaacttctgacattgtgccaactgtccgaaaattcatatatttgaggacaaagggaaagatatggcctcgcaattgccgcgcaggcgctacttcctcgccctggacatatcggacagcctcggcaaaataagctgcccggtcctggccctgaacgggaccttggacagccatgtcaattgcgaggagaacctctctcttctccgcgaccggctccgctgccctaaggagattcatgcagtcgagggcgtcaatcatctcttccagcattgcaagatgggcgacttctcagaatacaaggagattgaggagaccttcggcccggaagccttcgccctcatcgtggactggatgcagcagtttaaataaaagcgtgccgcgcatcgttgcggcacgcctttattcgcgtctaggcagcctcaggctaccggagtctccatgtgaacaccctgtggcgtccggtgatgaaaagcgtccgcccgtcggcgccgccgaaggccggccaaatcaaaatcgggaagcctcccgtaattcttttacaaaatgtcacggattggcactagcatagcctatttttgtaaaaaatcaaacaatgacgggagatattcaagtgaggtatacgaaaaacccgctgctaagggcaacgggtaagaacctaatgttttcacaacggaataatccttattgtgattcgcttgaaaattctgatgcaaatataatgaaaaattctatattccaatgagataaccaattttttaattataattgtaacgataaagaaaactaccaattgaataaccatgagaaacatacttggtcttgatttgggaacgaacagcattggctgggctgtcgtaggaagtgaagcctctgagaatggcgaggaaagacttaccggcatcaagggagcgggaagccgaataattcctatggatgcatccattttaggtgatttcgcaaaggggaatacggtctcgcaaactgcggacagaaggatcaagaggactgcccgtagaatgaatgaaaggtttatccttagaagggagcggcttcacagagtgcttaatttgatgggcttcctgcctgaacattatgcggcttctattgaccgatatggtaaatttatcgatgacaaagatcataagatagcttggaggacaaattcagacggcagacaggaatttgtctaccaaaaagccttcaatgagatgtatgaagaattcaaggctcacaaccctgaatttcttaagaacggaggcaagattccgtacgactggaccatatactatctccggaagaaggccctcaccagtccggtatcaaaagaggaactttcatggatccttcttaacgcaaaccaaaagaggggctacaatcagctcatgggaatggatgagcaggatgagcaggaagacaagtcgacgcgagttgaatatttgtcatccgtaatcgtggaagtgaccgacagcggagacaagagggggaaagccacttggtggaattgtaagcttgacaacgggatggtatacaaacgtccttctgaagtcaagcctgactgggaggggaagacaaaagaattcataataaccacagaccttgacaaagacggaaatccaaaactgaacaagttcggagaaatccagcgaagtttcaggatgcctggagaaaacgactggactcttataaaaacaaggactgaagatcaggtcaacaagtcgggagagtatgtcggagaatacattttcaatgctcttctgaaagaaccgacgcaaaaaatacggggaaaacttgtcagaactatagacagagatttctacagagctgagttaaaggccatcctcataaagcaggccggttttatcaaagagctgactgatagagatttgtatcttcagtgcatcgaagaactgtatcctaacaatgacagctatcgcaattctattgcgtcaaaggatttcacttatctgttggccgatgacattattctataccagaggcctttgaagaccaagaagaatttgatcgacaattgtccgtatgagagccatacctattcggacaaggaaacaggcgaggtgaaaactgctccggtaaagtgcatagccaaatctcagcctctttaccaggaattcaggttgtggcagtttgtacagaacctaaagatttacgacaatctcagcggagaagacgagacttctttctttattcctaccgaagcgaaacgggttgccgtattcaaatatctcaacgatatcgcatctaccgaccaggagtctttcctcaaagaattctttggcataaaaaggcctaagtgcaaggattcaaaccttccctacacctggaattatgtccaggacaaaaagtatccatgcaacgagactcgcggcccgattctttcgagactgaaaaaatcagggatcccttcttctttccttactaatgaaatagaaaatgagctttggctcatcctctattcttcggagagcaggaaagaacttgaagaagctcttagaaaatttgcaggcagacatggccttgacgagacttttgtagataacttcaagaagttcccggcatttgaaaaagactatggagcctactcggcgaaagctatcaagaaattgctgccgcttatgcggatgggcgagtactggagcgaggcggccattcctgatgaggtcaaggccaatatcgaagacataataaaagggaagttcgctgattccattccgcagaaggtgagggagcaactttccacgtataaggaaatttcaagcttcaaagggcttcctctctacctcgcttgttacgttgtctatggcaggcatagtgaagtgtctgattcccagctctggacaaggcctgaagacattgacgtttacctgaacaatttcaagcagcattctctccacaaccctatcgtagagcaggttgtgaccgagactctgagaacggtaagggatatctggcggagcttcggcaagattgatgaaattcacatcgagatgggacgagaccttaagaaccctgccgaaaagcgcaagaaagatcttatgaggtccattgagaacgagaatacgaatatgagaatccgtgccctcttgatggaattcaccaatccggattttaaaatagattccgtcagaccatattctccatcccagcaagacattttcaggatctatgaagagactgccctcagaggcgaaaataatctgccggattatgtacttgacgtccttcaaaatttcggcagaggcaaaactgaacagccatcccatgccgaggtcctgaagtacaagctttggcttgatcagaaataccgctcgccatacaccggccagcctattcccctcggcaaattgttcactacggcatatgaaatcgaacatgtgattcctcaggccaggtacttcgatgattccttcaacaataaggttatttgtgaatcagaggtaaataagttgaaatcgaatatgctgggccatgagttcatcgagaaacatggcggagaaatcgtgccgctcaacatgggaggctcggtgaggattttgaccaagaccgagtatgaggatttggtaaagagattttatgcgaacgatcgaatgaaggccaagcgtaagaatctcatgcttgacgacattcccgaggccttcatcaataggcagctcaatgacagcagatacatcagcaggctcatgctcgggctgatgtccaatatagtgaggaaagagggcgagagtgaagcgacctcccgcaatgtcattaccaccaacggctctattacggacagactcaaggttgattggggtattaaagacacctggaacaggcttattctgcctcgcttcagaaggatgaatcaaatcaccggcacgagcgattacacgagaataaacagaaacgggcatgaaatccctaacgtgccggaagccgtcagcaagggcttcgtcatcaaacgaatcgaccatagacatcatgccatggacgcaatcgttatcgcctgtgccagccgaaatatcgtgaactatctcaataattcttccgcctgcaaaggagcaaaaatttcgagatatgacctacagcatttattgtgcaataaattgcttcaaggagacggaagctacagctgggtgattaaaacgccatggcccggattccaaaatgatgtattcaacgcactgaacaacattattgtaagcttcaagcagaatctgagagtcattaacaagaccacaaactattaccagcattataaggacggaaagaaagttattgtcaggcaggtgaacggcgacagctgggcggtgcgcaagtccatgcacaaggacactgtcttcagagaggtgaatttgaggatgatccgtcaagagaatctgaaatccgtcgtcgagcatccagacgatgttgtgaacagagaccttagggagaagctcaaagagtttgtcctgaaagggactagtctctccaatatcaaagactattttgctcaggaaagagatgcctggtccgacgttgacctgaaaaagattgacgtcttctatttctccaaggacgacaaggatccaaagacgggtcttccgaaacatcggttcttctccacaagaaagccgatcgacacctctttcaccgaggaaaagataaagacacagattacggatactgcaatccaaaaaataatgctggctcatcttgccgaaaacggcaacgacccgaaggtggcattcaacccagacggaatcgaacggatgaacgacagcatcgcgcgtctgaatggcgggcatatgcaccagcctatatttaaagtcccgtattttgaagaggggaataaattcagtgtaggaagtgaaggcgcaaaggcaaagaaattcgtagaagcagacaaggggaccaacctattctttgccatctatgaaaatgaggtcgaagacaagaagacgggggagatcaaaaaagtgcgttatttctctgacatacctttaaatgtcgctatagatagagagaagcaaggtctgactccagcctcggaggatgaaaacggcaagaagcctattatggtgctgtctcctggtgatttggtttacgtgcctacggaagaggaaatcaaagctggaaaacttgaaccttcgattgacagaggccgaatctataaaatggtgagcgctgggcaaggaaaatgctatttcgttcctcagtcagtggcctctgtcattaaagataaggttgaatttgagtctcataataagtccatgaaaaccattgagggaaatacttatattcagaaagtctgcattcccgtcaaagttgacaggctgggacatataatttcaatcaacgatatgatatgattaagaaaactctcgccattcttcgcccggcatatctctacttgaaggacggacagttagtcgcccgagaccctgtagaggagaaattgtgtgaggcggagaggcgggagaaacctaaagcgaggactgctccgatagaagacataggagtcttggtccttgacaataaacagattactattacccagggcttgatgtccgcactgatttcgaataactgcgcagtaattgtctgtgatgagagaagtatgccgactggccttgtcttgccgcttgagagcaatacggtccaaagtgaaagattcggcgaccagataaatgcttccctgccattgaaaaaacaattatggcagcagacaatggtcgcaaaaatatcgaatcaggccgaaatcttgtataaagactccggggtcgacaagaagatgatgctcaactgggcggcacgagtaaaaagcggagacagcgaaaatcttgaagcccgggcggcggcatattattggaagaacattttttccggtctcataggtctcgagaatttcacaagaggacgggatggagctccgcccaataatcttctcaactatggatatgccatcctgagggcgattactgcacgctctcttaccgccagcggattgttgcctaccttaggcatccatcaccacaaccgctacaatgcctactgtctggccgacgatatcatggagccataccgccccttcgtcgatgaccttgttttcgacataatctggaatacaggggcaggagatattgaacttaacaacgagttaaaagccaagttgttgacgattccggttctggatgtcaaaatcgacggccagcgaagtcctctgatggttgcgatgtctcagacgacagcatcgctatacaaatgtttcaacgggacaagccgcaaaatctcttttccggagatctactaagacaccatgcttgaccggttcagtgaatataggattatgtggatacttgttttcttcgatttgcctactaactcgaggaaggaacaaaaagcctataatcaatttcgaaagaatctgttacgagacggattcactatgtaccaggaatcggtctacgtaagaaactgcgggagcatggagaactgcaaagttcacattaagagggtgcagtcttttttgccggaacatggcaacgtctcaatcatgaatatcacagacaagcaatttggcgaaatacgagtcttttatggtcatgacgaacaagaaaatgacgcaccgggccaacagcttgaattattctaagccgttttggcgtacaaaagaaataagaaaacccgccggaaggcgggttttctgttggtagcgcagctcgatttttaatgctacttgccattgtaacttattgagtgccaattcaataagcggcttgtgctgtgctttacctagctaaaggtaagaattttcaagcgaatcacaacatttggacaatatgtctaaagtcaaagatgctgtgctttacctagctaaaggtaagaattttcaagcgaatcacaacattcgtccggagtggttgcggcggcgatagctgtgctttacctagctaaaggtaagaattttcaagcgaatcacaacaaggtacacatttattccgtcggtttgacggctgtgctttacctagctaaaggtaagaattttcaagcgaatcacaacagattgcgatgcaccttcttcggtaggagggctgtgctttacctagctaaaggtaagaattttcaagcgaatcacaacttcggcggccaacaacagggcctcaggaacgctgtgctttacctagctaaaggtaagaattttcaagcgaatcacaacgataatagtccggttgaacagtatggattcgctgtgctttacctagctaaagnnnnnnnnnnnnnnnnnnnnnnnnnnnnnnnnnnnnnnnnnnnnnnnnnnnnnnnnnnnnnnnnnnnnnnnnnnnnnnnnnnnnnnnnnnnnnnnnnnnnnnnnnnnnaattttcaagcgaatcacaacaggccggggttttgtttgaaccggcggaggctgtgctttacctagctaaaggtaagaattttcaagcgaatcacaaccggatatggcagaaggtgtaccctttcttcgctgtgctttacctagctaaaggtaagaattttcaagcgaatcacaactaccccttgtaagtcaaaaccaaaatgcagctgtgctttacctagctaaannnnnnnnnnnnnnnnnnnnnnattttcaagcgaatcacaacgtctcctacgtggacttcgcaaacatccgggctgtgctttacctagctaaaggtaagaattttcaagcgaatcacaactacaggttgccgatgatggagttggagagggctgtgctttacctagctaaannnnnnnnnnnnnnaattttcaagcgaatcacaacgaaaccttcccgcacctccgccgtggtgccgctgtgctttacctagctaaaggtaagaattttcaagcgaatcacaacggttttttactcttacctacagcgataatgctgtgctttacctagctaaaggtaagaattttcaagcgaatcacaacttatgccataagcgggagttgtccaaaaggctgtgctttacctagctaaaggtaagaattttcaagcgaatcacaacgccaagatgaaatcgtaacgaaccgcgatggctgtgctttacctagctaaaggtaagaattttcaagcgaatcacaacgattgcgcacgttgaacaacgaataaaaagctgtgctttacctagctaaaggtaagaattttcaagcgaatcacaacaagttcacgatggcggaagcggtgaagccgctgtgctttacctagctaaaggtaagaattttcaagcgaatcacaacaaatgttaatgttggccggattgaccctttgctgtgctttacctagctaaaggtaagaattttcaagcgaatcacaacggcatcctggggagcatcgcggatatgtatgctgtgctttacctagctaaaggtaagaattttcaagcgaatcacaacgttgttctcatttattccgcttcttcttcgctgtgctttacctagctaaaggtaagaattttcaagcgaatcacaacgtcagttcgcggatggcgtcgcggacctcagctgtgctttacctagctaaaggtaagaattttcaagcgaatcacaacatcgggctgggtaagtccgccgaagaggaggctgtgctttacctagctannnnnnnnnnnnnnnnnnnnnnnnnnnnnnnnnnnnnnnnnnnnnnnnnnnnnnnnnnnnnnnnnnnnnnnnnnnnnnnnnnnnnnnnnnnnnnnnnnnnnnnnnnnnnnnnnnnattttcaagcgaatcacaacagagttttccatttaaattatatttacgagctgtgctttacctagctaaaggtaagaattttcaagcgaatcacaacgcgggtcctcaatataaacgtacaggttttgctgtgctttacctagctaaagnnnnnnnnnnnnnnnnnnnnnnnnnnnnnnnnnnnnnnnnnnnnnnnnnnnnnnnnnnnnnnnnnnnnnaattttcaagcgaatcacaacactatcatttgtttgtacggataacctccggctgtgctttacctagctaaaggtaagaattttcaagcgaatcacaacaaacattgacgcgtgttgggaggctctcggctgtgctttacctagctaaaggtaagaattttcaagcgaatcacaaccatcccacgttttgcccccgtggaattacgctgtgctttacctagctaaaggtaagaattttcaagcgaatcacaacttatggatagcaatatactatgcgccttgtgctgtgctttacctagctaaaggtaagaattttcaagcgaatcacaacgagggcctcgatgataatctgcgggtagtggctgtgctttacctagctaaaggtaagaattttcaagcgaatcacaacataaatttatcaatgaaattatcagatacggctgtgctttacctagctaa

SEQ ID NO: 1295 - DNA, 18360 bp, synthetic construct
  source 1..18360: mol_type = other DNA
  misc_feature 1..18360: note = Synthetic
aagggtgctaacatcgctggcttcatgcgtgttgcccacgccatgatggctcaaggtatcatctaattccagagctaaaaggtttttgcaaggcggtcaggtttggccgccttgcttttttgctatcttttttgaaaaattacgtaaaaaccgttacgtaaaatacgtaatatttgaaaaatgtgtatttttgcggggtgaaatgaaaatgaacgatgaaaaatccatttgtcacatcgggctatgaagggcctgaatatttctgcgacagggaagaggaaaccgcaaaactgattcggcagttgaccaacggcaacaatgtggtgctgatgtcgccgcgccgcatggggaaaacgggacttctctaccatgctttccagcaagaggaaatccgcacggaataccatacatttatcatcgacatctattcgaccaaaaacatgaacgaaatggttgcggagatggggaaggtgatattgaacacgctccagtcgaaaagcaagaaggcattcgataagtttgtcagaatagccacttcgcttcgtcctggtgtgagtttcgacccgtggggaaacccgacttggaacgtagaagtgggaaacatccaaaacgccgataacaccttggaccagattttcgattatatcagacaatcagaccagccttgcctcgttgccattgatgaattccagcagattgcctattatcccgaaaagaacgtcgaggccattttgaggacttatatccagcattgcagcaatgccaatttcgtgttttccggatcggagcggcatctgcttgcagagatgttttcttccccggctcgacctttctacgcttccacttcaacgctcaatttggaaagtatcaatccgttaaagtatgacgaatttgcaaggactcatttcgaaaaggcgggaaaacaattggaatcgggagttgtggaggagatttggaataggtttgaaggcgttacatggtatattcagaaagtgttgaattacctttttgccgataccgctttgggcgaaacatgcggaatggacttgattgatgttgcggtgaatgagattgtgaaagacaatggcacaatttacgccgacttgctttaccaactgacggccaagcaaaaagaactgttagtggcgattaacaaggagggaaaagtcaaggccgtcacagggtcgaagttcatcaagaagcaccatttgacggctgcgagttcggttcaaactacaattaaatcactgatggataagcaattggtgacgtgtcatctcggtatttatgaagtttatgacaagtttttcagtatttggctatcaagactatgaaacaaactacactttgctatttagaacgcggcagccaatacctcatgctacaccgcaccaagaaagagaacgacctcaaccacgacaaatggcttggcgtgggcggcaagttcgaagagggtgaaagccctgaggactgcatgttgcgcgaggtgtgggaggagaccggcttcaccgtgacgaaatggcgctactgtggcatcgtcacctttgtacacaacatctacgacgacgagcacatgcacatttttgtctgtaccgactggacgggcgaccaaatcgtctgcaatgaaggcgaccttgaatggattgaaaaacagcgacttctcgaacttaccatgtgggagggcgacaagattttcctccgcctcatcgacgaacacaggcctttcttttcgctgaaactgacctacgaatatgacacactgaaagaagcgatattggacggaaaggataagcttgtgtaattggaaaagccgtatctttgccatgtgtcaataacaattcaacaattcaacgattaacaactcaacaatatgaaaagaggatttggaagcgacaaccattcgggcgtgtgccccgaggttttggaggccatcgcccgcgtgaataaggaccacgctgtggcatacggcgatgatgaatattgtgctgcaacggaagcgaagttccgcgagcagtttggcgaacaagcccgcgtgtttttcgccttcaacggcacgggctgtaatactttgtgcattgatgccatgacacactcgcatgaggccgtggtctgtgccgagactgcccacatcagtgtggacgaatgtggtgcgccgcagcgcattgtgggctgtcgtctgttgacggtggccacacccgacggcaaactgacgcctgaattggtgaaaacgcgtctgcatggctttggcttcgagcaccactcacaacccaaagtcatcagcatcacacagccgacggagcttggcactctgtattctttggacgaaatcaaggctttggtggctttggcgcgagaatacaacatgtacgtccacatcgacggtgcccgcttgggcaacgctgccgtggccttgggttgcactttcaaggagatgaccaccgaccttggtgtggatgcggtctcgtttggcggcaccaaaaacggcttgatgatgggcgaggcggtcgtcctgctcaatcccgacctctgccccgagttcaaataccgccgcaagcaggccatgcaactgtgctcgaagatgcgcttcattgcggcgcagttcgacgcctatttcgagaacggcctctggcgccgcaatgccgagcactcgaaccgtatggcgcaactgctttacaaggccgtgaaggacattcctggcgtgaaggtggtctatcccgtgcaagccaatggcgtgtttgcccagctgccccgcaaggtgtggaaagagctgcaaaaccattatttcttctacgattgggacgaagatgccgacgtggtgcgctggatgtgcgcatttgacacgacggaggaggatattgatcgtttcgtcgcgttgttgaaggaactgatgacgaaggaataacaaaccgtcgcaccaccgtcgacatcggcggtttcgtgtgttccccatgtaggggcggacccatgtgtccgcccttaataattgtgtccgtccttaataatagcgtgttcaattccaaaaatttatttgcgccatcatcatttgtgtcatggcgcacacatgggtttatggtacacaaaatggattagggtgcacacatgggtgcacccctacagcggcgcacgttcccgcatttttccaaatgctatggaaatggttgggcatgaccgctatttcacgtggtgatggttgggactattttggggcaagattaaggttgttgaaaaaaacgaggcaaccgaagtcgccccgtcctaaatgttttcacaacggaataatccttattgtgaattgctgcatatcttgtgctgcaaaaatacaacttttttggattgtgcaattgctttttgaaagttttttgtatttttgacgaatgtttttcaattccgaaattaatacaattatgaagaagatattaggactcgatttgggcaccaacagcattggttgggcagtggtgaatgcggaagaaacgatccgcgagaatgaaacatcttatctgaaaccgacaggcatcagtgcggcaggaagtagaattatcccgatgtcggcagacattttgggtgatttcgaagctggcaattctgtgtcgcaaacgaaagatcgcacagacaaaaggggggcacgtcgcctattggaacgatacttacttcgtagggagcgcctcttgcgtgttcttaaactgatgggctttttgccagaacattttgccaaacagattgatgaaaacggaaaatttatcaatcatagtgagccgaagttggcttggcgtaaagatgaacaaggcaagttcgagttcgtttttaaagattcgtttgaagaaatgttggaggattttgcacaacatcagccacaacttgtggccgatagcaagaaagttccctacgattggactatctactacttacgtaagaaagccctgacgcaaagacttacaaaagaggaacttgcgtgggttttgttgcagtttaaccaaaaacgtggttattaccaactgcgtggcgaggatgaagaagagaaaacgacatctaagacgaggcaatattttgatcggcaaattattgctgatattattgatacaggacagaagtataaggagttgaaagttttgaatatagttcttcaaaatggtgatgtagggaaaattttcaagaaagaagttccgaattggataggtcaagaaaaaagtatcattgctattgtcgatattgacaaagacgggaatgataaatatgatgagaatgggcaaataagcagaaagtttaaaatcccaactgaggcagagtgggatagtgagtggaaattgataaaaatgaaaaccgaagaagacctcaataatagccacaaaaccgtcggttgttacatttatgacaatctgttgcaaaagcccaaccagaaaatcatcggcaagttggttcgcacggtcgagcgcaagtactacaaggaggaattgcggcagattctcgaaacgcaagttgccttaatacctgaattgaaggatgccactttgtataataggtgcatcgaggaactttaccccaacaacgaggcgcaccgcaacaacatcgccaaacctgacttcgctaacctgttcatcaacgacatcctgttctaccagcgtccgctgaagagcaagaagtcgctcatcagcgactgcccgtatgaaagccacttcgacaaggacggcaacgagcatcctgtgaagtgtatcgccaagtcgaatccgctgttccaagagttccgcctttggcagttcgttcagaatttgaggatttaccaacgagaaagaaccgtaagtgacggccaattggacttgttcggaaaccaatcggcagggaaactccaaactgatgtggatgtaaccaacgaattgctgaaaaccgaagaagattacgtaaaactcttcgattggctcaacgacagggcttccatcaaacaggacacgttgctcaactcgtacttcaagttcaagaaagagaagggtaaagaccaatatccttaccgttggaactacgttgaggacaaggattatccgtgcaataaaacacgtgctgccatattggccaaattagataaaacagaaaaagaaaaactctcgtcagaacttacatttaaaatatggcatttgctttattccgtgtcaacaaaggctgaaattgattcagtcttctcggaatccaaaagaaacaaacaaaatcgccataaaaacgggacaactaccgatggtgtttataaaatactgttggatacaggtttttcttcagaaacaatcaacaaactgaaaaatataaagtttgacgaaaaagactacggatcgtattccgaaaaggccatcaagaagttgctgccgctgatgcggatgggcaagtattggagtgttgaggccattgacgacagaacgaaggagcgcattgataaaattttaacaggcgaatacgatgaaaacatcaaaaaccgagtacgcgaaaagtcaatcaatctgcctgacatcacccattttagagctttgcctgtttggttggcttgctacatcgtctatgaccgccattcggaggccaaggaaatagggaaatgggagaagcccgaagacatcgaccgttatttgaaggacttcaagcaacactcgctgcgcaatcccattgtggaacaggtggttacggaaaccctacgaaccgtccgcgatatttggaaacaggaaggacaaatcgacgaaatccatttggaactggggcgtgagatgaagaatcccgcagacaagcggaagaaaatgacagagcgcatattggaaaacgagaacaccaatctgcgcatcaaggctttgctgatggagtttatgaacgacccggaaattgaaaatgtacgcccatattcgccaagccaacaggacatcttgcgcatttatgaggaaaacgcacttgacaatctgaccaaaaacgacaaggattttgatttcgtcagcaaaatttccaagtcagcacaaccttcaaaggctgacattacaaggtataagtgttggttggaacaaaaataccgctcaccctacacgggcgagatgattccgcttgccaagttgttcacgtcggcttacgaaatagaacacgtgattccccaatcgcgctactttgacgattcattcagcaacaaggtaatctgtgaggccgaggtgaacaaactcaaagacagacagttgggatttgagtttatcaagaaccataaaggcgaaaaggttcaaatcagccaaggcaaagtggttgaaattctgtcggttgaggcatacgaaaagttcgtgaaagaccattattccagcaatcgtgcgaaaatgaagaagctgctgatggacgacattcccgacggtttcatcgaaaggcagttgaacgacagccgctatatcagcaaactggtgaaaggcttgctgtcgaacatcgtccgcgagaaactcgaaaatggcgaatacgagcaggaagccgtatcaaagaacctgatttcgtgcaacggctccatcaccgaccgtctgaaaaaggattggggaatgaacgatgtttggaacagcattgttttgccgcgtttccgccgtttgaatgaactgacgggcaaaataagtgacgatgaacttgtagccgaatttaaacgtctgtttgaagaacagttgattgtctgctccaagtcaagaaatgaatcgataaatagttcttatacagattattataaatcattaggtgaaaaagagcagaaaaaggttattgacgaggtaatgaagaaattgccaatcaaagaatcatttttgtcagtaaacaacgagggacatataattccaaatatgccgctcgaactgcaaaagggcttcaataaaaagcgcatcgaccaccgccaccacgctatggatgccatcgttatagcttgtgcaacaaggtcgcatattcagtatttgaataatgaaagtgcaaaaactgaaaaccgaaaattacaagttggattggctaaacaactctgttctttcaaagaagttgagtataagaaaaaagtaaaaaatgaaaatggcgtttgggtagaaagtgaagaaaagattaaaaagaatgtacctgataagttcttaaagccttgggattcgttcactacggatgccaaacacgcattggagaacattgtcgtaagtttcaagcagaatttgcgtgttatcaacaagaccacaaacagttaccagcactacgatgagaatggcaaaaaggtgatggtgaagcagaagaaaggcgacagctgggcaattcgcaagtcgatgcacaaagacaccgtttttggcgaggtgaatctgcgttttgtaaaacaagttcctttaaatgaggcaattaagaccccaaaacgtatcgtaaacaaggatttcaaaaagaaagtaatcgagttgttggatgcaggccgcgatgccaaatacatcaagaaatatgtggaggacaacaaggatatttggtcggatattgatgtcaagaaaatagcaatttactatttctctcaagaaataaaaaatgaaaacggaaacgtaaaagaacgctatttcgcttctcgtttcggaaatgatttagtttctgtattcaaaggaatatctgatgtggagacagcaaaagaaaaaatcaagaaaattactgacacgggcatacagaaaatcctgttggcgcatttggaggccaaaggtggaaatccagaactcgcgttctcgcccgacggtattgatgagatgaatcgcaatattgttgcgctcaacaaaggtaagttccatcagccgattgtgaaagtgcgtgtatatgagaaggccgaaaagttcgctgttggacaaaacgggaacaaggctacaaaatacgttgaggccgccaaaggcaccaaccttttcttcgccattttcgggacagaaaagacgaacaaggaaactggcgaaacggaaaccgttcgctcttatctgaccattccgctcaatgtgatgattgattgccaaaagaaatacggttcgcaatggcgcaactgcatcgaaatctatctacaagagcagcaattggttacatccgatgccaaactcttgttcatcctttcgccaaacgatttggtttatctgccgacgaaagttgaattgaaggaaggaataaattcgattgataaatcaaagatttacaaatcagttagttttacaggaagtagattgtatgcaattcctttttcggtggcaaaagttattgtcgataagacggagtttacgcaattaaacaaagtggaatttacagacgataagtcgtcaattaaagaaacctgcttacccatcaaagtcgacagattaggtaatgttattgaactaaacggaaagaaaattgagtcgtaaccaatttgggtacaacttaacaaactaaaacaaccatgatcaaacgaaccctattcttcggcaatccggcctacctatcgctgaaaaacgcgcaactcgttattaggcttaacgatgcccaaacgcaacaggaagtgaccaagactgttcccatcgaggacatcggcgtggtggttttagaagaccggcaaatcaccatcaccaacggggcgatggatgccttgctgcaaaataattgcgccgtggtcacttgcgacgagaagcacatgccggcgggtttgttgcttcctttagaaggccataccgtgcaaagcgagcgtttccgttggcagattgaggcttctctgccattgaagaaacagctttggcaacaaaccgtccaaaccaaaatccgcaatcaggcctcggtgctgaagcggttgagtggggcagaggtgggctgtatgatagcttgggccaacgatgtgaagagtggcgacagcgaaaaccttgaaggtcgagcggcagcctattattggaagtcagttttcccagaaatggaacgttttgtgcgcgaccgcgagggcgatgcacccaacaacctgctcaactacggttatgccatcgtcagggcggtggtggcgcgggctttggtggccagcggattgctgcccaccttcggcatccatcatcacaaccgttacaatgccttttgtttggccgacgacatcatggaaccgtatcggccttacgttgatgagttggtgatagagattttgcgcagtggcgcggattgcagcgaactgaccaccgatttgaagcggcaattgttgggcttgcccgtgaaagaggtcgtcatcgacggaaggcgcagcccgttgatggtagcagttacgcaaaccacggcctcgcttgccaagtgcttcggcggagagttgcgcaaagtggtgtatccgataatggaattatgatggaccgtttcagcgaatacaggattatgtgggtgcttgtgcttttcgatttgccgacggaaacgaaaaaggagcgcaaggcctacgccgattttcgcaagcgcatcatggccgacggcttcacgatgttccagttttccatctacttgcggcattgtcccagccgcgaaaacgccgaggtgcatattaagcgggtgaagtcgttcatgcctgagtttggcgacattgggatattgtgcatcaccgacaagcagtttggcgaaatggagatttttagcaactgcaaacccaaggcggtggacactccatgccagcaattggagctgttttgaatgggaaaaactgcggaaacaaaagaaaaatcccgctcgaaagggcgggatttttcttttctgaaacaacttttaaatcgttgtggctcttcttgttacacatatcgtgttgtttcaaagagcaaagatacaagataaatgcaagcaattcacaactgcaagtgattggctttgatttccaaggatgttgtttcaaagagcaaagatacaagataaatgcaagcaattcacaacagaccaacaagggacgttggggaatctattgttgtttcaaagagcaaagatacaagataaatgcaagcaattcacaacgaccaacggttacatctactacgacaaggggttgtttcaaagagcaaagatacaagataaatgcaagcaattcacaacgaataacgttgccgttgtcgtcaatggcaaagttgtttcaaagagcaaagatacaagataaatgcaagcaattcacaacccaaaaggctctgttacctgcccgtttagggttgtttcaaagagcaaagatacaagataaatgcaagcaattcacaactgtcctgtcgtcgttggcgagcgtgacgacgttgtttcaaagagcaaagatacaagataaatgcaagcaattcacaacgactattacaagcctgttttcggacttttagttgtttcaaagagcaaagatacaagataaatgcaagcaattcacaactattgacaccaaggctgcccgcgctgagagttgtttcaaagagcaaagatacaagataaatgcaagcaattcacaacgtgtatgttccgttgggtgtggtaccgccagttgtttcaaagagcaaagatacaagataaatgcaagcaattcacaacgcacatagtacgggcacttgtcgggcatgagttgtttcaaagagcaaagatacaagataaatgcaagcaattcacaacgaactgctgctgcgagaacagacttctcacgttgtttcaaagagcaaagatacaagataaatgcaagcaattcacaaccttcccaacagtctgcgtatggctgcgtgtcgttgtttcaaagagcaaagatacaagataaatgcaagcaattcacaacctgctgcaacttgggtgttgctcaaatactgttgtttcaaagagcaaagatacaagataaatgcaagcaattcacaacaacaccatacttggagtcaaaagcctctttgttgtttcaaagagcaaagatacaagataaatgcaagcaattcacaacactccgtgactgtttttttagcggtatcaggttgtttcaaagagcaaagatacaagataaatgcaagcaattcacaacgagaaagcccatggcaataccaaagaaatggttgtttcaaagagcaaagatacaagataaatgcaagcaattcacaactcttttgttagttcttgtccgttgaatattgttgtttcaaagagcaaagatacaagataaatgcaagcaattcacaacattgagttgcctttaacttctattattgaagttgtttcaaagagcaaagatacaagataaatgcaagcaattcacaactctcgcggcttgtttcatcactgaaatcgagttgtttcaaagagcaaagatacaagataaatgcaagcaattcacaacgtcacagttataggtgagggcatggattcagttgtttcaaagagcaaagatacaagataaatgcaagcaattcacaacaatcccaacgctgagtaatcttgttaatatgttgtttcaaagagcaaagatacaagataaatgcaagcaattcacaacgcctctgcacagcttcttaacaatgtgagggttgtttcaaagagcaaagatacaagataaatgcaagcaattcacaacatctgagaagcgtaccgagatagagcaggtgttgtttcaaagagcaaagatacaagataaatgcaagcaattcacaaccgtggtctgacattgcagaatgattctgctgttgtttcaaagagcaaagatacaagataaatgcaagcaattcacaaccctatgaggacaatggtgagcagatctaccgttgtttcaaagagcaaagatacaagataaatgcaagcaattcacaacatcgatttttctaaacatgtgccattcgtcgttgtttcaaagagcaaagatacaagataaatgcaagcaattcacaaccgttgccttcaaaatcataactatcgtacagttgtttcaaagagcaaagatacaagataaatgcaagcaattcacaactacctcaatctcaaggtatttattcaatttgttgtttcaaagagcaaagatacaagataaatgcaagcaattcacaactaagttattcattttcaggtgtgttaagttgttgtttcaaagagcaaagatacaagataaatgcaagcaattcacaacgagaattggaatgatgcagagatgacgcgcgttgtttcaaagagcaaagatacaagataaatgcaagcaattcacaaccaaataaaaaatactaaatgaaaactatggttgtttcaaagagcaaagatacaagataaatgcaagcaattcacaacatcgcaagttagccgtgtatgaccgctggcgttgtttcaaagagcaaagatacaagataaatgcaagcaattcacaacagtgaccgtgataccattgatttttcattggttgtttcaaagagcaaagatacaagataaatgcaagcaattcacaacaattcgtctacgtgtgtgtggacaagaaatgttgtttcaaagagcaaagatacaagataaatgcaagcaattcacaacgccgcattatatggaacaaaaaatagttaggttgtttcaaagagcaaagatacaagataaatgcaagcaattcacaacgcgaagcgctgcccatcacaggctgttgcagttgtttcaaagagcaaagatacaagataaatgcaagcaattcacaacattattattagggatactttatagcatttggttgtttcaaagagcaaagatacaagataaatgcaagcaattcacaacatccaaaagatataagatattttttggaaagttgtttcaaagagcaaagatacaagataaatgcaagcaattcacaacatcactcggtcgccacatatgccagctaagttgtttcaaagagcaaagatacaagataaatgcaagcaattcacaacttcagggagtttgtgccacggtagttgtatgttgtttcaaagagcaaagatacaagataaatgcaagcaattcacaacgagcttcgatttcccaatcaagcattgaaggttgtttcaaagagcaaagatacaagataaatgcaagcaattcacaactggtgaagaactgaattatcgtgaagtatggttgtttcaaagagcaaagatacaagataaatgcaagcaattcacaactacgatgctactttcttacggtattgaccgttgtttcaaagagcaaagatacaagataaatgcaagcaattcacaactaaacctcttccctgatgttgaccaaacccagttgtttcaaagagcaaagatacaagataaatgcaagcaattcacaactctcaaagagtatgtaaatatgtctccaaagttgtttcaaagagcaaagatacaagataaatgcaagcaattcacaacacgtctaaatatgtcattgacaaaccgcgtgttgtttcaaagagcaaagatacaagataaatgcaagcaattcacaaccgtactcggatgattttgttccgcgtctttgttgtttcaaagagcaaagatacaagataaatgcaagcaattcacaacaaccgaagcggatgcctcaaccaaaggggcgttgtttcaaagagcaaagatacaagataaatgcaagcaattcacaacaatcgttgtcttgtctctgttggtagttttgttgtttcaaagagcaaagatacaagataaatgcaagcaattcacaacgtttgtgttggttgctcctaatcgtcttgcgttgtttcaaagagcaaagatacaagataaatgcaagcaattcacaacagcgtcctttgggtgtaggttctcaatgtcgttgtttcaaagagcaaagatacaagataaatgcaagcaattcacaacgatgaacagaggaaagccacacaagttctgttgtttcaaagagcaaagatacaagataaatgcaagcaattcacaacaaacaagttaagcacccctatagttactggttgtttcaaagagcaaagatacaagataaatgcaagcaattcacaacttagaattgtttattttgtaagtcataaagttgtttcaaagagcaaagatacaagataaatgcaagcaattcacaactatccgagttgttcgaatattttaatacaagttgtttcaaagagcaaagatacaagataaatgcaagcaattcacaacccaacaaaaagagttgcttggtactgagcagttgtttcaaagagcaaagatacaagataaatgcaagcaattcacaacgacaaaattttgacaacgaaaattactattgttgtttcaaagagcaaagatacaagataaatgcaagcaattcacaacagcccttcccatacaatgtccactacggcggttgtttcaaagagcaaagatacaagataaatgcaagcaattcacaacagccattcgatggagaggcctccgctggcgttgtttcaaagagcaaagatacaagataaatgcaagcaattcacaacgtggtggactggcgtgcagcaatggctgaagttgtttcaaagagcaaagatacaagataaatgcaagcaattcacaactgtggaataatacataagaaaatgttgtagcgttgtttcaaagagcaaagatacaagataaatgcaagcaattcacaacgacattcagccacggcgcgaccgaccccgtgttgtttcaaagagcaaagatacaagataaatgcaagcaattcacaactgccgagccttcaaatccttcccaagcccagttgtttcaaagagcaaagatacaagataaatgcaagcaattcacaacgaacgtaataggttggcggcacgagtcagggttgtttcaaagagcaaagatacaagataaatgcaagcaattcacaactattctacagaagtttctacgaggccatcagttgtttcaaagagcaaagatacaagataaatgcaagcaattcacaacaacctgtgggctggttgcaacctctttggcgttgtttcaaagagcaaagatacaagataaatgcaagcaattcacaacaatttcgggtttataattttggcacaaaccgttgtttcaaagagcaaagatacaagataaatgcaagcaattcacaacgctgtgcttttgtgtatttcatttcttcgggttgtttcaaagagcaaagatacaagataaatgcaagcaattcacaactataattgcatggttccttttgtagcttcagttgtttcaaagagcaaagatacaagataaatgcaagcaattcacagcttccaaatcgcctccaccttcaaatctgtcttatgattgcacttgatgagcgtcaggccgctgctgatttcgtcgcggtcgttgtagatggtgctgccgatgcgggcgtagagcgtcaggttgttgaatggcttccattttcctaacagatacaccctcatgcccttgccgtaaagtgctggcaccgagaaggaatagagcacgtcgctctcgtaggcatagacgcgggaatcgtagtcgtcggtgtcgaagatggcgtaacggaaggtgaggctgaacggcttgttttcaggcttgtaggccacatcctgacagatgaaaaagccgtggctgttgctgccgtcgtcgttgcggtagtgggcgtattcggccttgttgctgaaatggaaatccctgccaatctgatagttgatgttgaaccgcacggagtttttcgtgtagaaaacggggtagtggctgaagacgaaagcgtcggtcgagtttttcatcttggtctttgaacggatttgcaggtaagcgtttgtccgcctgttgaagctatggctgaggcgcatgtagtagtcgtggccccaactcggcgcgttgacttgcgaggtgagccaagtaaactggaactggtcggcgtagagcaacaggttccaatatggggctggggcaacctccgcgcccaaatagatgccgcgctggccttggttgcggctgccttcgctgaaggcattggaatagaggttttgataggccttgccataatcgcgatagagcagggtaaaattcagataaccagcgggttttatggtcatcccaaccaaaccggcaaagcgggagagggctgaagtgccttgcaacgaaagcgtatcaggattgatgctcatggcaccctcgccgaagaaagcgaacttgcccttaacatatttgaaatcaatgccttggttggtgagttgtttgccttggaaataaaaatggttgtagttggtgggccggatttgcaacggcacgttgagccaagtgtggtgcaaggtgtagccaacctcaaaatgcgcgatggcgtaggacaaatgtccgcccacgacttgctgacgaatggcatggcggtcttgaagctctcctatagtgcggtgataaccagtctcttgcaggctgctgacgagttccacatcgtccaagctatcggccacgctaatgttggcatcaaccaaacggttggaatagaacaccgtgcccctgaacggacctttaccaagggtggccgccgcgccgcgcatgaacattgtctcgttagcggaggtttttggactgataccgcgtccttgtttcatcacactgctgcccgtacccgccttgccgaaactcatccccgaccacatcgtaagcccttgaccgaaagccaattggtaatcgccaagcgcagcagccttcacgatgcccaaatccttgacatagagatgaaaacctacgtaatcgaagccgcgttggtagtttttgccaagcagtttttggatggtgtcgctcactttgtcggtgaaaaacatctcgcctgggtctttctccaacacgaaacctgcgcgaatcttgttcctgtaattgtaggtgtatttcagttggtagcgttgcggactgcccaaaaaccgcgagttgggtttggctaacagtgccgagtcgctgatgtcgtcgtaacctgcctgtcgctcaaggatttgctcgtaacggcccaagatttgatgcttgccgtaacgcgccaatttgtcaaaagtgattttctctttgcctctgtcttgtccgatgtagacgattggcgcgatgatgctgatggtcagcgcgtcgaagccttccaccatctccaactcctcaagaaacagaaaatcaccgtaatagcggcggtatttctgcaattcctcgaattggaacacgttgagcagccgcagctccaccaattgcatcacctcgtcgctgttgaggttgacggggttctcgctgtagaagatgtagttctccaaaaggtcttcaaaatcagtgtcttcgtcgctgtcttcggccaagcgttctatctgctcgatgagcagttcgttcaaggcgtcagtactcaaggtgtcaatggcgatttgtgccttcgcgaaaaggcaggaaacaagaatcaatatggtgaaaatcagtcgtttcatggtcatttaccgatactgaaaatcatgccgatttggatggaagagccgagttcttgatgcaattgtgccgctgcgtcgatgctgacgaaactgaacgcatagccgagaccaaaagtcaaaataccagggttcgattgcacccctgcgcggaggtagaggtgtttcaatgcctcaaactccaagcctccgcgcaggctgatgccctcgcgttcggtgtttttctcgatttcgcactgcccgacgaagtccttggtgaactggtaggcggcaccgaaacggaacacgatgggcaacttttcttggttgagactttgctgcaaacgaaaactgacgggattgaaaatgtatgtgccaagtcgcagcttttcagtaacttgcgactgaatgcccaactcaaaggtgatggcactttgtcgaccgtatgtttcgccttggctaatcaataggtaatccaactgtaaacccatttggaagtaaggaccaaagttcttggcataggccaaaccgaacttgttttcactgtatttcgacgagccaaactggttgaaactcaatcccaagcagccgaatttcgtcggcagggtgatggctccacttttgtaggccgtttcgggcaggaaccatcggttttcataatacagcccgaagctgaacttctctatattggccatgccagcggggttgttttgcatcgcccacagcccgcgcgaggccaccgaactgccacccatcgccgctgcccgtccgccaatgggactgatgaaatcgtgggcgaaagcggtggaaacggtgaaacttattaagataaggagtagaaatcttttcatgtgcagtgttttgatggtgcaaatgtagtggtgttttgcaaaaaatcaaagtttttggcgcggcaggtggcaaaatttcctattttcgcgaactaaaaccgatattatgaatgtcgttctcatcattgcggccatcttgctcgtccttcttggattggtgggttccatcgtgccgggcatcgtagggcctccgttcag

SEQ ID NO: 1296 - DNA, 18251 bp, synthetic construct
  source 1..18251: mol_type = other DNA
  misc_feature 1..18251: note = Synthetic
aataattcaattgctttgggggctttgacaaaaatattttcttcttccaaatcaataatcttaagctgatagtttagcttttctattaattcgcatgtgtattttttcataattgtgatatattagaattttcaattcttctttcatttttcgagagtgttcttacaccaactatgtattatttccactagcatatcaggaatgagcaatgccaaactaatcaatactcctataataatcaacacaatcattagatacttcatgtaactatcctcccatcttttagatgaataatccgatccgatctatcagcaaagtcttcatcatgcgtcactgtcagtatcgtttgacccttttctttacataattctttaaatagatcaagcacaattgctgtattttggctatctaaattacccgtaggctcatctccaattattaatgttggttgatttatcaatgctctggctatagctacacgctgttgttctccaccggagagaagggatgctttcttctttccttgatcagctacatcgagcaaacaaagcagttcgaaggcattattctctatttcttctttagataactttcctaatttgagtgcaggaagcattacattgtcaaagaccgaaaattcgggtaataaaaaatgaaattggaaaatgaatcctatatgctcatttctgaaattggctaaccagttattatctttaccttttatttcgttctcacttatatttatacttccgtcaaaatcagtatccattgttgagagtaaatataataatgtggatttcccactgcccgattttcctgttatagaggtcagtttccctttttcaacattgaaattcaaatcttttaagacatgaaattctgttggttgccgaaagtacttattcagattatttacttctaaaatattcatagcctaacctcttaatattgttatgggatctaatcgggatgctttacgagaaggaagataaccagctaatgaagtcgttaacaatccaaagagcagacctaatatatagtataagatattgaagcacatcggtaaatggtccaaggatagaaaatattcactttcgaatggaataaatgttgcgagccaagaaagtatcaagccaatcagtaatccgagaattgcaccaatgaaaccaattgttaaagcctgtatcataaatatcattcgaacatcattatcggaaaatccaagagctttgatgattgcaatatctttcattttttcatatatcatcatatttagaatgttgaatatcccaaatccggcaacgagcaaaatgctggctgcgatacatttaaaaacaatatcgttcaattcatctccttcaaataaaagaggattatcctttaaccagtcagaactactgcatgaatgttgttccaccaaagactgagccattgcgggtgcaagtgatctatcatataattttatgtttatatctgtaatataggatgatggcacacttagtatcgtttgaactgttttagtgttaacatagcaaattgttttatcttgatcgggtatacctatttttattattcctgataaagttgctataaaatcaaaccctttatcggtggtaacgactattttatctccaatattcaagtttaatctagcagctaatttcttgcccataactaaactattagggatatgagatagggctttggaatctcctgctacgaatttactttccagatctaagagtttattttcatcttcataatttatgcctgttatctcaccattaattttagaagaaccaaagttatagtagacttgggatttgactatccccgaaacagctttcaccgccggattactattaagtttttcaatggtcttttgggcatctctcagatttagaaggatattcttgggtttaggatggtgtacaatattattttctccaatatgtaccctatctaatactgcatcttcacttatattagtttcattaaataacctgatgtcagggcactgctccaaagatagttctgttatatactgattaacgcctttaacacaacctaataaaaaaataaagacagcgattccaaatgtaactcctgcaatggctacaattgtttgtgtcttctttgcccataactgcgtgaagccaatataagaggtcagtttaatacgattgatatagttcattgcgatctgtatttatatatgatgtctcctattttcaggccattagttatctcaatgaaattatcatttctaataccagtaagtacttttattttctttgttacgccctctgatgaatggcgtaacaagctatctccttctaataagtagtcaaaaggaataaggatagatttttctttttcccgaatcataatatttgcctctactgtggattgaggaaagaatgatgagttgcttgtaatagaagcttcaaccttgaaactacgggaatctttttgtagtaatgggtcaattttcgaaatagcaccttcaaaaacatgatctttcgaaatatctgtttcaaaataaactttttgtccgattctaatttttatcatatccttctcatcaactaataattctaacttatatttgttctcagaaccgataagcaatattgtttcgccactaatgacaacctcacctactttcttttgaatggaatatacttttcccgaaactttgctctgcaatactttactttcattcgtttcagacactcgtgccaataccatctctgcatcaagaaccttattcgctaattcatttcttttagccgtgtattgctgctgtaaattagtatatacagtatagctcgattcagctattaagctatattgttctgcttcttttgctgaaacggctttgtctttcaataagaaattataacgttcagcattctttttatccaaggcatatttctgatttgctaactcaattttcaatctgaactcatcaagtatggctgatctttccaatgcttctttctttgcgaaagtcagttgctcttcagcaataccaacttgttttacctcttttgatgtaccgagatatactaagatatccccttcttctacaaagtcgccctcttttaccattatctgtgcaatacgttctgttgatgcccccttcaataaaaaagattgctcggggaatatttctcccgaagcataaactgcttcatttatagtttcttctttcactgcgtaagattccatatctccattgcaggatgaaacaaaaagaacaagagtggctataattgtgcataacaatattcttttaggctttactagccatcctatatatccatatacctgtaatatcagagcaaatgttctcatttttcgattctgttactttgtaaataattcagttcaacataatttttaagataattcagctttgctgtatttagtcgttcttgagattcgattaagtcttgctgaatttgtttcagttggagcatgtcaataattccttgctctattttttgttggcataatctctcattctcctcagcaagttttaccacttcgtttaatttatccaatactttcaatgttttattggtttccaaaacaatttgccgaaagttttttgtttctcgttcctcataatctgacaactccatagatgcttgctttgcaatagccttttgtcttttagcagaatttatgtctgctagagagaagagaggtatttgcaaccgtagacctacaaacccactggtataccaagaagatgatcttttgaaatcattgaacttgtcgccgaatcccatttgccccaaattacttgtaaatgacagcttgggatagaatgatgatctgagtgatttatatttgtattcttcaatattcactttatgttgttgttcttcataattaggcaaattgtgaacactgaaactttcatttgtcaatgaaggtatattttctatatctgatatgcttaacaattcgtccaatggataactcatccagaatttcaaatccaataggcttttttgaaaatctgtttccacttttatctgattctcgacatattgatttaaaatactttgcgattggtttaatgatattttatctataatacctgcatcaaattgcttgaacaatagtgaattaatatgtctatacatacgcaatcgttcgtcagctgtttcaacatttattctttgtatctgcacagaatagtaggctgccgtaacattcctatctaatagtttcgataatgattgataattatatttagacgcttgacttttcaaattttgcacctttatctcttgccatgcctccatattcaatatcttccaattcacattcacgccatagttacccatccaaggagttcctataggaattgctacagttgttccttcctctttgccgactagctctcccggataggattgtacaggtatcttccaataataatccatttctgccgaaagagatacttctgggacaaattgtgataaagccactttcttatcgaatcctgcgactcttatattttgagaatttgccagtaactccttgttgttctctttggcatacactaggcaacgatcaagttgccacccttgtccataaacgagtggaaagaatgagtaaaaagttaccagtagagtatatatttttacttgtcccataggtgttttgataattaaaatccaatttgaagccctgctgatgcataaggagatatctgaaaataatagcttctatcctgaaacattcctttaaaacttctgtcactaaattcggctaaacgcattgcattgataccggcggttaatggtattgacaagtttttcccaatctttatctcggggcgaagacctcccacgatgtattgatgagaaaacattttatctttaccatctttttccactaaagctaattgcccattaacctctgcaataagactaagactaaaatatttactaaaattatgtttagcagatatttcaagaccttccagcatggagactttaaacgcaaagttcccctgtgtagtccaattaagatataaagcaggaaacaccatcggaaaaccgaatgagttattcacagctattccacctccaaggtccagatttggtttaagatgcctgataaaaataacgcctccacttgctaaaacatttttaaaacctatttgagagaagcgtgtagtaggggcatatattcctgcaccgatacttgccattaacgaccatttgtcattcaatggcctcatgtgataaatacttaagccaagattcataatttcatctaagaccagatcttctgtaaaattcttattgttaagcgaggcatatgcccctcctgcatttattccccaaactgtagggcggttattctcatttatttttatggatagcggtaggttgattcccccttgatagaccattgccgaacccttactatcacctactttctcatccgtatccccttccattatacggtagtttgattttccgaaatattcggttttaaatgaaatttgtgcatccacttgtatgcaaacaacacttataaaaacataaatcaataataatttcatagctttaatcgttttaattagacaatctgttttaagtttactgagacaaatatcaataggattgggatgagatgaaaatcgttttgaccgatggtcgctcagttttgatgcttggtaattgttctatggatttatacctctaactttgtgatatgaagaataatcttttgaaaaactatgatcggtttgttatcctgatatggatatttctaaccattatctttgcacttcaatatataccaccttcatcggtggtcgagggcggtttactggctttgagtatgatgctatgtgcatatccatttacaacctatctgagtaggaatttattaaaaaaagcaatgagacaaaagagaatgcttttgtttataggacagttttttcttatttctgccttgtttgccgtacttatccctataatcctttatgggttttcatatttagaaaaaagtggaatatttcctccttcagagttactctctgttgacgattatgcgatatacggctatctcaatgcttttgttataacgttgtttataaattttggattttgcggattgcgattttatgaggagaatatgaagttgcatgaagctttggttgaatcacagttgcaagtactccatcaacaaattaatcctcatttcatgtttaatgtactgaatcacattaatatattaatgcaggaagatgtaaacttagcgtcttcactattagtaaaatacgctaaaatactccgctatcaacttaatagcgagaaaaatagaagtataagtatagagcaggaggttcagtttttgaaggactttgttgatatagaaaaaattagatggggagatgaattacagattaattgtttgtggaaagttgaaaataacgaaaaagaatttccgtctttattactgattacatttatagagaatgcttttaagtatgtatcacgagggatatctgatagtgcatatgtaactataaattttgagcaaaaggctaacttaatttgtttggaagtcgaaaactccaaatcaaatattcagctagagaaggacagtgtttcgggattaggactggagaatataaaaaaacgcttagacatcctctatgctgataattatcgtttgacaataaaaaattccgaaacgacttattatactaaactcgtcattaaactataaattattatggcagaattactatcaaaacagccaaatggtcaacctctaagatgtctaatagtggatgatgagcctgtagccattaaaggagttgttaatttcattaaccagttagattttcttgaggtttcaggcacttgtacctctgcaatgaaagcaacagaaattttaaaagtgaaggatattgatttgatgtttttagatattaatatgcctatgttatcggggcttgaatttttggaatcattggataaatctcctctcacaataatgactactgcttattcggcacatgcactggagggttttaggttgaatgttgtcgattatctattgaaaccgatcgaatttcaacgcttttttcaggcagcaaacaaagcattagacttatttcaatctcgaattatattgcaaaataataaggaggaatctgaatctgacatgtatatccgacaaggcgatacctttcagcgaatactttgggaagatattctatttgtggaaggaatgcagaactatctaaaattgcacttcaaggataaaacctttgttatccatcaaacaatgacttctttggaagagatgctacctaaagattcatttttcaggatacaccaatcttatttaattaacatatctaaaatcgattctatctcaggtggaagagtttttattgatgggaagcaacttcctgtttcacgccatcggaaagaagatttacttaaaacgatagtgtataagaaattgataagtaagtgaaatttaatagccaatatactcacgttttcaaaagtttcatgtatatttgaacctagaagttaggctcacagcggtctgccaaaacaggacaaaaaggcatctttttaatcgttacgaattcgttacgaacttgcttttttgaaaacttaaataattgattactaaatctattacgagataaaaacgtgttcctagccggatcacaagattaaaatattgatatttaagcgattacgataaaaagtagtcgcttttttgtgtttataattattgattagcatgaaaaaaacatacttttctaagacgattttacacgggttacgaccaaatgtttacaaatagtttacagtaaaatttaaagaaattatgccaacttttaaagcagtagtaaggtctaaacgtgcagacgggttatttttagtttatatccgagtaatccacaatcgtaaaacggactatatcaaaactgataggtatgttcatcaagggaacatcaggaaaggcgaaatagccgaccagttagttctaaatcaatgtgcatacaaaatcaaaacctattatgataagctgaataaagaggatattgaagactggacggcaaaacagattgtcgagtttttgactaaagggaatgaaaaaatacccttttatcccttttgtgaacagtttatagcaaagatgataaacaataacagggaacgtaccacaaagaactatactacggctttaaactcgtttcgtgtgttctattgatatgaatgaattaggtaatgtccaatagcttcgaatatagtcataagcgtaagtcttattgagataagaaatatagttactcaactcgtctaagtcatcaaagaatatatgggaagcattgcaggtgttgttcttgtcaaaggtgcaggacagggttgctttctggtcttcgaacagaaggtctatgatgttctctttaacttcattttcaatatattcggctacatacatgggattatctgagtagctttctttgatttcgtcatgggatagctttaatactagggaagaacaatttatcagtattgcacaatattcctgagcttgtttgttttattgtcatacatacgtctgtttagagcctgataaaatacataatgctatcagacagattattaatctaaaaaaacagatatatttacgactgtaagcttggcttatggaactgcaaaggttacagacccataaaaatagcagcacgaaatatccggttaacaaatatacaattttatgtaataaattatttcgcttttccttatctttggtaatcttaatattacagtatctaaataattccgatgaaaaagtccatagcctatctgcctaaatccaaacaagaagacttaatacgccttgttatggaaattaataaacggcttccagaagccgaaatgattatcttatttggcagctatgcgagaaatgaatatgtagactatgacgaaagagtagaattcggtattcctacctcttttcgttccgattatgatatctatgtaatcacaagcaagatatcggacaataaagcaggaatcatattagataacattgatgcattatactataaagaaccagattatcaaactcctgttaactttatcaacgacgatattaaaacgataaataaagctcttgaagaaggcaggtattttcatacccaaatcaaacaggaaggagttattctttacgatagtggtaagtttaagttagcccgaagaagaaagttaaagtttgatgagatacaaagacaagctcaggaatattttgatgaaaaatacactaaagcacaagaacattttaggatgtctgaattagcttataaagaaaatttttatcaacaagctatattcaatcttcatcaagcctgtgaaaactattactacgctattcgattatcttttactttgagaagcaataaacaacacaacctgactaaactggctgcgtctgttaaaggtcattctgcggatttggctcatgttttccctaataattcggtagaggagaaacggcttttcaatctggtaaaggatgcttatattgaggcaaggtataatccgaaattcttagtgactaaagaggatattgatgctcttattccgaaagtggaattgctgagggatataaccaaacggatttgtgaggtaaagattggggagtatgcaaatatggggtaaacctattaatgaaactataaagaagatatattttttattatagaactttagagccgatgtctatcggcttttttcgtatataccagatacaataaaagaaaaagcgacaccgaagtgccgcaattgatgttttcacaacggaataatccttattatgatttgctttcaaattgtatttgcaaatatattaaaatttcacataaccatatcaatatccttaaaaaatatttatttatctttaaggctttgataaaaaggaagctatgaaaaagatattgggattagatttgggaaccaactccattggttgggcgttggtagatgctgaaaataacaaaatagacggtatgggtagtcggataattccaatgtcgcaagatgtgctagggaagttcgacagtggagtgtcaatttcacagacagctgaaagaacaggttatcgtggagtgagacgtctacgagaacgttgtttattaagaagagaaaggttacatcgtgtgttaaatatcttgggatttctaccgaaacattatagagagtcaattgattttgaaatgcgtttcggacaatttgttaaagactctgaacccaaattggcttggaaagaaatcgctcccaagaaatatgattttatttttaaagcatctttcaatgaaatggtagccgaatttaagaagttaaaacctgagctttttgaattgaaagaaaacggagtggaaagaaagattccttacgattggacaatatattatcttcgaaaaaaagcgttaactgaaaaaattgagaaagaagaattggcttggttgattttgaatttcaatcaaaaaagaggttattatcagttgcgaggcgaagagcaagaagaaaataaaaataaacaggagaaatttcatacacttctagttactgatgttgtagagcgtgaaaagggaaaatcgggcacttggtataatgttgttttagagaatggttggatttataaacgagaaagtaaggtttcattgtcgaattggattggtaaaaccagagactttattgtaaccaccgagttgaacgatgacggaagtgtaaaattgaacaaggataatgaagaaaaaagaagtttcagatcgccaaaagaagaagattggggattagtgaaaatacgaacagaacaaacaataaaccaatcgggtaaaacagttggggaatatatatacgattcgcttttagaaaacccgacacaaaagatcaatgggaaattggtgcgaaccatcgaacgcaaattttataaagaagaattaaaagctattttagaaaaacaaaaagagtttcatgccgaattgcaaaatacagaactttataccctttgtttaaaggagctttacaaaaacaatgaatcgcatcgaaatagtattgctacaaaagactgtacttatttgtttttagaggatattcttttttatcaacgtcccctaaaaagcaagaaatcgctcattgctaattgtcagtttgagtcggtaaagtataaaggtaaagataaggaaggaaatgatattgaaattcgtcaacctctgaaatgtatcgctaagtctcatcccttatttcaggaattcagactttggcaatttatacaaaacctgaaaatatacgaaagggaaagaatggttgatggcaaattgaaacttgatgttgacgttacgagcgaatttctaaaaacggaagacgataatgttgctctatttgattggcttaatgatagaaaagacataaaacaagatacgctgctaacatcttatttcaaaattaaaaagaataggggtgaagataagttgccatatcgttggaattatgtggaagataaagaatatccttgcaatgaaacccgttcgctatttttatcaaaatcagcaaaaattgaaggtttcgatgcaactttttttaatgaagccaatacagaagccctgtggcatattttatattcggtaaccgataagatagagatacaaagtgctataaataaatttgcaggaaagcacgatctgccggatgagtttataaaacaatttgcgaacctcccaccttacaaaagtgattatggttcttattcagccaaagctatcaaaaaaatattacctctgatgcgaatggggaaatattgggacgataaaaatatagacgataagacaaaagaaagaattgataaaataattgatggcgagtttgatgaaaagatcaaggacagagttagagataaggctattaatttaacggatataaatcattttagaggtttgccgctttggttagcatcatatattgtgtacaaccgccattccgaggcaaaagatattgtaaaatgggaaaccgtaaaggatttagcttggttcttagataatagaaaccccgaaggatttaaacaacattcgcttcgtaacccaattgtagaacaagtgattaccgaaacactcagaacggtaaaagatatttggcagcaatatggaaatggtgctgaaaatttctttgatgaaatccatgttgagttaggtcgggaaatgaaaaatcctgctgataaacggaaggcgatgacagagcagattaatgcaaatgaaaacaccaatctgcgaataaaggctatactcgaagagcttaagaatgcgggtattagtgacgtacgtccattttcgcccacacaacaagaaatactaaagatttacgaagaaggtatatacagttatgaaagcaaaaaagaggaactcgaagtaattgataaaatcagaaaaagcagcaaaccaactaaatcagaaattcaacgatataaattgtggttagagcagggctatatttctccatatacaggtgcaatgattaaattgagcgatctttttaccacaaggtacgaaatcgagcatattttccctcaatctcgtttttttgatgattcgttaagtaataaagtgatttgcgaaagcgaagtaaacagtttgaaaggcaatcaaacagcaatggaatttatcaaaaaacatcatgggcagatagtacctttaaagggaggaacagacgtaagaataagagatgttcttgactatgaggattatgtaaaacgttatttttcgaagaataaaacgaaacagagaaatcttttaagcgaagaaatccccgaaggtttcatcaacaggcaaatgaatgatagtcgctacattgcaaaagttgtaaaaacctacctaagcaatatcgtgagacaaacagaaaaaggcgagttggagcaggaagcaacttcaaaaaaagtagtttcggtaacaggaagtattactagtcaaatgaaacaggattggggattgaatgatgtttggaatcatctgatcacaccacgatttgagcgattgaacacgctgaccaactcctcagcctttggacagtgggagctaaaaggggggaagaacggaggcgaaggcaagcgagcattccaaaccactgttcctgttgaaatagcaaaaggattttcaaaaaagaggatagatcatcgtcatcatgctcttgatgctttagttattgcctgtataacaagagaacatattaattatttaaactcaatcaactcagaacgaaaaaattacagtctagtatctaaattgagaagattagaggaagtaatgattaaagaccaactacgaaaagtgccgaaagaatttcataaaccatgggagaattttacacaagatgcccaagctgctttagaaaatatcattgtaagtttcaagcaaaacctgcgggtaataaacaaatcggtaaataaataccaacggtacgaaaacggcgaaaaggtatttgccaaacaaaccaaaggcgatagttgggcagtacgcaagccgttgcatgccgaaaccgtgagtggaaaagtcatattagggcgtattgtggaaaaagaagtggcaataaatcgagtattagaggacttagatagcattgttgaccctataatcaagaaagaactaaaaaaccgagcgacttgttacaaaaataatattgccggattgaaaaaatatcttaaagtaaatcctataataattgatgggcaagaagtcgtaaaagtgaatatctatgtaactgaaagtattgaagctactgctacacgaaaaatattagatacgaccttcgatgaaaaacgaattgagaaaataactgatacaggtattcaaaaaatattgatgaaacacctcaatcaagatatttatcagaatgcgacagatgaagcaggaaaaaaaataccgtctcacgaacttgctttttcggaagaaggcttggaagcattacataaaaatatgcttacgttgaataatggcaagcctcatcaaccgattaaaaaagtgagagtctttgaggagggtcgcaaatttgctttgggaactagaggtaacaaaaaagataaatatgtggaagccgctaaaggaacaaacttgttttttgcaatttatattgatcaagatgggaaaagaagctacgaaaccattccgcttaatgaagttatcgaacgccaaaaacaagggctagatgtagcacaatcaacagaaggtaaaacattattgtttacactttcgcctaacgatttggtatatgtgccaactgacgatgaggtagaaaaccctcattgggtagattttaggaaactgacaaaggagcaggtgagtagagtgtataaaatggtatcatcgacagcttatcagtgttttttcactccttactacatagctacacctattattcaaacagtagagttaggtgcaaacaataaatctgagcggacttggaatggaagtatgataaaagaggtgggcgtaaagataaatgtagatagattaggaaaggtaaattgaagaaaaaaaagtagccccttttagtttaggaacaagtgaaagcaaatcacaactattctacttaatactctaaatattcaatatatagatgttaatataaatagtttaatggggctacaattattacaaaggtaagtgttttatgtcaaaaagacaattcgcctttttgacataaaatctactaaaataaaattattctcgacatccagtacagcatgttccctcatgaagaattgtatactgatttcgtttggcttcctcaattgcttctaatcgattaggaaagtaacccaagagtgtttgatctttagttgaatacagccatttgcaatcttttttatgcacttcgtacccgcttgttaaatgagcacttttaattaaaaaataagtttcattcatttttttatatattaagtagaataagaaattaaattatttagtgttgtaaatgtattgaataaataattatgaacaaaataatccagtatattcttcgtttttatttaataacacttaagttttatccttattattaaccttttatcctatgataaaaaaaacactttactttggaaatcctgcatacttgagtatgcgtaacaatcaattggtaataaaactacccgaagttgagaaaaatgacacgttgcctgaaaacttcaaaaaagcgagtgaaactctctttccaattgaagatttaggagtagttgtactcgaccataaacaaataaccctaacacatgggcttatcgaaaagctgttggataacaatacggctttgttgacttgcgatagtagccggatgccagtagggctgatgctcccattatacggaaacaagacacaaagcgaaagatttaactcacagatcaatgcttctgaccctttaaagaaaaacttatggcagcaaaccataaaagccaaaataacaaatcaagcagaagtattgaagaaatttaggtcttgtaatattcgtaatatgatgcactgggcaggagaagtaaaaagtggcgatcctgataactttgaaggacgtgccgctgcttactattggaaagaagcttttcctcagattgacaacttcacaagaggtagagaagagaatccgcctaataacctgctaaattatggatatgctatacttcgtgcagttattgcccgctcgttagtagcaagtgggttgttacctacgttgggtatacaccaccataaccgttacaatgcttattgcttggcggacgatataatggaaccatatcgtccatttgtcgatgaattagttttctcaatagtcgatagtggcgaggattataccgaattaacgacttcgttaaaaagcaaattactacaaataccaaccatagatgtgatgatagggaaacaaaaaagccccttgatgattgccgcaggtcagacaactgcatccttaaaccaatgtttcgaagggaaactacgtaaaattaaatatcccgaattattgtaatctgtcggtaatatggagcaagaccgattaaatcaataccgtattatgtgggttctagtattatttgatttacctaccgagacgaagaaagatagaaaagtatacgctgattttaggaagaacttacagcgagatggatttaccatgtttcagttttcgacttatttacgacactgtatgagtgttgagaatgcgaatgtacatatcaaacgagtgaaaaattttcttccgacaaaagggcacgtcggaatactctgtattacagataaacagtttggtatgatggaactattttatgggaaaagcccagaatcaaagaaaacaggagcgcagcaacttgaattattttagaaaataaaaatcccgactttgatcgggatttttatttgaaatacattgatttttcaaatgctaatggtatttgcaatatattgaaatacaggtgcttgtcgtgtggtatgatgtatttcaatgaactaagatacaattttgaaagcaaatcacaaccgtaaaggatataatagatctatttgataagatgtatttcaatgaactaagatacaattttgaaagcaaatcacaactcaatatattccatagttacaggaagtttagatgtatttcaatgaactaagatacaattttgaaagcaaatcacaacttaaactttgataagtagaatccaaaagcgatgtatttcaatgaactaagatacaattttgaaagcaaatcacaaccgccttctgctgtaactgactcgaaagcaggatgtatttcaatgaactaagatacaattttgaaagcaaatcacaacatgacgctaacgaggtagaatttcgtgcatgatgtatttcaatgaactaagatacaattttgaaagcaaatcacaactagcatcgtcaacgcttaatccttccacaagatgtatttcaatgaactaagatacaattttgaaagcaaatcacaacacaaagccactgtaaccgagttaatagaagatgtatttcaatgaactaagatacaattttgaaagcaaatcacaacgcgattcggtcggtaactacgaaaaagctagatgtatttcaatgaactaagatacaattttgaaagcaaatcacaacatatacttatcgtgtagcccgctattttggatgtatttcaatgaactaagatacaattttgaaagcaaatcacaactaactctcgcacagcttcatctttggtaagatgtatttcaatgaactaagatacaattttgaaagcaaatcacaactaccctcttcaatgtatagggcttcaataagatgtatttcaatgaactaagatacaattttgaaagcaaatcacaacgatgtttcacccaatacttttacgaattgagatgtatttcaatgaactaagatacaattttgaaagcaaatcacaacttaagaggtaatgaaaccattctaaaatctgatgtatttcaatgaactaagatacaattttgaaagcaaatcacaacctgaataaataacatcccagtgctcttcattactatgtcgtcttacatactcttcaattaattgaggaacatttttcaaatccaaagtctgacaataccgcttggttgggaaagcatactgtcttacgttgtatccacctgtttttatatccacaacaattagctgtttgaccatgtatcccgatgcataggctgtaatatcttttttacctcacccagcaactcttcatctaacggctcgtttgcccattcaatgtttttcaagactgcactaggtcttgccgtactgaataaggtagttgtaatccgtggattgcttattgcatattgtatagccagtttctcgatagggtatttctttcctaaacaatactgcatagcttttttacacaattccttcaatggcgttgatgccggatgccaatccggagctccccgttgagtgagtaaccccatcgaaaagggcgacgcattaataacaccgattcccttttcttcgaaataatccagataatcgactaaagcatcatcattcagacaaaaatggcagaaattaagtacagtatctattgttcccggcggaacacgatctattacccatcgaagattctccagttgaagatcagtaatacccacatgttttacaacccctttgtcacgtaattctattagcg

SEQ ID NO: 1297 - DNA, 18117 bp, synthetic construct
  misc_feature 1..18117: note = Synthetic
  source 1..18117: mol_type = other DNA
cccaataccaagactgcatatgcagttctgcatcaatccctgcttggacagcccttgtccttgaataatggtattgcaagcttgtagaaattgaatagatcgaaaattttggtcctccgatattttttgattctcttagagcatatcctgcataaacatttacagaccaaggtttccttttcctgtcttctaccatctcgttggtttgactcaaagaatttgaatttaacaaatactgataggaaataccggagtgaataaaattaatgcctaagttcggagcctttgttgatccatttgaaaaatgagaaatcattgcattaagctttatcatttgattccatttcaattggtattgagcactcagcatcaaattgacatacaaattccaatgcgatccaatcgcagtttgatacggatttgataatctgtgaaatggtttgtacacatatccgacaccaaatccatttctcatcatgaatctcaattttttgaaatgcaatacatcaaactctaaatatggaaaaacggctatagcatccgacaaaatttctctaggtttacccaagttgcaatagctcattgtgattccatatgaaggcaatcctgcctctctgctccatgccttattcccgaaagttttttttctgattatcatctctacattataagccggagcttgtggagaatacttaaatttttcagtatggggaataagttttccaacaaaaacaccggactcaatacttaatgtttgtgcacagagtgaaaagtctataaacttaaatgagataatagttaaaaataaaaagatgagtttaaacctcaacattgcccaataaaatccatataagattattttatccaagtcgctattcaaggatgagttcagaattttctgctttccctgagttctgaataaagctgattttgagttcatttttattctgaatctaagatttcatttcactcaccaaaaactcaatggtaggttggtaatcctgactaggaatgtgatccaaaattttatgaggaattcgttgcaagtagtttgtaagatgcttcagtgaaattggatttagtttccattgatctctaaaattccaagctctacaagctgtcatccattccattgcgacaatttgcatgacattattagtaagctcaagagactgcaatgcagcattggttgccatacttacatgatcttcttgccccttggaggtcactatgctatctactattgcaggagtggccagttgtttattttgtgaaactaaagaagccgcagcgtattgaacaatcatgtatcctgaactcaatcctgcatcttctattaaaaaattcggtaaatcgcgatgaccacagaccaacaaataaattctacgttctgcaatgctccctaactccgccatagcgagcttaagaatgtccgcagccattgccaacggttgcgcatgaaaatttcctccagaaactactttaccatctgataaaattaagggattatcgctcacagattgaatttcattctctgcaattttttgaacatattgaaaggcatcaagacttgcccccatcacctgagcaatgcatctaaaagaataaggatcttgaacagaatacaagggcctagaaggtttggaaatttgatcatctattatttttgcaatcttttgttggccgttttgatttctcaatgaatgaatttcaggatgaaaaatatctcgattgacatgaaatgcttccgaagacaatatagcggattggacagcagctttaaaaacaatatctgccaaaataatattctctatcaatacagacaatgtatactgagttccattgatcaaagccaatccttcttttgctctcaatcccggagcctgaatttttttaatagataaaatttcttttgcctcataaaccaagccttcatacattatctttccttcagcaatgcatgccaaacttaaatgagctaaaggagctagatctccggatgctcctagtgatcctctctcaggcactacaggaatcagatcttcattgtacagacttactaaaaattctacaagctccaacctgactccggatgctcctttgcataaggatataattttaagcaataaaacccatttgatacgttctgctttacttatagcgccgtatccacaggagtgagatcttattaaattaatctgcagttggtttaggtcttcttcattgatcttggtatcgcataagactccaaatcctgtattaattccgtaaatgatttgatcctgattttggattgtggattctaaagctttacgcttggtttgcaataattctttggtgctcggatgaatcgaaattttttgtccggaagaaataattgcagacaagtcagctattggatatcgctttatatggtcaatattcattttgaaatatcggattgtacagaatgacaaagttaatcaaatttagacaagaaaaaatccgaaccaatttcttgtgagaatacatctttttcttattcaaaaaaagaacaatacaattcgcttttagtaaatattgtattgaattttaatttttcctttaagcgatctccaactcattgacatcaaaagtcatcaatgcctcaaattgacgaatcctctcatgaattagatcttgtgataaatttcgcaatctgcttaaactaaaatcttctacacagaatgaagccattacagaaccataaattatggctgtcttcatgtgactatagttcaatgaacccattctagcaaggtatcccaccataccgccggcaaaactatcgcctgctccggtaggatctattacctcggacaccggcagacccggagcataaaatatttgctctccatggaataacatggcaccatgctctcctcttttgatgacaagatattgaggacccattgcatggattttttttgcggccttgagcaaacttcgttctccggacaactgtcttgcctcctcgtcgttgatcgtaagaacatctaccttggcaataacttctttaagcctgtctaaggcaacatccatccaaaaattcatagtgtccaaaatgatacacttgggcttttgattgagttgagataatactgaatattggatgtccggtgtcaaattgcccaacattatgaactcgcaatttttatacgaatcaggaagaacagggttaaaatccgctaaaacattaagatcggtgatcaatgtatcgcggccattcatatccttgtggtattttccggaccaaaaaaaggatttcttcccgggcactcgtaccaaaccatccattttgactcctcgcgccttcaattgctctacctcagattcaggaaaatcttctccaactattgaaacaaggtggatgtctttatgccaataggatgccgcccaactaatataagtacaagctccaccaatcaccatctctgcctttccgtatggggtctctattgtgtcaaaggccattgtgcctaccgtaagtatactcatttgaaaatcacttgattattcgacaaaaagaactttgcaagttcctatttcattaaaaaaacaaaagccttgcatcttgcaaagcttttgtagcgccccttcttgggctcgaaccaaggacctgcggattaacagtccgacgctctaaccaactgagctaaagaggcatccataaaatggagtgcaaatataggaatgctttgcaatatttcaagaaaaatcttggcaagaaaattacttcttaatgaaactttccatcccccaaatgccgtttgatttgttcgctacaagcaaataatttcctgctggccaagtttgacacggaatagagagtttagaatcatcaagtttgttcaattgatatatcacttttccctcagagttcaatattctaagctgtgcatcttgatgatctgccggaatgcttatttgaacaaattctgaaacaggattaggtgttatgttgagttggataaattcttgcttcacatcggaggtaccaaccacagactgtgattttaaataataaaaggaagtatccactgtgctttctgtcggcaactccaactccgatatttctaatgtcaacaaaggaacagaatatcccggagtataccattcatatctttcggttgttccactgataatgggaaatccactcaaactcccttctataaaccctttattagtcaatcttaatgccgaaaaagtacctagtggggtgatcacttttccccaagaattaatatcaatattttgctgacccgctacagaaatattcccaaaaggagagttcaaaatggaactcatggtatcataagtcacgccccccaaagctgcaggaaacgggattatagtaagtggtttgctaaaattgataagtgatttgtctgcactattataattcccccattgatagattccattagaattactttgaataaaatcaaaagtagtatctacaattggatattctatttttatcaaattggcctgagctggaactgtcgtgatcccggctacaaaaccggatggtaaaaattgatatgaaaacccggtctgtggattttttgcatacgctgtggcatcccaagttgtgtccagttgtcttttgcctgtccaggttcttagtgaaatgagattataatttaaatccgcaaattcataaattgagccggctttcactgcagaacttgaagtgattataggagattgtgcatccgctttcacactgagtaaaagacaaattaagattgcaaaaaatgaatttttcataagcaaaagaagtttcatttaaattaatatctatattcataatagcgttggaacgctgcttagaccaaataaaaactattgatcacagatgaatttccaccttgccgaagttatcctctacgattctgattcttttgtttcttcgtttgggtctgtaagttccttggcctcttccaatagttcatctactgattccattaccgtttcttctgtttcaacagtcgattcagaaatggtttcttcttcaatagtttcgttgcttggatttgaatctgattcagacgttgcgtcagcagatttggtttttttactttctcttatctcatctgcggcttttttcaatttcgcagtttcttcgtccgaaattacagtttgactggtctgaatttcttcactgattttgttgattatttttgccttttcttggtcgatcaactcttgatttttagctctctccgccaacttctcttctcgcttcttggtattgttttttgctttctccaacttagttttagtcagcaataattcatccaatttctgttgttttgacttgatgcgttcttctatcattcttattttggccacccgaatctgggcttccaactgtccattagagctggctattctcttattctcaaattctatatctttttgatcacgagctatggattgttccattttttgaatggcctgaatcaatccgtcatatcttttatttaatctattggcatccgtattatcttctgttcccgcaggagctccgttttgtctttttttgcgtatctcctcgaaagcctcatccaattttttcatgatgatgcttctatcctctcgggtcacattgctttgcttaaagtcattttggatcttcttgaggtcatcaaacaatggcttaagcgcagatcctcccaaaattctctcctgaatgccctcaatttggcctttaaagctttccaatatttctcttgatttttgtttgacctcactgtccatattttttcttaggaccttgagctcatcaaacaaactgttcactttggctttgagagagtcactgtgatctttaaataagtttctatcgaaaatatgtttttggataggttcccaaaaaccgactaattcatcccaaatcttatgatcaaaaagctcaaggcgtttcaccttgtctgtaagatcatccaattcatttttataatttttataaagctttgtggacagtaccacaaaatgccattccatctgagctcgctgaatcatgtctccacgctctactttgatatcatccggcaatatactctcggaggctgtaagctcagttattctatgctcagaggagctcgggatagcaacatcaccaccttcccgccatacagtcatcatttgattgtaatattcctcgtttacatctttttcgggaatacaatcaatatgaaccttgttatcatctgcatccaaatgaatggctaacaacaccttctcgttctgggcatttgagccccaaatcactaatctcgatctcatgatactttaaatcaatagttttcttatcgtaaatttctttcgttacaattcgtacggcattttcagttcctccgaaaacaccttgtcattttgacttctgagctttgaaaaagggagacaaaaatcctaccattttatctcatttcaaatatttctattgaatttattttttcgactttagcctatccaacccaaatctctgattttcaatgcaatttgaacggcattggtcgctgcacccttccgtaaattatctgcggtaacccatagattcaatccattttccaatgactcatctcttctcagcctgcccacgaaaacctcatttttatgcctggcatattgaggagtaggatatgcatagctgtccggatcgtccagcacacacagtcccggagaatttttcaataactgccttaactcgtctaactcatacgcttgactcagctccaaattaacagactcagaatgccctccatataccggaacacgcaccgccgttgagcttactttaatctcaggagcagacattatttttctcgtctcatgaacaagcttcatttcttctttggtatatccattttctaaaaaaaggtcacaatgtggaatacaattttcaaaaattggatggtgataagctctcggttcgggcaccgattttccatcccgctcggcctcgtactgtcttacagctttcatcccagtccccgtaaatgactgataagttgaaaccacaatcctttttataccgtattttctatgaattggatttattgccacaaccatttgaattgtagagcaattaggatttgcaatgatgaagctgccctctttcaatgcagattcattgacttccgggaccacaagagaaacctgtgggtccatcctccaggcagaagaattatcaatgacataacaaccttcggcagcaaattttggagcccattccaaagagctgcttcctccggcagaaaataaagcaatctgcggcttagattggattgcctcaagcatagatcttatacggtaggttcgcccttgaaattctacttcctttccaacagaactttcggatgctacaggaatcagctcagaaatcggaaatttcatttcatccaagacctgaagcattacctggcccaccattccggtaactcctacaactgctactttatatgccattctttatctggttttgttattttttttgttggctgtgccactcgccagcgagggtcggtgctttgcggggtcacccttccgggttccgtccggattccgtttcactccatccggaccaagccctccaagcccctcacaggcggacatttggtgtatttaagccaactttagctcactcattgcactctctgcctatgaataaaatgagctaaaatgcttttacatcaaccgccgaaacgtctcgcaaaaataagcttaagatcttggatttaactcaaaaataaattctctttaagactgtagtctgtcaatttatggagtttttaaagaatacgctatctttgtattaaataatgttgcaatggatttgaaagaaagcttgagtaatgccggaaaaacaacctggaaatgggttaaaatttcacttttagttgtattgcttcttttgatagcctatgtttgttttctgttatttgccaactttagcgagggcacaagaacaggctacgttaccaaaattagtaaaaaaggatatgtattcaagacccatgaaggagaactgaatacaggcttttttaccaatccgggcagaacgggcgtatccccggacaacgtttggtatttttccgtaccggatgacaatactgctcagcaaattcaaaaagcgtcagaatccggaaaaaaggtaacccttcattaccaacaaaaatacaagcaactgttctttagaggcgacacagagtatttggttgacaaaattgattttgcagccgaataacattttaattcgacaaaactttgttataaagcttttactctgtcgaaattccttcttgactgctatcctcttcgtgagccagctcagcaatagttctgaataaagcgttaaattttaggatatattctgtccttatgccgaatagtatgcctttacgaaacaatttaacttctcataacgttgtagagcgataaggataggttttcattgcatgaggcaaatttatagtatctactttctgttcctgctttcttactcactgcactcgcaggtcaaagaagaatttatttttttgcaaaatggttctttcgaaggtgagcctgcctgctgcgttgttccacagtcatgggtggactgcggacacaagggagaaacccctccggatattcagcctgccttggacgcagacaatgcccctttgttcaatgtgaccaaagctccacaacatggcaaaacctatgtaggccttgtagcaagagataatgatacctgggagcgaatttctcaacggttcatacagcctatcgaagccggcaagtgctatgctttcagtatttacatgtgcaagtccgaaaactatctatcagcttccaataaaaatcctcttaataagtatcaatataccaaggccatcaagcttagaatctggggaggaaatgcacattgcaatcaaaaagaattactgggagaatctgagttggtggataatatcgactggaaaaaatttgagtttgagttcaagccgaaaaatacattggaatatctagagcttgaagccttttacaatacaccggttctttttccttacaatggcaatttgcttcttgataatgcatcgcacctcatggtgattccatgtcctgagaccaaagagtacactgcatataaaaataaaaaagcaaaagaccagatcaaagaagacaagaaagcagcagaggtcgccaaagcaaaaacagaatcaaaaaataacaattcggctgttgcagatcaagctaaaactgggcaaacaaaagtacttaaagagttagattctaaaaaagtaaaagttggtcaaaccattaaaattgaaaaattgtattttgatgcagacagcgccaacataaagacagaatcgtattttgtattggatgaactttatgagtttctctctaaaaacagtcaaatcaaaattgaaatcggaggtcatacaaacaacagaccttcggacaaatttgcagacaatctttctaccaaaagagccaaatccgttagagattatctcgtgagcaaaggaatagaagaaaatagaatcaaatacaaaggatacggcaaacgatctcctttggtctccaattctactgcagaaggtcgatctaaaaatcaaagagtagagattaaaatattatctgtcaattaaccattgcagaaggaagaatccaattccaaaatcagtaaatgagaaggtcgcagggactcatgccctgcggtcttttttttttgagtagaataaaaaagcttatataaaaaaaggcgagttgccccgccttatatgttttcacaacggaataatccttattgtgatttgctttcgataagacaaagataaaattaaatattcagttgagtaaactattttatctttgtaataaaccctaatcagctgccttaaaatgaaatcgtttttcatttttacacaacaaaactctaagccaaagaaatatatattaaacattaattaaatacaaacaaatgaaatcaaaaaaaatattaggactagatctcggcaccaatagcattggatgggcattggtggagagatcagaagcctcatccaagatcattaaattagggacaagaattatacctatggatgctgcaacacttggagatttcgaaaaagggaataaagtatcccagacagcagagagaaccaagtttagatcagtaagaagacttcgagaaagatttttattgagaagagagaggttgcatcgtgttctaaatattctaggatttctaccaagacattattctaaagaaatcgattttgataagaattttggccaatttataaatgaatctgaacctaagatagcttattattccacacccaatccagattctttaaaagaaagaaaaacagactacaactttctttttatggatagttttaaagagatgattgcagaattcaaaaaaacgcaaccgcaattattttatataaaaactaatggtaaagaaacgaaaataccctatgattggactatttactatttgcgaaaaaaagcattgacacagaagatagaaaaagaagaattagcttggatattacttaattttaatcagaaaagagggtattatcagttgcgtggggaagaagtggaggaaaaggtcaataaaaaagttgagtattattcactcaaaataatcaagactactttagatgaaacctcatctaaaaatgatgaaaaatggtatcactttgaactggaaaatggttgggtatataagagaactagtaaggctcctttggactggacaggaaaaattagggattttattgtgacaaccgatttaaatgatgaccaaactgaaaaattaaacgctgatggcacagtaaaaagatcatttcgttcaccaaaggaggatgattggggattgttgaaaatcaaaactgaaaatgaaatatccctttcaggccaaacagttggagaatatatatacgaacgattattggtgaatccattgcagaaaataagaggcgagtatgtgaggactatagaaaggaatttttataaagcagaattaaggaaaattctagagaaacaagttgagtttcattctgagctaaaggatccaaagctatacaaagcctgttgcgaagaattgtatgaagtgaatgagggtcatagaaaaagtcttagcggtaaagatttttccaatttatttttaaatgatctgatattttatcagcgacccttgaagtctaaaaaatcattgatcagtaattgtaaatttgagaaacgagtatttttaaagaatggcgagaagtgttatgagcatttaaaatgtgcatcaaaatctcatcccttatttcaagaatttcgcatatggcaatttttagaaaatttaaaaatcattcgattatccgatgatgtggatgtaacagaacagttcttgaagagtgaagaagattgggttaaattatttgattggatgaattgtagaaaggatattgatcagaaggccttcctgaaatattctgaatttcaattaaaaaaagaagcctcattgtatcgatggagttatatagaaaatgataaatcttatccttgtaatgaaacaagaagcgccatgctgtctcgcttagaaaaagcaggaatagatcaagtatttctgtccaaagagaaggaaatagaattgtggcatcttttatattctgtaaatgataaagaggaacttagcagtggattgaagagatattcggaaaaaaatcgattatctcaagattttgtaaaagagtttataaagtttccaccattcaagagtgattattgtgcattttcagaaaaagccttaaagaaactacttcctctaatgcgcagaggcagttattggagtgaaagctctatccatgcagaaaccaaagtaagaatagagaaaataattgatggtgagtatgatgagaaaattaaagatagggtcagaacaaaagcaaaacaattagatactattgaaaaattttatggattacctgtttggcttgcttcttatgttgtttatgatagacattctgaggattctgatttaatacattggaggatccctcaagatatagatgattatttaaaaaatggattcaaacaacattttttacgcaatccaattgtagaacaagtcatagctgagacattaagagtggtgcgtgatgtttggaatttttatggtaatggaaaagagaaattttttgatgagattcatgtggagttaggcagagaaatgaaaaatcctgcagataaaagaaagagtataaccgaaagtaatattaaaaatgaaactaccaatttgaggataagagctatactcatggagttattcaatgacaaaaacatagagaatgtgagaccatactcaccatcgcaacaagaaataatgaagatctatgaagatggtgttttgcaatcatatagtgaaataccagaagatatattgaagatctcaaaaacaagtgagccaagtactgcagagattaataaatataagatatggctggatcaaaagtatatttctccttataccaagtctgtaattccactatcaaaattatttacttctgcttatgagatcgaacatatcattcctcagtcaaggttttttgatgattcattttcaaacaaagttatatgcgaatcagcagtaaataaagataaagataacagattggcatttgaatatataaagcaagaaggtggtaagaaaatagacataggcaatggtaaatttgttacgattataaaagagaatgaatatatcgagtttgttaataagacttatgttgcgaatcggattaagaaaagaaatttgctattggaggatattccagatagttttgtgcaaagacaacttaatgatacaagatttatcagtaaggtagttaaaaatctcctttctaatattttgcgtgaagaagatgagctagaatccgtttcgaaaaatctcatcagtacaagcggtatgattacttctgtattgcgacaggattggggaatgaatgaagtgtggaacgaactgatgagtccccgattcgagagattaaatgctttaagcaattcaaatgattttggtacaatcaatcctaagaccaaaaagtttctacctacagttcctttggctcttcggaaaggatttaatataaaaagattggatcacagacatcatgcattggatgctctagtagtagcttgtgtgacaagagatcatattaattatttgaataacgaaagtgcgttaggaaaagaaagtaatgatgtaaaattaaagaagcgatatgatcttagagccaaattgtgcacaaaaaaattcaatgaaggttctgaaactcattatagatgggtattcaatttgccatggaaaaatatagtagtagaaaccaaagaaatgttagaaaataccattgtcagttttaaacaaaaccttcgtattattagtaaaactgtaaattattacgataaactagagaaagacgctgaagggaaattaaagaaggtacgaaaaaagcaagtaaagggagagaattgggctgtacgcaaaccgcttcataaagatacagtgtcgggcattatatcacttcaaagaaagaaattggttaacatttcagttgctttggagaaccatctatccatcgttgatccatcattgagaaaacaaattagcaaattatttgaactaaagtatgatttatcaaaagttaaaaaattcttcaaggataataataatcaatgggatggaaaggatgtgtccagagtagaaatttattattttaatagcaatctagctgcatcaagaacaacattgaatgatacatttacagaaacgtatatcaaagaatgtgtggctgattctgcaattcaaaaaatattattgaatcatcttaaattgtatgagaatagaaaggatgaaaaaggaaaacttattgctcccgaatcactagctttctgccaagagggcattgaagatatgaataaaaatataaagctattgaatgatgggaaagatcataaacctatttttaaagtgaggacttatgagacacttggaaataaattttctatcggcaatactgcaaacaaatccaagaaatttgtagaggcgcagaaaggtactaacttgttttttggaatttatcaagatacaaatggaaagcgtatttttgaaacgataccgctaaatattgtagtggatcgaactaggaaaaacctgaaaccagttcctgaaaagaatattgaaggggatgaattgattatgagtttatctcctaatgatttagtaagtcttgtaggtgaaaatatagacaaaaatttggatgcaccaggtagaaaatttatagattattataaattagtaagtttttctgggaagcaatgtttttttattcaagctaatatagcttcttcaattattgataaagcagaattttctgcattaaataaaatggagaaaagtattcatggtattatgataaaagaaaaatgcattaaactcaatgtagaccgcctcggaaatatctctccaatacattcacaacatgatattccaaacaataacccggaaaaatttgaaatcgaaagcaatcatgccaaagagcctgattctgcatatggacaaagtggtaaaatttctttctttaaagaccatgaagatagagcaggaagtgaagccaagtataatgcatcattaagtatggaagaatgcctgagtatgacacttggattgatgaaacaagtctttggggagagactgatagggaaaaattttccaggaaaattaatgattaaaaaactgtaaacatgaacctgttttatcctgaacataaaatgattttagaggcacttaatgcgtgtgaaatccgttatttattgattggtggatatgctgtcattgcttatggttatggccgaactactggagatttagatatttggattgatccctctgatgtgaacaaaaaaaatcttctcgtggcattccatggattaggaattatgcaggaagatatagatttattggagaaaatggattttaatgaagctacagtttttagttttggtgaggtgccacaaaaaattgattttttgacgaaaataagtcaagttaattttgcagaagcctatgacaataaaacagtaatagaatttgaagggcttcttttaccattcatacgctatcaagatttgatattaagcaagatagcttccggtcgcaccaaagacaaagcagacatagaagagctgcagcgaattcaagagtacagaaaaaaggattaagaatcaaaaaaaaatggcatagaaattggagaatagtgatttcaactattgattttctatgattaaacgcacattgtattttggcaattctgcttatcttaatgttgaattgaaccaactcgtaattacgaaaaaagacaaatgggatgagtcaaaaaatgaaaaaactaaaatccccattgaagatattggcattgtaatttttgatcatgcacagataacattcacccatcgagtcatcacatcccttgcagagaataatgcagtgatcctttggtgtgacgaaaaacatatgccttcaacagtaaatctcccactctctaagaatgacacctatactgaaaccttgcgatttcaaatcaatgccagtgaaccactgcggaagcaactatggaaacaaaccattgaggctaaaataagcaaccaaagcaaatttttaaaatcagaaggtattccaacccaaaaattagagaaaatgctgtccagaataacaagcggagatcctgaaaattatgaagcccaagcggcagctatatattggcagaagctcttgacgccttatgggactaccagaggcagagaagaatcagagcccaatcatctattaaattatgggtatgcaattctcagatctattatcgctaggaacctggtgggaagcggatgtttaccagcacttggtatccatcattccaacaagtataatgctttctgtcttgcagatgacatcatggagccgtatcgacctatcatagatcaatacatatggcggtatttaaaatcaggtataaatctaagcacagagctgagcatagcggataaaacttatctcttccagatacctgtcattgatatagaaatagatggcaaaaaaagtcctttgatggtaggagcccagcgcactactgccagttttgtagcctgccttaaaggagataaaagaaaaatcctttatccatgcttagcagactaaatcaatataaaatcatgtgggtttttgtacactttgatcttcctacagaaacaaaagaagatagaaaagaatatacactgtttcgaaaatatcttttggaggatggattcaaaatgatgcaatacagtatctattctaggcattgcagtagccgggaaaacgcagccgtccacatccaacgtgttaagcgcaatctaccacaatatggagatgtcattgtattcgaaataacagatgcacaattcggccgtatggagtttttctctggatcaaaactaattaaagggccgccaccaccaccacaaatgacattattttagaaataaaaaaagcccacctattgtgagctctttatttcattagcaacaattcttgaaatcctagcacatgtgataattatttgaaattgaatatattagcccttactctgttgttgcaaatataagaacttcaaagatcgaaagcaaatcacaacttttcttcagtattgatctcatacttaacagttgttgcaaatataagaacttcaaagatcgaaagcaaatcacaactaactatacacaaagaggaacacaagccacgttgttgcaaatataagaacttcaaagatcgaaagcaaatcacaacttaagaactctgcaagcctacccatcattgagttgttgcaaatataagaacttcaaagatcgaaagcaaatcacaacttctgtctaagtgtaacctgacttgatgaggttgttgcaaatataagaacttcaaagatcgaaagcaaatcacaacaggttgtccattcgcttgtttgactgttgcgttgttgcaaatataagaacttcaaagatcgaaagcaaatcacaacccaattatagatggtgaaattccgtttggagttgttgcaaatataagaacttcaaagatcgaaagcaaatcacaaccactataataaaacagcaacttgcaaagagttgttgcaaatataagaacttcaaagatcgaaagcaaatcacaacaaagacgggaaagtaattccagttgattccgttgttgcaaatataagaacttcaaagatcgaaagcaaatcacaactatttattaatgacaggtcaatgggtgtagttgttgcaaatataagaacttcaaagatcgaaagcaaatcacaaccgtacaacgatggacttgcagagcatcattgttgttgcaaatataagaacttcaaagatcgaaagcaaatcacaaccgtaactggattcgtgctcgctactgttaggttgttgcaaatataagaacttcaaagatcgaaagcaaatcacaacaacagtttaaattaatatcatcaaactttggttgttgcaaatataagaacttcaaagatcgaaagcaaatcacaactaggtgaatgttagaaccaaaggaaataaagttgttgcaaatataagaacttcaaagatcgaaagcaaatcacaacttatttactttataatttcaagcgcagtatgttgttgcaaatataagaacttcaaagatcgaaagcaaatcacaactcatattgatttatttaaaaagtgtttcttgttgttgcaaatataagaacttcaaagatcgaaagcaaatcacaacgcggatgccgtagatgatatgaaggagttcgttgttgcaaatataagaacttcaaagatcgaaagcaaatcacaactcatattgatttatttaaaaagtgtttcttgttgttgcaaatataagaacttcaaagatcgaaagcaaatcacaacgaagttaaaccggtgccttgaagatgagaagttgttgcaaatataaaaaattattcatgatacttttctatttttcttgttcga

SEQ ID NO: 1298 - DNA, 17980 bp, synthetic construct
  misc_feature 1..17980: note = Synthetic
  source 1..17980: mol_type = other DNA
gcgggcgaagatcccggggatgccgctatagaagccccgtttattttcaggaaaaacgggcagtattacctgttcgtatccttcgactattgctgcaggggagaagacagtacctataaagtggtcgtgggaaggtccgaaaaaatcacaggtccctatctcgataaggagggaacccccatgacggcagggggcggctctctcgtcatagaaggtaacgatcgctgggcgggggccgggcataacagcatatatacttttgaggataaggactaccttgtctttcatgcctatgacagtacggacgaaggcagtcccaaactccggattatggaagtgcgctgggaagacggctggccggaagtggataaggacaagttataaaaaccggttattgttttttacggaaaacaataaccatacaacgcaaccattttgttcttttttcgtcttatatacagatcaatcaatccaaattatgactaccggaagaataaaaaattttatagggctcatcgggatgtttttattgctatttgcctgtagcaatgatgatgaaggaaaagatatgggagatcatgccagtatatttattgacagtaatatttaccatgaagcggagagcgatgattttcatcttgaagaagcccggataacgggagattcccttgaagtacgcatccgttacggtggcgggtgcggagaagtaaaactccgtttggcggggatggaagaagtcctggattccgatcctccgcgacggaagatccgcctgctgctggaagacaatgatccgtgcgaagcctttgttgcagaaaccttttattttaaactttccgcttttcagacagcaggaagttcccggataggattgctcttatccgactgggacggctccctgctgtatgagtactgaagtatttaaaaaagcttcatcccgtaattacaacacatcttaaaatttcatcacaaatccgccgtagggctgcatgatgaccgaaactttttccgaggggaaaagatcgcttttggtaaaaccttgcgcctctttgtcatccgttatcatatacccgacatcggcatgtataaaagagaggtcgagatcaagttctttttccgaatcttccccgttgataccgcatacataccagtcttctccttttttcctggcgaataccgcgtatttccccggatacccgtcaataaaccgggaggtttcccaatctgtcggcagggctttgagatatccttttacataatccggtacctgcgacatgccttccgcggtctctgccatatgctgcacaccggaaaggaaaagtacgggaagcgccagttcgaagcccttggtggttttccggtctatacccgggatctctgtcagggacatgggagtaaagtccatcgggtcgaagacattccgggtaaaaggcagtatggtacaatgttccggggccaggtcggcatttttctggtcgaaggtaatgaactcaaaaccttttaccgactccatagtaaccaggtgcggataggtccgttgccagcccctggggagggtagtgccgtgacaattgaccatcagccggtattcggcggcatccttgaaaatatcgtggtaataggcgatcatggatcgcccgtcaccgccgaaaaaatccactttaattccggcaatccccatatcgcggagcttccggaattcctcctgccggctttctgcggtcagtagctggttccggggatggtagggcgtggtgttccagcttcccgccgaattgtaccacaggataagttttacacccttttcctgtgcataaccggacagctccgctatactgtcatagccgatggtcgtgtcccagttgacatccaccaggcaatagggccattgcatttccgaagcataatcgatgaattccttttggatatcataagtaatggattcgtctttcagcagggcccagctccaggaggccgccccgggttttataaaagaggtatccgtatcttccggtgcaggtttcgccaggtcagtgccgagcgtagactgagcgatggtctccaggtccccgatggcgataatgcgccagggagtataccacggtaggcttgactccggcaacagtcccccgccgggaaaaacttcttcctcctgcggaaagcttacctggtaagccttttcttcctcgtggtaccgtaagcgggtagcgcagaaactgcgttccggcgcggtttccgataccagcgcccaggtattcccgttccggaaaagcgcggggtacacccagccttcaccgataggggaaggggtgtccgggctgacttccgccaggtaattttcttcataagacggattggagcgttcccacccggtttttgctttggccataggttgcaaccaggcccggctttccgggggaaagcgataggttgttttttcttcggttatctttttcactgttttggtatcttccccgttaaccgggaaataataccggaaagccaccccgtcatcggacaactggaattcgatatccataggtttcccgtctttgttctccaggtgcgcaacatagcgatgcgctttgtaggatatatctttttccttaccgtataccaattgataatgatcttcaacctgcccttcgtccgttacggaacgcagggaaagcccgttataaaaatccccgtcttcccggattacgccgagacgggaagtatccaggacgatggaatcgccataaataaccctgtaaaacggagaatctgccttggataatccgaattccacccggatattttgatcggggccggtaaatacttccaaagtgtctttttgttctgaacaggaaaatatacaaacaaaaagaaaaaatataaagctttttaaaagtggctttttggtagggtaattcatggtttgtttatttagatgtacaatatacatttatttttaaaacagtgcaaaacaaaagataccggaagaagaagataagcgggaataaaccattacggattaaaaacccatagatttccggaagactgaaaaatctgtttgccacagatacacgaataattttaaaataactattaatgtatctgtgtatttgtggctaaaatttataacaaaaaaagccccgaagatagtcgaggcactaaatgttttagctcacaagtttttttattgttttttaacggtgttcgtgaaacattcgagaaaacaatgaaacaaaaaaaggcgagttgccccgccttgaatgttttcacaacggaataatccttattgtgaattgcttttcagaaattgtatggtaaaagtataaaaaaaataaataaaatactgcgggatcccgtaaaacagatcaattttttttaattatttttaaaaacccaataaaagcccccagaatttttccggattttgcaatgtttagagattattaactaactgattttaccgtttagattatgaaaagaattttaggattggatttggggacaaactcgatagggtgggcgctcattgaacaggattttgataataaggaagggagcattcttcgtctgggaagccgtattatacctatgagccaggatgtattaggaaagtttgattccggactatcacattcgcaaactgaggaaagaacaggttacagaggagtaagaagattataccaacgcgataatttgcggcgtgaacgcttacatagagttttgaatattctggggtttttaccaaaacattatgctgattctatagattttataaggaatttaggtcagtttaaaccaggtacagaagaaaaaataaactatcgccaagatgagtcagggaagtacaagtttctttttatgaggtcgtttaatgaaatggtaagcgattttaaacaaaaacagccacagctgttttatgtaaaaccaaatggtcaggagacaaaaataccgtatgactggaccatttactatttacgtaaaaaagctttatctcaaagaatagataaggaagaactggcgtggattattctcaattttaatcaaaaacgtggatattatcagttacgaggggaggaaattgacgaggataaggataaacaatttatacagcttaaagtaaaagaagtattagacacgggggaaaaagttaaaggaaatacattgtataatgtaatttttgaaaatggatgggaatatgacagacaaataaccaaagtagagggttgggagggaagaacaaaagagtttatagtgaccacgaagacacttaccagtggagaagtcaaaagaacatacaaagcagtagattcggagaaagattggatagccatcaaggcaaagaccgaacaggatattgatcaatcggataaaaccattggagaatatatttacgataccttgctccacaccccgacacaaaaaataaggggaaagctggtaaaaactatagaaagaaaattctataaagaggaatttcgtaaaatcatatttagacaaatagaattacagccggaattatttactaaggaactttacgaaaagtgcatagaagagctttacccgagaaatgaagcacatcgcacaagtattcaggataaggggtttgaacatttgtttacagaagacattcttttttaccaacgcccgttaaggagtcaaaaatccaatattgccggttgtcaatttgagttcagagagtataaaaagaagaacgagaaaaccagaaaagaagaaattgtaaaagaacctgttaaagctatttcaaaatcgcatccactttttcaggaatttcgtttatggcaatggctgcaaaacttaagaatttataacaaggaaacgattattgatggaaaggaaaaagatctcactgcggatttgctacaaacagaggatgactggacagatttgtttgattttttaactacaaaacaaacagtagaacaaaaacatatcattgattattttatcaaaaagaaatctttgaataaagcgaataaagataattatcgttggaactatgtttatgatgaagaaaagaaagaatcaaaaaaatacccttgttgtgaaacaagggttcagtttaccagccgattgaataaggttgaaggaattgagaatacaaactactttctttcagaaaaaacgcgggttggcaagaaagaaaatagccctttaattagcagagaagaacaattatggcatattatttattctgtaaaagatttgaatgaatacaaaagcgcacttcaaaaatttgcacaaaagcatagtattaatgaagattcgtttgtagaacattttataaaatttcctccgtttgacagtgattatggaagctattccaaaaaggctattgaaaaactacttccgctgatgcgagtggggaaatattgggatgaagtatttattgatgacaacacaagtaatagaattcaaaagctaattgacggggaatatgatgaaaaaatcaaaaaccgtgttcgtgagaaaacgataagtttaagtgaaagatcagacttcagaggacttcctttatggctagcaagttatgtcgtttatgaccggcattcggaaatcggagaaatccagcaatgggaaatgtcgtacgatatacaaaattatttgtatgaatttaagcaacactcattacgtaatccgatagttgaacagattgtcacagaaactttacgggttgtcaaagatatatgggagtattatgcagaaaaggacaatgtcccctatgaaatggtatatgatgagcgaaaaaagaaaaaagtaagaagttaccataagttcttcgaggagattcacgtagaattaggccgcgaaatgaaaaatccggcagataaacggaagcagatttcgcaaagaatttcggaaaatgaaaataccaattatcgcatcaaggaaattttgcaagagttgatgaacgatcccgaagtacagggagaggtgaggccctattcacccagtcaacaggatttgctaaaattatatgaagaaggcatatatcagaatcctgatgtgaaatatgataaagtaagtgaagatgaagttcaaaaaatcaggaggaacaacaatccgtccaaaaacgacattattcgttataaactttggctggagcagggatatatctcaccctatacaggtaagccgattcagttatcaaaattgtttacccgggaatatgatattgaacatattattccacaatcccgttattttgacaactcattaagcaataaaattatttgtgagagagacgtgaacgacgataaaggtaacaaaacagcgtacgaatatttaaaggaaaaaggtggtgaatctattaatggacatcgcttattcaaattagaagaattcgagtctcacgtttccaaatatttcaaaaataacaaactaaaacttaaaaacctgctaagtgaagatattcccgaaggatttatcaaccgtcagatgaatgacagcagatatattagtaaactgataaaaggtttattgagcaatattgttcgagaacaaaatgaacgggaagcaacttctaaaaaattaattccggtaaccggcacgataacgtccaagctgaaacaagactggggattaaatgataaatggaatgaaattattgctccgagatttaagcggttaaatgtactaaccaagtctgataaattcggattttgggataaagaaatcaatgcgttccggattcaagttccggacgaaatcagcaaaggattcaacaagaaaaggattgaccatcgacatcacgctttagatgcattggttgttgcctgtactacaagaaaccacacacattatttaagtgctttgaatgcagagaacaagaattatggcttaagagataaactgcttataaagaacgaaaaaggcgattataccaagacgtttcaaatgccttgggttgggtttcctgtagaagtcagaaaagcgttggaagaaaccgttgtcagtttcaaacaaaatacaagagtgattaacaagaccattaacaaattttggtcgtatacgggtgaaaacgggaattttaataaagggaaagacggtaaacccaaaaagaaattgagaaaacaaaccaaaggagatagttggtcaattcggaaatcgttgcataaagaaaccgtttcgggattatataatattgacacgccgaaaggaaagattgcaacctctgtcagaactgcgctttcagaaattaaaaatgaaaaacaattggctaaaattacagaccaaagaattcgggaagtgattttacccaatcatttaaagaattatctggatgaaaaacgtaaggcacagtatgatttagcatttagtgaagaaggtatagaagatttgaacaaaaatatcgtacaacttaacgaaggcaaaaatcatcaaccaataagaaaagtcaaacagtttgaaattggaagtaaatttcaggttggagaaacggggaacaatgctaaaaagtacgtagaagctgcaaaaggaaccaatcttttcttcgctgtttattgggataaagaaaaacaaaaacgaaactttgaaacgattcccttaaatgaagtgattgcacatcagaaacaagtagctcatttaccaaaggaggaacgtacacctattcaacctaaaccagaaaaaggagaattcatgtttacgctatctcccaatgatttagtatacgtgcccactgatgaagaaattgaaaatccgagtttagtagattttgagaatttaaataaagagcaaacgaacagagtatataagatggagaaagcatctggtaatgaatgttattttattagacatgatattgctcaattgattaaacagtatgatgcaaaaaccaaattgggtgaattatcgagtcaaaataagcttgagaccacaatggattttgataagataaggattaaagaaatttgttggaaactaaagattgatagattggggaatatttcaaaagctaaaaaatagttataaaattaaagcataattatggaagacttaaaatccacaagcgtatgcctgttctgcaaaaaaacgtgttgttaagggaattgacaatatacaaaacagaagaaggagcacaagtagaggttcaatttgaagtggaaactttttggttgtcccttaatcaaatagctattctttttgaaagggataaatctattatttcaaggcattttaaaaatatttttgactctggtgaattgcagaaagaagtggttgttgcaaaaaatgcaacgaccactcaacacggggcggtcaaaggaaaaacacaaaccaggcaggtcgaatattataacttagatgccattctatccgtaggttatcgcgtgaactccaaacgcggtactcaatttcgccaatgggcaacacaacacttaaaagaacaccttgtaaagggctatacagtaaaccaaaaaaagctggaacaattgcagaaaacagtaatgttcaattgatcgttcaactaattgccaaccgatgataaagcgcactctctttttcggcaatcccgcctatctgagcaccaggaacgaacagttggtagtgaattttccggaggaagaaaagagccctgcaactatccccattgaagatctgggatacatagtcctggaagacccgcagataaccattaccaatggcttattgatgaaactggtacaaaacaagaccgcggtaataacctgtgataaacaacatctgccgtgttcttttttgcagccgctggtgggccatagtgaacaaacggaacgtatgcgtcaccaacttaacgccagtttgcccctgaagaagaacctgtggcagcagacggtcacggcaaagatcagcaaccaggcggcacatttatccggctacgggcataatgttaaaaaactgcgtcggtgggccggggaagtaaaaagcggggatgccgaaaaccacgaagccattgccgcggcgtattattttcaactcctctttgccgatatagatgggttcagccgtaatcagaaaggagtaccacccaataacctgctcaattacggttatgccattttacgtgccgtgacggccagagcattggtaagcagtggtatgttgccttccgtcggtatttttcatcgcaacaagtacaatgctttctgcctggctgatgatattatggaaccttaccggccttttgtggacggcctcgttagggaaatagtggaggaaggggagtacatggaacttaaccgggatataaaaataatgctattgaccattccggcaatggacgtaagcatagatggcaaaaaaagccctttaatggtagccatgagccgtacgaccaatagcttatacgactgtttcgcaggtataagcaggagagtgctttatccggagttctgaaattatcgaaacggttgcttcggtacaccctttgcttcgctcgggcactcagcaacctcagtccggaaaatagagaagtggttgagtgattgccagagacaattgtactgaaacgtcagttgctttggaacgccctttgctttgcttggccacacagcaacctcagttataaaacacggaggcggttgagtgttccggtctccgaccggaatgtaccgaaaccccggcttataagaaacaaaagtgagatcaactcatggagaaggacagattttcacgattaaaccaatatcgttgtatgtgggtacttgtactttttgatcttccgaccgaaaccaagagggacaggcaagtggctacgcggttccgtaaaaacctgctggatgacggtttttccatgtttcagttttccatttatatgcgtttttgccccagcagggaaaacgccgaagtacataccaaacgagtaaagaatgcccttccgaagcagggtaaagtctgtattatgcaaattacggacaagcaattcggaatgatagaactctttcacggacaaaaagaaatggaaccggaaaaaccaagccagcaactggaattattctaaaaatccttcttattttttaatcctggtttagagcataaaaaacaggataccagttttttacaacgggtatcctgtgaatcctaggtaaaagtacaattctgaaagcaattcacaactctccggcttcttctgctctttcatctatcctgtgaatcctaggtaaaagtacaattctgaaagcaattcacaacgcttcttgaccacgacaaatacaaagcgacctgtgaatcctaggtaaaagtacaattctgaaagcaattcacaacagcattgttcgatccggtaattgttatcgccctgtgaatcctaggtaaaagtacaattctgaaagcaattcacaacaccagcgatatcgtctatttgcggcatgaacctgtgaatcctaggtaaaagtacaattctgaaagcaattcacaactacgtttaagttacctttgcgggatggcgacctgtgaatcctaggtaaaagtacaattctgaaagcaattcacaacgattgtaggcgcattgcataattggacttccctgtgaatcctaggtaaaagtacaattctgaaagcaattcacaacagcaatagaatcaattatatccaagcctaacctgtgaatcctaggtaaaagtacaattctgaaagcaattcacaactaaaggacaaaaattcgaagataccccaagcctgtgaatcctaggtaaaagtacaattctgaaagcaattcacaacaagactggtgcaggttaatacaatccatcacctgtgaatcctaggtaaaagtacaattctgaaagcaattcacaaccgcaagcgaactaggtatttgcgccgacgcctgtgaatcctaggtaaaagtacaattctgaaagcaattcacaactctcaaaatcttctttacattttcctgtcacctgtgaatcctaggtaaaagtacaattctgaaagcaattcacaacagagaagagcgtcaaaaactacagccaaacctgtgaatcctaggtaaaagtacaattctgaaagcaattcacaacttacccgtataggtaaatccgaattgatcgcctgtgaatcctaggtaaaagtacaattctgaaagcaattcacaacgaacaagaaagacaattaatcggagaagatcctgtgaatcctaggtaaaagtacaattctgaaagcaattcacaaccctgggaaatgatacaatgtgacttagaaacctgtgaatcctaggtaaaagtacaattctgaaagcaattcacaacaaattcttcgttaatcgctgataatttgttcctgtgaatcctaggtaaaagtacaattctgaaagcaattcacaacttaaacgacaaaccaatttgctttcaattccctgtgaatcctaggtaaaagtacaattctgaaagcaattcacaaccatacggaagctattctgacaatacaacttcctgtgaatcctaggtaaaagtacaattctgaaagcaattcacaacccgcttctccttcaaagttaaccggagggcctgtgaatcctaggtaaaagtacaattctgaaagcaattcacaactggtgaccgttcgtgcggaagaaaggatcgcctgtgaatcctaggtaaaagtacaattctgaaagcaattcacaaccactggaattaattacatgaaccttcaagacctgtgaatcctaggtaaaagtacaattctgaaagcaattcacaaccgatacccctcattccagttttttaagtccctgtgaatcctaggtaaaagtacaattctgaaagcaattcacaaccgtgtcggtgaaattatccgggtcataggacctgtgaatcctaggtaaaagtacaattctgaaagcaattcacaaccagtatcgaccgggacacgcccctgcgcccctgtgaatcctaggtaaaagtacaattctgaaagcaattcacaaccgtaaataattctcaacaaaatattaatttcctgtgaatcctaggtaaaagtacaattctgaaagcaattcacaacggattggtggtagagtatgacgggaccgacctgtgaatcctaggtaaaagtacaattctgaaagcaattcacaacggggttataagctattcggctactaaggctcctgtgaatcctaggtaaaagtacaattctgaaagcaattcacaacacctttcggggtgtttttttacacttaatacctgtgaatcctaggtaaaagtacaattctgaaagcaattcacaactataataaaaagtatcttcttcatgtctatcctgtgaatcctaggtaaaagtacaattctgaaagcaattcacaactagtttcatcagctaaaaaatctctttgtccctgtgaatcctaggtaaatctaaattcgtatcagttgaaacttttcgagacttaacaacgaactcgtttaaacttttctaccaaatcttgcataccataatattctattgcttttttctttaatgggttggtgctccactttgcccactctccggtattaggatcgtagccacatttcaacggtttggaaaaatccatattatctttattaaaatgagtgcgctcggtataagcacgacagtcagtacaaacataacggaactcacaatctttacagacttctatctgatccttggttatgttccaatattttttaaacccgggtttgttaagaacctcttgaagagtagtatcttttatattaccatagctttccggcatagagggacagtttttgatattgccgtccacatcaacagatattttacagttaaggcacgaattccgagttttagaagtaatttctgttctattattaacctgaaaaagttcttccgatattttaccacagctttttttattaatggctgtatcggtaagcaaaaccaacttatcatcacataatacttgcatagcagagtggtttaatataactagtttagaaacatgtggattatcatttatgagataaatataatcttctaccgtaatttctggactatgccttataataagttcaattgactgggatgaaaatttgtttaaataaactataagtgtttttaatttagaataaaggggaatatcaaataccctaatttgtacggactcaacatctggaacgtctctaatttcttttaaataagttattgctttcctgatatcatcaaagtcaacaataaaactttcaacatcaaatggggaataatactcttcagaaatatatcgcttatatatcaaatcatttgattgatatataaaaccattctcaattaaaaaatctaaaatattaattaatattttcctcgatggttcatcaaatgattttaatttatcttcaaaaattatattaatttcgtcaatgaagatttcacaaaactctaatggcaaactaacataaacacctttttcaaaatcaaaaatcgctcccgcgttttttccaacttgtattgaacaacaatcgtacaaattagtgtaaatcatatatttttgtgtttaatttacctaagtaaccactagctactttaacttgtttatatttattattaaaagccgaaaggactatttctttattcaaatgattataagaattaactctattagctttttgttctacaattttagccccatagtaaggtaatggcaattgtccgttaacagttaaatcattaaccagttcctctaatgtttttttgtccattgattatcaatatcaattattttttctacaataaacttttcaaaattaagatttgctcttttggagtatcccccaatttgccctactggatttacttctaaaaaaaaatactcattggtcatatcttttaaaagatcaatgcatcctatattaaggtttagggcatccattaatcctttcaatctactttttataaataagggtaagtcacttttaaccagacgtaagttctcatttttatcattttgaactcttgaatcgattgaagtatgttgattttcctgagataaaagttcaactgtaaagaaattgcccatgaaatagagcacccgatattctgattttttagtaatcagttcttgaaaaaaactcaaggcaaagttttgtgacaactttttaattagctcatcacttactacttttgtataaattggatttacagtatgatgttgttctgaaaatacaggttggaagttgccaatagcttttgttatgatttgagcatattcttttttaaaagttattaaatcacttttattatttgtaactaaatatgccggcacattaatgcctaaatccatggctttttttaagacatttagtttattaacatgggtactgtttctatcaggaatccaataagcattattaataaatggcaaaaaattacgaaattcgtatagttcatctgaaattcttttcttcaaaccggtattcagttttttatctctttcgtatagatcaggaatttcattaatcgttaaaaaacgtctgtttagtacaaccgaaatctctttattaaaattaatcccgtcaattataagttgattctctttcagagaaatgtcataacggccattatgtattccttcaccggataaaataaaataatttgccttgtaatattttaaccaatcaataaaagctgggtgagaataatctccccactctgtagttaaaaccaatatcatattgtgttctcaatttaagaaacctgtggtaaaagttgtttcgcgtattaatgatatttttattatttttaattattagtttccagattatgataattttttagcaatattcaatcacattttttaaatttctttaattttagaggaggtaagccaattactgctcttacagaatctgattgtttacggtactttaaacaaggttttccaaattgggaaccatataataattttctgttaccaaattcgtcttttctaattacatagtatttatctaaaatagtaattaaggtttccattttcagatttcctttatttacttcttccaaaaacacatctaaatattctttattattgactagcatatgaggggtgtgcagaagaacagcaaaaaaggccccttctacacattcataagaaaaattatcttctcccaatagctttttattaggaatcccatttttttttacaaaatctacaatcttaaagaaatttatagaatccaggtgtggggaaaattttaaagctcccgtttccttcctactaatgagcttcatatccctaatcccttggtctgaaccatatattttgcatagctcgaaagctaaactatcttgtttaattttttggatatctctaatagcattttctctatatcctatacaactatgaaataaaaaaagtatagagatggtaaagattaatataaaaattactttaagatatttcatatctatttaaatagaatttaaggcaaaaaatagctgtattaagtgcttaatacagctatttaattcagtgaattattttagtaattaatagttttgataaatttatcgtctttatcaaacttaccatcaccattagtatcttcgtattcattttctgctctaaccccaacttcaatcattaaagtagttgatgtacctcccttaaccgaacacagttcattggcctttaactttaaatttttaaattttgacaactccataatttttgcttttttaatattactcctactctatttaaggtttttcggtttcacctatttgttgcaactttttatttttaatgtatccgatcaaacaagtatatgaaacatttggggagttatgttttttataatgaactcatctaaacttttccgattggttgtaaaatgatttttttatctcatatttcactttttccttactcaaaaggttgaatttcaaaattaaaggttaaaaaaacgtaaataaataggtgtactcctatttatccctcaaaaaggaacaagttttattccctattttatatattagaatttttcaaaaatgggtgacaaaaattaactcataaattttaagggtttataataaatgaagccttttatcgttttccgggaccacggaaaacaggcatggcataaggcctgctaatcaggacatcttgactgtcctcgtttaacttcccgtacgcttactcgtcaaggagtcagaaagcagacctaatgccatatggaacctgtccaggccaagacaagtttccggaacaaatagggcttctaccgcattgtttttagcccttcggtaaaaacgacgttgcagacattcccgatttctaccggaaagcctggacagaacccacttctttcattgtgctgtgcacgcaggaagacaaacaaacaccccttaaaatttaagcgcagtgtgccagttgtttttatattaaattattggattatattatcctggcccctaacggcaggtatttcagctttacagatcaagggatattaagtgaagttgtttgttgacctgtttaaacctttggacttcggcacaaggatttttcttttcatcggccacattcacaccattatataattctcaacatttttttcttttcccggccgttcgttaaaaaccctgctttccgaaatcttaaaattttgccccggtttttttcgcctttcgggtcccattaatttttagaacagtaatgaaaagataaagtcccgtctgcgcgggagaaggaagagcaagagggtaatgcgctcacgcgacattacaatatctatcaattcataaacaactgtgatacagttgtttataaaacaagaaagcaacgatatggttggtattactggaatttttcacggaaaaacgctgccagcccggtaaaatcaggaaaaaaatcacggaaaaatggataaaggatatgaaaaagaacgttttgaaagtctgagcataaaggcttcggtggtcaagaaattccgtaagttttgcaaggccatttccaagtctcaatccatgaccctccttttaatgatcgaattttttgaacataatggcatttctccggaagaatctatagggccaaatatgcaaaccctggaaagccttatcaaacaatgtattcacggagtgatttccattataaaggatatggaaaaacaccagaccaaacccaccgtagccatgttacaggccctttttgaaaatcttcctaccaccaattccaaagaagagaaaaacaggtgtcgggaaaggaaatatgctgaaaaatccttcaaggacagcaattttgaaatggaagaaatcgaggaaaaaatgacctattatagaaacaaatgtgctcgtttggaaggagaactttcggataataaacaacgctttgaaaaaattttgggaaaattaaaacccattcgcagtggttttggaaaaccgtattttaaattggaaatcaggtctgaagaactggatcatataaaaaaccaattaggtctgaatggttaaagtaataacgctgtacctaaaaaatactcatcgtttcaagaaaaatcaccagcgcaaaatagtattagttcggtaagatgtatggggctatttcgcttaaacaaacggtttgcattattaaaataagctatgcaaaacccaggttcagggctgtctttctcacttttccttttcggccaacaaccgatatacttcatccaaaaattctccttcttcaaaaggcataagcttgcttgcgagttccaatgtccggcgaatatcctcaaaagggaattttacaaaaggaggggtataacaatcttcctgtgtaaccaatatacttacattgatcaaagatgctatcgtagaaaacaagtctgtataccctttaaagcttaaaagtggagctctaaacctatcttcataaatcggatgagggcgtaatgttacaagtgtactctttgctaatgttttcagttttttcagcgatttgtccttttttgctttcataatcctaaggtttaaaatagttattccagtccttctcttagttttt

SEQ ID NO: 1299 - DNA, 17972 bp, synthetic construct
  variation 10326..10456: note = n is a, c, g, or t
  variation 9908..10025: note = n is a, c, g, or t
  misc_feature 1..17972: note = Synthetic
  variation 17486..17633: note = n is a, c, g, or t
  source 1..17972: mol_type = other DNA
aactcctgggtaaacgccgtttttctatgcggttatgcacttcgtgaactgcataaagtgtataaaatccgctctcgtaataaaaatcggtatatttatttgtgtatctcgaaaaatagtcgtaactttgcacgctttttcgggtgtgttgtgtccgtgcggatataaaaaccacataaaagcataattattaacgttgaactgggcagtggcttcgcgtcggcaatgcggtgcaagcacgtcagcggtcggctaaatgcgaaacgtaaacgatgtctgtcggttcaacctaaaaacaaacaataactaatggatactttaagttacaagacagtgtcggctaacaaggctaccgttcaaaaggaatgggtggttatcgacgctcaagaccaagtgcttggtcgtatgtgcacgaaagtggctaagttgcttcgtggtaagtacaaaccttcgtacacacctaatgtagattgcggtgacaatgtaatcattatcaatgccgacaaggtgaaactgaccggcaacaagtggaatgaccgcatctatatccgctacacgggcttccccggtggtcagcgtgagatgacgcccgctcagttgcttgagaaaggtgcagatcgtctgattaccaaagtggtaaaaggtatgctccccaaaaatcgtctcggtgcacgccaaatcaccaatctccacgtgtttgcaggtgcagagcacaatatgcaggcacaacaacccaaacaaattgacattaacacgcttaaataatagaagatatggaagttattaatgcattaggtcgtcgtaaatcggcagtcgctcgtgtttacgttagtgaaggtgcaggcaagattacgatcaatggtcgcgacatcgaaacctatttcccttcttctattctccgctacatcgttctccaacccctcaataaacttgaggctgctgagaaatacgacatcaaggtaaatcttgtaggtggcggtttcaaaggtcaggcagaggcgctccgtctcgctattgcccgcgcgttggttaaaatcaatccggaagataagtccgctctcaaggctgaaggctttatgacacgtgacgctcgcgaagtggaacgtaagaaaccgggtcaacccaaagcacgcaagcatttccagttcagcaaacgttaatttgcactgcaactccaaaccacgcagactccttcgggactaccgcgtggttctttcgattacctcaaagccgcgttttgccgcttgctctgccgcttgatgaaagcagagtcgcaggttaatggatcgtacggagaaataaacaataatttattcaaacaaaccaaaacatcaatcaaaatgagaacaaattttgatcaacttctcgaggctggctgccactttggtcacctcaaacgcaaatggaatccggcaatggctccttatatctatatggagcgaaacggtatccacatcatcgacctcaataagactgccgttaaaatcgacgaggctgctgaggctttgaaaaacctcgcaaaacaaggtcgcaaggtgctcttcgtaggtaccaagaaacaggcacaagaggtggttgcacaacatgctaccgaggtaggtatgccgtacatcaccgaacgttgggctggtggtatgcttaccaacttccccactatccgcaaggctgtcaagaaaatgtcttccatcgacaagatgatgaccgacggcactttcgacaacatctccaagcgtgagagacttcagatcactcgtcagcgtgagaaacttgagaagaacctcggctccattgcagaccttacccgcctgccgtccgctatctttgtggttgacgttatgaaagagcatatcgctgtagcagaggctaatcgtctgggtattcctgtatttggtattgtggataccaactcgaaccctaacaatatcgatttcgttatccccgctaacgatgatgctaccaagtctattgacgtgattatggctgctgtctgcgatgctatcaaagagggtatcgaagagcgcaaggtggagaaagccgacgaagaggctgctcaggctcaggctaatacagaggctcctgctcccaaagagcgtcgtcagcgtgttcgcaaagccgcacctgctgctcagaaagcagagaacaccgaagatgcagaggctaaagccgagtaatttacacatttacaaattgttaatttacaaattgaattatggctgttacattagcagatatcaaaaaactgcgtgacattactggcgcaggtatgatggatgtcaagaaagccttggaagaggctaatggcgactttgaagtggcaacagacctgctccgtaagcgtggtcaggctatcgctgcaaagcgtagcgaccgtgtggcaagcgagggctgtgtcctggctaaagcagtagatggcttcggcgctatcgtggctgttaagtgcgaaaccgactttgtggcaaagaacgctgatttcgtggcaatggttaagttgcttcttgatgcggctatcgaccagcgtccggctgacctggctgctctcaaggcactcaagatcggtgatttcaccgccgatgaaatcgttaccgagcgttcaggtgttacgggtgagaagatggaactgagtgattacacattcctctctgctcccaaagtagatgcctacaaccatctgggtaacaaactctcgtcgctcgttgctgtggctaacgcagatgctgaccaggagaccgttcacggtatctctatgcaggtggctgctatggctcctattgcccttgatgctgaccatgtcgcacaagaggtgaaggacaaagagttggctgtggctattgagaaaaccaaacaggacgaggtcaacaaagccgttgagaatgcactccgcaaagcaggtatcaaccctgcacatgctgatagcgaggagcatatcgagtccaacaccgctaagggttggctcaccgctgagcaggctgctgaggcacgtcagatccgtgccaacgttcctgcagaagcagaggctgctatcaatatgaagaaggtggagatgattgctcaaggtcgtctcggtaagttcctcaaagagaacacgctcgtagagcaggcttacattatgagtgataccaaggagttggtaaaggatgtcttgaaaaagaacaacgttcagattatcgatttccgccgtgttaccctcaacgaggagtaatatctgtcggcttatctaatctctaatcggatttataaataaaaactcccgtcaagcgagaaccttggcgggagtttttgtatttgtatgtctgtcaataaaaaagggcgagacactgtccagcaatgtcccaccctgaatgtttacacaacggaataatccttattgtgtatatcactcatatttgttgtgcaaaggtacgccttttgttttgattatgcaaatcatttttatattttttgtgtatatccgccttttttactatctttgcaccgataatgaaccttaaatactctctatactatggcaacacgcaaaatcctcggcttggacctaggcaccaacagcatcggttgggcagtagttaatcaaaatatggacagtcaatccatcgcatcggcaggcagtcgcattatcccgatggatgccgcattgatgggtgattttgaaagcggaaatagtgtctcgcaaactgctaatcgtactgcggcgcgaagcactcgccggttgtttgagcgcagagccttgcgtcgtgagcgtctcaatcgggtgctgtcaatcttaggtctccttcctcctcactatgcacaggaattgaatcgctatggtcaactgaataaaggggtcgaacccaagttggcatggatagttgaaggcactaaaccgacatttttattccaatcatctttcgaggagatgatgcatgattttgccgttgctcaacctcaatgggttgcgaacggaaaaaagataccttatgattggacaatttaccaccttcgtaagaaagcccttacatccccgattacaaaacaggaattagcatggatactcctgcagttcaatcaaaaaagaggctatcatcaggctcgtggagaggaagaagaagcaaaaccgaacgaaaagaaagaattggtaactgccaaagtgttggaagtgcgtgataccggcgaggtctccaaagggcgtacgtggtatgaaattgtgcttgaaacaggagacatctacagacgccaaagtgcttacccgctggattgggttggtaaaaccaaagattttatagttaccaccaaattgaatgaagacggtttggaagccattgacaaagaagggagacccaaacgtagtttcagtgcccctcaggaggatgactgggggctgcgtaaaatcaaaacggagcatgacattgcacaaagtggcaagactgttggcgagtttatttacgattctctccttcaaaatcctgatcagaagattatagggcagttggtgcgtgtagtggatagacaactctacaaggaggaactgcgccgtatcttggacgcgcaaaagcaattcattcccgaactgcaggatcctgacttgtacagacaatgcattgaagccctctatccgcaaaacgaagcctatcgcaatagcattgccaacaaggattttacctatctgcttttgcaagatattattttcttccaacgtccgttgaagagcaaaaagtcgcttatcaacgaatgtccctacgaataccacgtttacaaagccaagaatggagactggaaacggcaatatctcaagtgcatttccaagtctcacccgctctatgaggagttccgtttatggcaattcgtagagaacatgcatatctacaaaacagatgcaaatggcattggcaaatcggattgtacggcagactatatcccagacaaagccgctctggtcaagtggctgcttacacaaaaagaggttacggagaaatcgctcttgtcgaaatttgccggcaagaaagcaaaagacctgtcgtggaactatgtgagcgacaagaaatatcctgctgctcctgttacagcgacacttactgccattatagcagaagcgggtggcactacgaacaatgaggaactacaccacatctggcatatcctctattccgtctctgataaggaacaactgacgcaagcccttatgcattatgcagaaaagcataatctatcccctgtttttgtcgaaaaactaagcaaacagaagccttttgcagccgactatggcgcatatagtgaaaaagccgtccgtcgtttgcttagcctgatgcgttgcggagagtattgggaagagacggacatagacccgcagacgaaacaacgcattgaccatattttgacaggggaagtaaacgagactatcagcgacacggtacgcgagaaactaaaagacatgaatggcatggtcgattttcagggacttcctctatggctggcggaatacgtagtctatgatgtccgcaagaatgacaccaagtgggaaacacccgaggatattgatagatacctgcaatcgttccgcttgcactcactcaacaacccgatcgtggaacaagtggtaatggagactttgcgcacggtgcgtgatatttggaaacaagaggggcatattgatgagatacatatcgagatggggcgcgaactcaagcaaaatgctgagcagcgcaaacagacactttctcgccagtcggataatgaaaaagccaatctgcgtgccagactcttgttgcaagagtttatgaatccggatatgaatatcgagggcatacgtgcctgctcaccaagccaactggagatattccggatatacgaagatggtgtgctgaataatcctgatatagacaaagatgatgatatccaacgtattatcaaagaattgtccgaactgaaacagccctctgcatcagatgtaaaaaagtaccgtctatggttggagcagaagtatatctccccatacacggggcaacccattcccttggctaaactctttacgcctgcctatcagattgagcatgtcatcccgcagtcccgtttctttgatgactcaatgagcaacaaagtcatttgtgaagccgaagttaatgcccgcaaagaccgtatgttggcgcacgagttcatcacaaaatgtggtggtgagaaaattacactatcgggtggcaaagtcgtaacagtcttaaccacacaagcatacgaggacttggtgcgtgatacctacaagtccaatccacgcaagcaggaaaaactgatgttggacgacattcccgaaaagttcatcgcccgccagatgaacgacagccgctatatcagccgtcttatgctcggattgctcagcaatatcgtccgcgaaaaaaatgccaaaggcgagtacgaacccgagtcaacaagcaagaatgtcattgcttgcaatggctctactaccacccgcctgaagaaagactggggtatcaacgatgtttggaaccatatcatcttgccgcgtttcgagcgtctcaatcaaattcaaaacaccaccatcttcactaccacgacagccaacgggcacactatccccaatatgccgctggagttgagtaagaacttcgagaagaaacgtattgaccatcgtcatcacgctatggatgctattgtgattgccttcaccacccgcaatcacgtcaatctcctcagcaatgaggcggctctcgaaaaggacgagaaagcacgttacgacttgcagatgcaactgcgcaaacgggaaacatggacttccccaaatggcaagtcgcacaccaaattcaccgactttatcgcaccatacgagggcttccaacaggacgtgcaaaccacgcttgagaatatcattgtcagtttcaagcagaacttgcgcatcatcaacaagagcaacaaccataccgttcattttgaagatggcaagaaaaagagtgtcaagcagaaaaagggcgacaattgggcgatacgcaaatccctgcacaaggctacggtctttggaaaagtgaacctgcgcttccgcaagacggctccgctcaagtatgccttaacccacctcaacgacattgtggacaaagacttgcgtctcaaactgcgcgagttagttgctcaaggctatgacgagaaacacatcaagaagtacttcgccgagaataaagacgtttgggcagacatcaatccgcaaaagatagaggtgtattattataccaacgacactcctgacaactactatgcaactcgcacagccataggcgattggctggacgaaaagagtatttgggagaaagtaaccgacaccggcatacaaaaaatactgttggcacacctctcgcagtgcaacggcgaccccaaagaggcattctctgcggatggcattgagaaaatgaaccaaaacatcgttgccctcaatggcggagtaccgcacaaacccatctacaaagtgcgtaaatacgagaaagcagacaagttcgctgtcggtgaaattggctctaaatccaagaaattcgtggaaaccgacaagggaaccaacctgttctttgctatctatgcaaccaccaacgctgatggcaaagaggtgcgctcttatgctaccattcctttgaaagccgtcatcgactgccaaaaacggggcaagaaagagtggaaatccttgcttgaccaatgggtgcatgacaataatttagtgcctgccaacgccaccttgaaatatatcatctccccgggagacttggtgtatttgccaaaagaaggcgctgccacgattgataaaacccgtatctataaaatggtgtcaagtacaggcaatcaatgtttttgtgtcccatgcagtatggcttcaccaattatcaacaaaatagagtttagcccattgaataaaatggaacgtgccctcaccggtgagatgattaaggaaacctgcgtccccattcgcgttgaccgtttgggtaacataatctcccttgaaccatgattaagcgcatcctctgtttcaccaaccccgcctatttgagcctccgtctcaaacaactcgtcgtggagcaaccgcaatccgaccaactggagcccgtcagacataccattcccgttgaggatataggggtggtgataatggaaaatcctcaaatcactgttacacaatcccttattgcggctttgttggataataactgtgccattattacctgtgatttgcaccatctccctgcagggttgttgctcccgttggataaccacaacctgcaaagcgagcgtttccgtgagcaaatcaatgcttccgaaccgcttcgcaaacagatgtggcagcaaaccattgtgagtaaaatcacaagccagacttatgtcctcaagcagcaaaatatcgaatatcgcaatatgctgatatgggcaaaatcggttcgctccggggatacggataacctcgaggggcgtgcggcagcctactattggcgcaacgtttttggtgataccgactttgttcgcgggcagtttggcgatatgccgaatggactgctcaactatggctattctattgtgcgggctatgatggcacgtgccttggtggcaacgggcttgctgcccactttgggcattcatcatcatagccgctacgatgcctattgtctggcggacgatattatggagccttatcgggcgtatgtcgatttgcaggtgttggatatgtggaaccgatatggcgatgtggcggagttgtctcccgcgttgaagaaggaactcttatcattatccactgccgatgtgcagatagagggacatcgtagtccgatgatgattgctatgcagactacagccaatagtgtccaacgttgtttctcgggtgaatcccgcaaaatcatctaccccgattggcaggtatagccttgggtgtgcataacgcctgtatacaatttacggcaacgagatttgttactgttgggcattcggaatggtaatgtcagttctgtagatataagtgataatttgtattttttgccgccgtaggcaataagatttaaggcaatttatggctatataggcgcagatttacttggatttcttgcccgcaagggcaaaggagtttaatgtattaacgacggataatgtcccgatttagcgaatataggattatgtgggtgctggtattgttcgatttgccgaccgacaccaagcgggcgcggaaggagtatgccctctttcggaagcaactcttgcaggatggctttacaatgtttcagttttctatctatttgcgccattgtcccagtgcggagaatgccgatgtgcatattcagcgtgtcaaacgcatcttgcccaaatccgggaaagtgggtgtcttgcggatcactgacaaacaatttgctgatatggaaatcttcgattgccgaaaagaaaccactatttctcagcccatccagcaattggaacttttctgattgaaaatgttctattttactttcccttgcctttgtactatccattacgtagaaaggacgtagaaaggagcagtggataagccgtatttataattccctaaatgttctatttcggaatgagatatagacaacgaaatatagacaacgaaatatagatgataaaataaaaaccaaacaataaggaactatatcctatccataaaaagtgccttgtacaaataaaaatgcgactctttcaagtcgcatttttattttctaaaacaatgtgtaagttgttgattttctttgtttcccaaataataggttgttttagattacaaagttacaaaatttgagtgatatacacaactaagttcgattattattggcctgaaatgcagttgttttagattacaaagttacaaaatttgagtgatatacacaaccagttccttgttacgcgggcatatagtggcgttgttttagattacaaagttnnnnnnnnnnnnnnnnnnnnnnnnnnnnnnnnnnnnnnnnnnnnnnnnnnnnnnnnnnnnnnnnnnnnnnnnnnnnnnnnnnnnnnnnnnnnnnnnnnnnnnnnnnnnnnnnnnnnnnaatttgagtgatatacacaaccgaccctaacgatgtgattatagacccgtggttgttttagattacaaagttacaaaatttgagtgatatacacaacattaaacaattcattgattactacttgtcagttgttttagattacaaagttacaaaatttgagtgatatacacaaccacataccacgccaataaattacgacatctgttgttttagattacaaagttacaaaatttgagtgatatacacaacacggaacgtgatcagaagttgaaagatgtcgttgttttagattacaaagttnnnnnnnnnnnnnnnnnnnnnnnnnnnnnnnnnnnnnnnnnnnnnnnnnnnnnnnnnnnnnnnnnnnnnnnnnnnnnnnnnnnnnnnnnnnnnnnnnnnnnnnnnnnnnnnnnnnnnnnnnnnnnnnnnnnatttgagtgatatacacaactaccaaacacccacacaagaagacaactacgttgttttagattacaaagttacaaaatttgagtgatatacacaacaaaccactagtggtcatatatcggcggctggttgttttagattacaaagttacaaaatttgagtgatatacacaactaaaccagttaagccctacggaacgttctgttgttttagattacaaagttacaaaatttgagtgatatacacaacggcctccaataacgacacggaacagaaattgttgttttagattacaaagttacaaaatttgagtgatatacacaacctgaagctgaatactgttcaggaaagccttgttgttttagattacaaagttacaaaatttgagtgatatacacaactcaaatttagtgttcccgtttcgtccttctgttgtttttcggttacttgaagaacgtaaaattcacgctaccataactacgatgagagtcaaaatgcgggtgggtggaaaagtcgtggtctttgccatgctccaagacgaagagaccgtccggacgaagcagttgtttttcaaaaatcaaatcgggcagggtagggagattatccaaggcatacggtggatcggcaaagataaaatcgaactgcagatggcacccattgatgtacttgaatacatcgccgcgtatgacggtcaggttgcgtatccctaattgcttacaagccgagatgataaagttctgctgcgtgtgtgccaattctactgctgtaacctcacgtgccccgcggctgacaaactccagtccgataccgcctgtgccggcaaagaggtcaagcacctcgcagtcctcaaaatcaatacggttgttgagaagattgaacagactctctttggcaaagtcggtggtaggacgtgcggtgatatttttagggggcgccaaccgacgccccctgaatgttccggatattattcgcataagtgaactatgaacaaagaacaaagaacaaagaatgataatgctacgctaataattcatcattcatcattcctaattcataattagaattactcccagttgccggcgttgttgttcggcgcgtccacgctacctactttcaagccggggtagtgttccagtttctgctccttgtctataaggttcaccaactcttgctggttcaagtcgcccaaataggtgctgaacggggcgcgtgcctcaaacagcggaacacggataccctggctggttgtgtaattgttgttcacctcaatctcgaatttcgtcttgttggtgtaggggatatagatgatgtccccgatggtgttttcgtcatattcgcctttgtagagactctgaatcaggttgctctcaatggtatcacggcggaaaccgctcaagccgttctcaataacttctttatcgttagcccatatgtaggcgtagaggtctgtatcgttggcgaaatcctgttttttgagtgcctttttcttggctgtctcaatgattttagcggctttttgctcggtaagacctgcttcgagttgtttgtcggtaaggcttccctctttcatcacctctttctttttagcggtcttaaggaatagaatcagactgtcggcatctgccatatagcgaccgttctggcggttgaactccacctcggcagtacgcaaactaatcaaattcttcaccacagccacctcgcgggcagtacgtgtatcctcaaactgaatcggggtaacaacgctcattacgcagaaataagccattgcgactgctgcgatgctgagcaaagtaatcataattgcttttgttgctttcatcttatctggtataatttttgtatttcttaatctgggtgcgtattcatcgcacaaaaactgccgcaaagttacgcttttttttttatatgtgcaaaaaaaagcgtatttttgccactgaatttcagtagagaggagaacgcattatggaagacagcaataaagtgctatttcaaatactcacggagcgtttggaattgctgcgtcagttggacaaagagggtgataccgaccgccgccgccatgtggcgaaagagactcagatgctccatgcccccttggcacaccgcttgggcttgtaccagatcaagaccgagatggaggacctcgcgctcaagttcaccgactacaagacctataaatacattgcgcacgcgctgaacgccaaaaagtcggagcgtgatgcctatattgcccgctttatcgccccgctggagcagaaactcactgaggcgggctttgctttcactatcaaaggacgccccaaatccatccactctatttatcataagatgcaggcgcagaactgcgatgtggatcggatatacgacctctttgccatacgtattattcttgactcgcctgccgaccgcgagaaacaggactgttggcaggtctattcgctcattaccgatattttccaacccaaccccaagcgtttgcgcgactggctctccgtccccaaggagaacggctatgagagcctgcataccacggtgctcggtcccgacgaccgctgggtggaggtgcagatacgtaccaaacgtatggacgaggtggcggaaaaaggcgtggcggcacactgggcatacaagggcgtgaaaggtaatatactcgccaacaaacagtatgtctatgtctttactcctaccggcgacctgcgccgtctgccagccgaggctacggtgctcgattttgcctacagtatccattccgatgtcggtgaccactgcgtgggcggacgtatccgcaaccagaacgtgtctatcagacagaaattgcagaacggcgaccaaatagaaattctcacctcgcccaaccagaaaccgaatgccgactggctcaatttcgttgcttccaccaaggcgaaaaacaaaatccgccagtcgctcaaagagattgagtacaaggacgccgccgagggaaaagaactgctcgaaaggcgttttcacaactggaaactggaatataccgaggcggacatctcgcgtttggcgaacaaactcggctacaaggcggtcagcgacctctatcagtccattgcgcagggtaaagaagatgtcctgcaactgcgtgacgtgttcctctcgttagatgcatcgtctgcaccgcatcatacggaacctaaacccgagtatgtgcccaaagagcagcagtcgggcttggcgatagaggtggatatgaacgtcaagaatgtggattatcatctctccaagtgctgcaatccgcaaccgggcgacccgattttcggttttatcagcgttacgaaaggaatccgtattcaccgttgcgactgccccaatgcggacaatatccgcgagcggtacccctatcgtatgatccccgcccgctgggcaaagaaataattaacaattaatatgcatagcgtgttcttggttctttgttctttgttcattccatcaggtcttctattatctggttgagaatatgcaagccctgctgggtggcggctatccggttgtcctgcgtcaggcgcagcaggttgcgtcgtatgtgcggagcaaccaatgccggattgtgcaggaaagagtagggaacgccgtccgccgtgcggagtccaagcataatgcgctcgttgtagcggtcggtggctgacaggtgttccgtttcgcgtaccaaggtatgctcttgcacacctttgatataggtgtcaaggtcgtcggggttccaagagcggtcggtaccgttgtacgaatgggcccccgcgcccaaaccgatatagggggtgtcgttccaatagttgctgttatgcagggaacgcctgccggggcgggcaaagttcgatacctcataatgctcaaaccctgcttctttgaggcggtgtgcgatataatcgtacattgcattttccgtatcctcgtctgtttccgccacttcgccccgttccaacatcccgctcagcggtgtaccctcttcaaaagtcaggcaataggtggatatatgctgcacacctaattgtagtgcttcttccacatctttttctacaatactcaattgtgcattgtgcattgtgcattgtgcattatccgtcggcaatccgtatatgatgtctatggagatgttgtcgaatccggcggcttgtgcggtgcgcactgccgtgcgggcttgctctgccgtgtgccgtctgccgatgcggcggagcagggtgtcgtcaaacgattggatgccgatagacaggcggttgatacccatcgtgcgccacgcagcggctttctccggtgttatatcgccggggttgcactccaaggtgatttcccttgcttgtgatacgggcagggcggataacagtcgttgcaagtcgccggtctccaatagactgggtgttccgccgcccaagtaaatggtttctgtgtcgcctgcctgtcgcgcttcatcggcgcgggcgtgccattcctctgtcaaggcatctacgtactctgtccgccggtcgagtcgggtggtcgaaaagaaatcgcaatagatacatctgcttttgcaaaacgggatatgtatgtagagtcctgccataatggttctctttgagatgcaaagatacgcataaattttcatatatccaacgaaaaatagtccccgataatgcaattaacagttgctcccggtgctgttcgacatccccgccgagggcgccaccggcgaacaagtgaagttccttaccacggcggaaataagccaaaaactggtggattatggagcaataaaacgacctatgccgctcaaccgattgggaatgctcttatctgatcacgggttcaaaaaagtggttattggtaccaaatgcctgcgcggatggattgtatatcagcgcattagcgacgaaatcaaaaccgaacagcatttcaatgcccgtatggcaaacgagcagttgagcagatgagcggctgttttcttaatatatatacccgcccgcgcgtacgggtgtatatatacaaaatgaactgctcaaccgctcatccgctcaccggggacgcgggcgccccgcccgcggtatagttctccgttaatccccgttaatcctccgttaatggcattatcggtcttggtgtgtctccgcagcaggcttggcaagcccgcatcccctaccctccgtctccgttggcaagccccccgtctccgcggctgccgtattcggcagccattcaattcccccattaaaaaccgttaaagtcccattaaccaccaatcgttataggatgcgcttaggatgcgcataccatagaccccttttcattatttctaaatgataaaaagtgtaaaatcacaacctctaaaaatataaaaaatgaacccgcttttcatcgaacgcaaccaaaccatcgataatagaaaaatagaatgatataattattgggaatgtttgaccaacaaaagggggattttcgttgtatctttgcagtgtctttcgaaggatagggggagttgagagtttgtagttgagagttgagagaagtttatgagtttagagttgagtgcagtggagagttttttagttgagagtaggacgtgcaaaacttttaactttccacttcccactttccaacttctctaaactttcaactctaaactatcaacttctttcaactctccacttctatcaactatcaactaatcaactaactgatattggcatcgcttctctgcaccgtcgggtagtccgcttttgttgtttgggctccgcaaacaaagggatatttgtgtatatgcaaaaaaagttgtacctttgccggtgaaaatgtaaatcaatgtatatttgcctatgaaggacgggcggtaggaccgcataacatattttttatttgcgttataagccgaacttgattttctgaaacttcgacacttttggaaaattgttatattcaagcacaagcctatggacgctcacgctgtcggcgtgggcttttgtgcgtagcatttgaatataacaggtagtcgaagacctcagaaaatcaaatcacaaacaaaagtttacgctttttttgtgtctgtaggtcgagaatatatccaatgggactaataagtctaataccccgatagggcttgttaaacagtagatgatcattggctttcagacagtaatgcgaaaaggactaaaaaggactttgtgtgcgtggggcaaaaccgctacctttgcacgcagaaaccaaaattataattattaaccataaaaacaaaacagtatgaaaaaactattattttttgttgccgttgcggcaatgtgtatcagttgtgcggctccgaaagccaccacgtattcgtatgccgagtatcgcactatttctccgtcgcaatcggtgttcacagcacccgtgtatgccgatttggaggtgtctcccacccgtatctcgtatgccgagcgtattgagaaagacattacgaagatgactgaagcagaagtggagactatggtatcgcgcgagaaagaaacagtgattgccaatgcggtccgtaccaacaaagccgatgtgctggtagcaccgattatcagcgtacaaaccgatgtgcatcattttgtggtaatcatagtcgagggttatcccgcaacatacaagaatttccgcagtgccaccgaggcggacggctgggtattggagcactcgaagcagcaggcgggaaatgagaaatccgagaaacctgcttcgccgtttgccaaaatgttgaagaaatgaaacgggtaaaaagtcttttgaccatattgctcttgtcttgcgctgcccttgcggtggcgcaaaacagggtggtcaataccggtaccgcgtcccgtacggtcatcaatctgaacgacactacgggtagcggcacgatgagtatatgggagcagttggagcaggagcgcattgcgcaggagaaagccgagcaactgcggcagcagcaggagcaggcggagcgtgaggcggcggagaaagcccgtttggagcgggaagagcaggagcgtatcgctgccgaacagcgtttgcagcaggagaaagccgaacagnnnnnnnnnnnnnnnnnnnnnnnnnnnnnnnnnnnnnnnnnnnnnnnnnnnnnnnnnnnnnnnnnnnnnnnnnnnnnnnnnnnnnnnnnnnnnnnnnnnnnnnnnnnnnnnnnnnnnnnnnnnnnnnnnnnnnnnnnnnnnnnnnnnncagagcagcgtgcgcagcaggaaaaaagccgagcagcaacgcttggccgccgagaaagcgcagcaaaaagaacaggctcggcaagaggcggaacgccggtccgcattgcgccaagcctaccaagacagcgtcaaggctgtaaaaaaggagcgttttgcggagtggaaaaactcgttcccgatgttgcacattctgatggcaaacggagcattcgccctttatcccgagtacgctttcggtctgacctacgggcaggtgcatatcggcggctggtatataaatgcgatgctcaacgccaacattcataccacggggacggatgccgctgctttcgattat

SEQ ID NO: 1300 - DNA, 17945 bp, synthetic construct
  source 1..17945: mol_type = other DNA
  misc_feature 1..17945: note = Synthetic
ctacgagattcacatgggtagtaccgtaccggtggagggagcgtccgcttctccgctaaaccggttggaaagcgggcaatgtgacgggtatatcgtagaccgtacgtgcatggggacttacattcacggcattctcgacaatccggagtttatcgacttcctgctcgaaccgtttgccggtaaattgtcggaagcagcggaaacgttcaactaccggcagtttaaggaagagcagtacgacaaactcgccgaccatgtgcggcagcatgtcaatctgccgcttatttacaagatattgacggacaacaattaaaatcggatagaatatgatcgacggacacggagacgattcctataaatacagccgcccgataacggcaaatttcagttccaacgtgtacagcaaggtgaatctttcccgtttgaaagctcatctttgcgaatgtatcggggagataggcaattaccccgaacccgaaccctatacgttggaagcccgtatagcttcccgctgtcagctgccgtccggagctgtttgcgtaacgaatggcgcaacggaggccatataccttattgcacagactttccggggtacgaatacagctatcctgcaacccactttcagcgaatatgcggatgcctgccgtatgcacggacaccgggtgagttcgctttatcaactgccgaaggagcaggacgggtatcgcctgccggacgatgtgcggatgctgtggctctgtaatcccaacaatcctacgggaacggtggccgataaagaatatatgcgcggattgattgaacataatccgcaggtttgttttattatagatcagtcttatgagttctttacgctgtgtccgcttttctctccggcagaggcggcggagtatccgaatgtactgctgctgcattccatgacgaaaaggtatgcgattcccggtttgcggcttggatatgtaacgggcagctccggtttgctggagcggctgcgcaccaaccgtatgccgtggtcggtcaaccggcttgccattgaagcaggacttttcctgttggagaacgatgtgcccgaaccgttggatgtggctgcttatctgcaggagacggcgcgtctgggcaaggcgctcaaagccgtaggcggattggacgtttgggatacgcagacgcattttatgctggtgcagcttcgcatgggcaaggcgtctgccttgaaagagtatcttgccggggagcatggcatacttattcgggatgcgtccaactttgcggggctggacgagcgctttttccgcatagccacacagacaccggaagagaacgacagattggtggcggcgatagaggaatttatggcgggatagagccggcgtaatagtagaacctgagtgataaacattttatggaagatataatcatatttttaggcattgctttcaatctgaacctgccgctgcttacggcatggctgctcgaccattggttgggcgatcctgtctggctgccgcatcctgtggtggctttcggaaaggccatctcgttctgtgagcatcgtctgaataaggggaatgcccgtttcctgaaaggggctgtcatgtcgttggtactggtggcgggtgtttatctgcttacattgttcctgctgcgttgggcagcgcattattctcccggtctgcttttgacgttgcaggtgctgctcatcttttattgccttgcgggtactacgctggtgcgagaagtctgcggagtgtttaaggctgtagaccgttcgttggaagagggaaggaagcaggtagcccgtattgtggggcgcgacacttccggactttcggcgcaggaagtacgtacggcggcattagagacgttggcagagaacctgagcgacggcgtaatcgctccgctgttctggtatatgttgctgggtgtgccggggatgcttgcctataagatgataaatacactcgactccatgatagggtataggaatgaacgctatcgtcgattcggctgtttcgcggcacgtctggacgatgtagccaactatatccccgcccgtctgacggcttttctcatggtggcggtttccggcagattcccgttgctgctttttgtggggaaatacggcagcaagcatgccagtcccaattccggctatccggaagcggcacttgccggaatattggactgccgcttcggtggtcctcacaactattttggcgaggaagtgtggaaaccttatatcggcgacaatgaacggcctttgacaaccgaagacatgaggattgccgtgcgcatcaaccgcagtgtggaatggataatggtaatcattgttgttgctaccgctacctgcatgtacgttattccctcattcttctgagtgctaaagggtaatcctgacgataccgccatagggtgtcagtgcgctgaatgcctcttcgggtttgatgatgccggcatatatctgtgcgcaaatcaggacgccgccgtgggcaaaaacggccacccgctggtagggctttcctttcagctcatcgagaaagtcgctgacacgccggtactgcatggcgaacgactctccgcccgtagccgctacattcaaatagtcggcataccactcctgtaggcgtgggtcgtcgttgcggtcgaaaggtttcatttcccaactgccgaagtttatttccataatccgtttgtcacgttctgcatccggatagccgcaataggtggcaaggcgtacgcagcgcgtaagcggactggtatatacatggtcgaaaggcaaaaaggctttcaggttctcttgggtaacggccgcttcctgttcgaatgtcggtttcaggggaacatccgtttgtccgtagcatacgccgggcggtacatcgacggatgtgtgacgaataagtataacttccataatttttcagattaaatgtttagtgaaaataaaagggaaccgagacaaagtccgtaaggaaatcgattccaaaacctgcatagacatataccaatacaaggctgcctatgtagaatgccagttcgcaaagcaggaaagccgctccgcagcaatcacccgtatatccttgcaggcggcgtttcataaggcggcacagcagtacgaatgcgagcagcgggaagagggtggcaggccacatctttaccggcaggagtaagacgaaaggaagcaatccgcagatgaaggcggatatcaattcctggcaactcatgcggttgtacacgactttagccttgctgtcttcttcttttcgggcgtatggcaggcagttaatgagttgggatgcgcagaacttgcaccagcagtcgccgcagaagacaaggatacaaaggaaattcagaggcagattgcgcatctgtaacagcaataggaaatagaatatcagtccgataactccgtagcttcctatatgggaatctttcatgatggcaagcgtacgctcgcgggtggtgccgccgccgaacccgtccagaaagtccgctaacccgtcttcgtgcaggcatcccgtaacaagcaggcgggcgatgatagctataatccaggcaagggatacgggcagtatctgtccggtcagccagagagtgcctgccatgatgccgcccgtcagccagccggttagcggccagtagggtactacatgcttgaaacatgcagcgggtacttccctgattttccaaaagggcagtcgggtgaagaagataaatgcagccagtatgttcattatatataggtattgtctataaaattaaaatatgggtactatcaacaaagttatatatgttatctataaaatggttctctgcttagagatgccgtttgaggggcttctcaaaagtatttggtgatggaagcgtgtgcgaagttatccatttcattaatcatgcggacagccgattctataatgggatatgcacagatagctcccgtgccttctccgagtcttaatcctaagtgcagcaacggtttggcatttaatgaatcaagtacaagcttatgcccgtattcatctccgcaatgtccgaatacggcataatgcagcacttcgggatatagcttggcggcggcaaggatacagtttgtcatgatgaagccgtctaccagaataatcattttcagctcggcggcttgcagcatggcgcctactgccataaccatttccaagccgccgaagtagcggatgatgtcacgcggtgaaccgtctcctttgtagttatccaacgactgtttcaagacttcgtacttatggcggatgcctgcatcgtccagtccgcttcccgcaccgacgcattcttttagcggaatgccggtgaagcagctcatccatagggaagaagaggatgtgttgcctattcccatttccccgaaactgagtatgttactgccttcttcgcggcaacggcgcaccacttccgcaccccgttccaggcaaagttccatttccgtttcggtcattgcagcttcgtgcagatagttgcgtgtgcctttgcgcactttcatattgatgatgcctttttcataaggcaggtcataatctactcccgcatccactatctttaatgtaaatccgtgctggcggcacaggaaattgacgccggcacccccatgaaggaaattactgatttgttgccaggtaatttctttgggtgagaggctgacaccttcctctacaataccatgatcggcagcaaagatgatattctgagggtgttgcagaatgggagtcaggctttgctggataagccctacctgaagcgcaaggctttccagcattcccaaagaccctttcggcttggtcaggttattgattttctcaaccagtgccggtcgtatagcttcatccggtcctattatatcaaatgtcttcataattttataccttatacttcattcttatattccgtacttattcacacttaatttttgttgcaatccccgacaccattaaaatcacttcatctgcccgtgaagccacatactggttcatccagccttgcatatccgtaaacttccgttgtatttcgttttcggatgtgccgcccatacctatctcgttggtgacaaatataaatgtggcatcctgtgccgtaaagcagtcgaattcggctttggctgcggcaagggaacggtctgtatcggcatccaggtcgaaaaagaagttggtgcaccacaacgttatgcagtctatcagtacggtgcgtccggacagcgagtggcggctcagctctttatcttcttctatgtttgtccattccggtccgcgcctttcctggtggtgtatcacccgtttgcggaattcttcatcccatatacgtgccgtagcgaggtagacggggttgggcgagaggctgagcgccagcttttccgcataggtacttttgcccgaacgtgctccaccggtaataagtatgattcgtctcattggtttgcttgaagtttttatgaaagcaaatgtacatgatttctgcggcagtggcaagaatagagtatttttttagcggtttcgttttttcttttttaaaagatttcattacctttgccgatgttttcagaataaagggaaaaacatctgcggaagtagctcagttggtagagcatcagcttcccaagctgagggtcgcgggttcgagtcccgttttccgctcctatgagaatcaggtagttatcgcaagatttctatctgatttttgtttttaggcaatggcagttgaactcccagttgaccctatgagctcaactaaaatcttatgaatgtaacgattaatgtagtatgcaacaagtggaaaaccttagcaaatggtgaatacccatctgtataagtgttgcaattttaatggtatgctacaaatcaaagacattatctgtcccaataaagagtatattcagaaaatcttcttgataagcaaacagagttacagcaacgaatcatttgctgttttttttaaatgttacagctaaatcattgtgatttaaaagggaataattacctttgtattatggatggtaaagtaacttattggattgaaatgtcagattatgacttggaaacagcagatgcgatgttgcttacaggtcgttatctctatgtgggcttcatgtgccaccaaacgatagaaaaaatactcaaggcatattgggctaatcgtttggtggaagtacctttaaagatacattcgctatccagattagcagagagaacagaattagataaagaactatcagaagaacagttggatttcattgatacacttgagccacttaatattgaagcccgttatccctcttataaagagagattgatgaaaagtctgactaaggaatattgtataggacttttaagccaaactaaagaattacagtcatggataaagaacaagctatagtcctcgccaagcgatataaagaaatggtagcagaaagattaccattaaaggctctctatctctatggctcgtatagcaaggggaattacagagaggatagcgatatagacattgcagtagtagtagagcatttggatgacaactattttgaagatacccctctattatggaaacttagacgtaagataagtaaccttatagaacccgtcttgcttatagaggatatgagtaatcctctttactgcgacatcgcaagaacgggcattcttatctaaaaaaatgatacagaataagaaaagctgtatttgaagttggttatttttaattcttggcatcatcctaaagttaaatcacagaaagaggatatgtctaaactaaaattcgcttgccatttgtttctttttaggcacgggattacacggaaaacatagattttctttgttctttttccgtgcaatcctttagatttgcactgtgaaatattggggttgaaatattaccttcgtagtgaataaaagttaaccaagggaagcaggtgacctatcgtgaattccgtgcctaaaagaaatctcaagtgtattttttgacaccctcacaagttcgaatctcgcttgccgcttatacagagaatcagatagtcatcacaagatttctatctgatttttgttttataggaatatgtcaagccaccccttcacctttcacaactccctgctcatgcagtatagcgggtgaacccctgtttttgtaaacgactgattatgataactcgcaataggaaaaaaagttctcatttataaagtatgcaaaaaatagtgtttacacaataaacacttttcgcacagaaatttgtacttttgcactccgtttaatgaacccgaatagaaaactttaaaaacgaaatagaatggcagtagaattgaaagaccttaccaaacgtagcgagaattattctcagtggtacaacgagttggtggtgaaggccgatttggcagagcagtcggctgtgcgcggatgtatggtaatcaagccttacggatacgcaatctgggagaagatgcagcgtcagttggacgatatgttcaaggaaacaggacacgtaaacgcttatttccccttacttattccgaaatcattcctcagtcgcgaagcggaacacgtggaaggctttgccaaagagtgtgccgtagtgacgcactatcgtttgaagaacgacccgaatggcggcggcgtagtggtggaccccgctgcaaagctggaagaagaacttatcatccgccctacttcggaaaccatcatttggaatacctataagaactggattaactcttaccgcgacctgcctatcctgtgcaaccaatgggcaaacgtattccgttgggaaatgcgtacccgtctgttcctgcgtaccgcagagttcttgtggcaggaaggccacacggctcacgccactcgcgaagaagccgaagaggaagcagtgcgtatgctgaacgtgtacagcgaatttgccgagaaatacatggcagtgcccgttgtcaaaggtgtgaagtcggccaacgaacgctttgccggcgctctcaacacctataccattgaagcgatgatgcaggatggtaaagctttgcagagtggtacttcacacttcttgggacagaacttcgccaaagctttcgacgtgcagttcgtaaacaaggaaaacaaactggaatacgtatgggccacttcttggggagtatctacccgcttgatgggtgcgcttatcatgacacattccgatgacaacggtctggtgcttccgccgcacttggctccgatacaggtggttatcgtacctatctacaagaatgccgaaatgcttgccaagattgacgagaaggtggcaggcatcgtagccaaactgaaagcgatgggtatttctgtgaagtacgacaatgccgacaacaaacgtccgggcttcaagtttgccgattacgaggtgaaaggtgtacctgtccgtctggttatgggtggccgcgacttggagaacaatacaatggaagtgatgcgccgcgatacgctggagaaagaaacccgctcttgcgacggtatcgaggaatacgtaaaagacctgcttgaggaaatccaggcgaatatttataagaaagcattggattatcgcaacagccgtatcactacggtggacagctatgacgagttcaaggaaaagattgaagaaggcggctttattttggctcattgggacggaacgaccgaaaccgaggagaagattaaggaagagaccaaagccactatccgctgtattccgttcgattctttcgtaccgggcgacaaggagccgggcaaatgtatggttacgggcaagccgtctgcttgccgcgtgatatttgcacgttcctattaataaggatatttttcactttgctggatgaagcttttttcatagtaacctgtgacgaagtttctttccttttgtattcggcagatgttctaaaaaatggaggtgtgctaaaatttagcatgccttctttcttatgcacaaagaaagtgcatcattatgaggtgccccaaaaaagttaaacgttcaaaacagccaaggctatcgaagtggtttatatatacaacaattcattcttcatcaggccggagaaattttccatcatagagttattcagatagtttccttggcgggatatattttgtatgatgccattattcttcagcatgctgataatactatccttgatctgagcgcaataacagggtatggaggctcttgtgtttcttaaatgcctatttaagcatatctgttaccattttcaggttagggctgcgggggagtgtattgttattatctccccattgtatatgtcgcgtattgtttcctatcaaacctttataaaagtgatagtgatgtttcttttgctttgctttcaatctcatctgagacatcagtttctgcatagtcttatgattgatattgtagcttttaatcgcgtaaagacaaacagcttcttctatattcatagcggcctttgctgtcatcatatattgtcttgatacattttcttatatcattataaccatcattatctctcagacgcaacagatggtaataaaatacggagcgagcatctttaccattttgagaatactctcaagagggaatcctttcagtcttagttcttcgacggcccgtgcccaatcgcgtagctgggcataggagcctgctgttcccataggggagtgacgcatacaagacagaaatggctatggctgtcccaatagagtatcaggaatgcttttcctactgcctgataatctgctaatggcaggtagtcgtaagaagcatgcaaatttttgctttatttccgtcggtcagagttacttcgtgcattttgcatcccgctgcgggtttcgtagctaatcgaactaatatttaattaattgttcggtagctattagcagataaagatatagtttttagtaatgtgttggggagaaatttactaagaataaaaaatcccccgttaaggacgagggaacctaatgttttcacaacggaataatccttattgtgatttgcttcattttagtttggcaaaactataaaataaaaatgaaaaaaacaatgcttgtattaataaaaaaaataactttgaatagcgtattaaaaaataatattatgaaaacgatacttggacttgatttagggagtaatagcataggatgggctgtaataaattctgtaatagaaaaacagtccgaacgaatttggataaaaatggcagggagtagaattattccgatggattccgctgtattgggagattttgacaaaggaagttctatatcacagactgctgaaagaactcattttagaggggtacgtcgtttgagggaacgacaattgctacgccgtgaacgattgcatagagttttgaagattcttggcttcttgccggaacattatttaaaagaaatagattttgaaaagcatcccggacagtttttgacaaactgtgaacctaaactgccgtggcttatagatgaacgaggaaaatatacttttttatttcaagcagcatttaatgagatgctagcagattttgcaaaacatcagccttcattagtgtctgatggtaaaaaagtaccttatgactggacaatttactatctccgtaagaaagctttaacagaaatgataagtaaagaagagttggcatggattcttttgaattttaatcagaaacgtggttattatcagcttagaggagaagaagaggaagatgctgcaggaaaatctgttgaattttatgcattgaaagtattgtcggtagaagcgactgatgaaaagaaaggtcgggacatatggtataatgtgcacttggaaaatgggtggatatatcgtagaagcagtaatgttccattggattgggagaatcaggtaaaagagtttatcgtaactactgatttgaatccggacggtactcccaagtttgataaatatggtgaggtgaagcgttctttcagagttcctaaagaggatgattggatgttgataaagaaaagaacagaggcagacatagccaatactcgtaaaacggttggaagttatatttatgatactttgttacagaaaccgcaacaaaaaataatagggaaactggtgaagacagtggaacgaaagctttacaaggaggaactgaatttgattttgcagaaacaatgtgcttttcatgcagagttacgggatagagatttatatatgagatgtattgaagcattatatccgggtaatgagatgcgacggaaaaatatagttaacagggattttatttatctgttaatagatgatattttgttttatcaaagaccattgaaaactaaaaaaacattgatttctaattgtccttatgaagaaaatgaatatgtaaaccgagaaactggcgagatcaaaaaagctcctttaaagtgcatagccaagtcacaccctctttttcaggagttccgtttatggcattttctttcaaatattcgggtatatcaaaaagaaaaaaaagtaaatggaactttacatttagatgtggatgtgacagcggaatttttgagaacagaagatgattatgtagctttatttgattggttgaattctcgaaaggaaatagatcagaaagcttttctgaaatatccaaaatttggattgaaaaaggaaatcgataattatcgttggaattatgttgaggataagttgtatccatgtaatgagacgagatatgcgattctttcccgtttggagaaagtcggcgttagtattgattttttgtcagatgagaaagaaacagtcttgtggcatattttatattctgtaagtgataagcaggaaatagagaaagccttacgaacctttgcagttaagaacggattaaatgaatcttttgtagaagtattcaaaaaatttcctccttttaaatctgaatatggagcatattctgccaaggcaataaagaaattgttgcctttgatgagatgtggaaagtattgggatacatctttgattgatgatgcgacgagagataggatagaaaggataataacaggtgagtatgataggaatatagctgctaaggttagagaaaaggcgataaacttgtcggatatatattgttttaagagacttccgctatggttggcttgctatgttgtatataatcgtcattctgaaaataaagaaattgctaaatgggaaactccggcggatattgatgcttatttggcttctttcaaacaacattcactacgcaatcctattgtagaacaggtgataacagaaacactgagggttgttagggatatttggaaacaggttgggaaaattgatgaaattcatattgaattaggacgtgagatgaagagtcctgcggacaaacgaaaaagaatgactgcacaaattcaagagaatgaaaaagctaatctacgtataaagacattacttgttgaatttatgaatccggaatatgaggttgagaatattcgtccctattcaccaagtcagcaagaaatattgcgaatttatgaggatacggttttgaaaagagaagaaccgattccggaagatatagatgcaatattgaaaaaattcaataatagcaaattaccgacaaaatcagagtttttacgttataaattatggctggagcagaagtatcgttcgccttataccggtgagttgatacctttaggaaaattgttcacgactgcgtatgagatagaacatataattcctcagtctcgctattttgatgattctttttctaacaaagtgatatgtgaatctgctgtgaataaactgaaagataatcaattggggtatgagtttattaagaatcatcatgggcagaaagttgaagtgggttttgggaaaaaggtagaaattctttctgtggatagttacgaacgatttgtaaaagaacaatatgctaaatcaagcgtgaaaatgaagaaattgttgatggatgatattcccgaacaatttattgaacgccaattgaacgatagtcggtatatcagtaaggttgtcaaagggcttttatagaatattgttcgtgaaaagaatgataatgatggatatgaaccagaggctgtttcaagaaatgtgttagtttgtacgggaaacgtgacggacaggttgaaaaaggattggggaatgaatgatgtttggaactgtattgtatatcctcgttttgaacgtttaaacgctttgactggaacacagtgctttggacattgggagaataaagatggaaaaaaagtttttcagacggaattaccccttgaatatcagaaagggtttagcaagaagcgtattgaccataggcatcatgctatggatgcaatagtgatagcttgcgctacgcggaatcatgtgaattatttgagtaatgagtctgcaagccggaataccaatatttcccgttatgatttgcagagattgttgtgtgataagaatagagtagatggtggtggtaattatagatgggttataaagaagccatggaatacttttacgcaagatacaagggaggcattggataaaatagtgattagtttaaagcagaatttacgtataataaataaaacaactaatatttatcaacattttgatataacaggaaatcgtatttataaaaaacaggaaattggtgataattgggctgttcgtaagccaatgcataaggatacagtttttggggcggtgaatttgcgaaaagtaaaaagggtacggttgtctgtagctttggatactcctactatgattgttgataagagagtgaaaggtaaggttcttgaattgttatcatataaatatgataagaagaaaattgaaaaatatttcaaagagaatgttttcttttggaaagatttggacatagctgaagttgcagtctattattttacagaaaatacttctgaacctttggtcgcagtacgtaaatcacttgattcaactttcaatgagaagaaaataaaagaatcagtaacggacactggcatacagaaaattcttttgaatcatttatctgtaaaggggggaaaagcggattgggctttttctgcagaaggaatagaagaaatgaatcgtaatattttacagttgaatgatggaaaaaagcatcagccaatatataaggtgagagtgtatgaatcacgtggaaataaatttagcgttggtgtatcaggtaataaaggaactaaatgggtaggagctgctaaaggtactaatttattttttgctatttatgtaacagaaaatggaaaaaggacgtatgtgactgtccctttagacgtggctatagaacgtgagaaacaagggcttattcctgttcctgatagaaacgataaaggggataaactattgttttggttatctcctaatgatttggtgtatctgccaactgaagaagaacgggagttgagtaggataaatgaaccaatagatagggggaggatttataaaattgtaagttttacaggaaatcgtctgtatggagtcccttgtaatgttgctaatgtaatagttgataaattagaatattcttcattaaataaagtggaattgacagatgctaaagagtcaataaaagaaatatgtattcctataagagttgatagattggggcatataatagaagttaagtatagaataaatgaatagtataaagttatttcaagaaaagaaaatccgttctatgtggaatgaagaagaacaacagtggtacttttcagttgtttatgtagttggtgtgttggctgatatcgtgaattctacggactatttgaagaagatgcgaaaatgggatgaagaattggctacttatctggggacaaattgtccccaagtagaaatgttgacagatacagaaaaaaagaaaaactttggtaacaaatgtataggaaatagaaaattcggaattagttcaggagtgtatgaaagaactgtatgagcagaaaggttatccaaaggattggattgacaaacgtttgagaggacctaccattcatcagaatttgacggatgagtggaaagaaagggagctatggaaaagtgactatgctattcttacgccagaaatatctaaggcaacgttgggattaagcccttcggattaaaatatataaaggactgacaaagaagaattagaacctttgtgactatatgctcgatttagaattgatattcgcgatgcttggcgaacacgtcactacggaaatttctcagaaagaaaaaccatatacatttactattgaaaagtaagttgtacagtgtggtggaaatgttgttgaagtagtgcgtgaacaagctgaaaaagaactaggtagaagtattattttttccgacaatttttgttggattcagataatcatgatgataccttaaaacttccttttgaggaaaacaacgaatgaataactttaaaatctgtatactatgattaagaaaacattttattttggaagtccagtttatctctctttgaaaaatgctcagttagtgattaaattaccagaggtcataaaaaacggtgctttgtccgagggtttcaagcaaatatctgaggtgactaagccgatagaggatattgggatagtggtattggataacaagcagataaccattacttcgggagtgttggaggctttacttgaaaagaattgtgcagttataacttgcgattctaaaagtatgccggttggtttgatgcttcctttgtatggaaatacgacacaaaatgagaggttccgacagcaaattggtgcttctttgccattaatgaaacaactttggcaacaaacggtaaaagctaaaatagaaaatcaggcagcggtattgaataaatgtgttggagaggaaataaagtgtatgaagatatgggctactgatgtgaaaagtggagatccggacaatttggaggctcgtgcagctgcttattattggaaaaaattgtttaagatagaaggttttacaagggatagggaaggtattccacctaataatctgttgaattatgggtatgctattttgcgggcagtcgttgcccgtggtttggttgcaagtggacttttgcccactttgggaatacatcatcacaaccgttataatgcttattgcctggcagatgatataatggagccttatcgcccctatgtggataggttggtatatgatatgattaagggaggagaaataaattgtagagaattggctaaagaacaaaaagtacaactgcttactattcctacgttggatactattatttcgggaaaacgtagtccgttgatggtagctgttgggcaaactacagcttctctgtataaatgtttcagcggtgagttgcgcagaatatcttatcctgagatgtaatggaacggtttagcgaatatcgtgttatgtgggtacttgtactatttgatttgcctaccgaaacaaagaaagataaaaaggcatatgcagattttagaaaaaatctgcaaaaagatggatttacaatgtttcaattttctatatatgttcgtcattgtgcaagtagtgaaaatgcggaggtacatataaaaagagtcaaatcgattttacctgaacatggaaatgttggaataatgtgtattacagacaaacaatttgggagtatagaacttttctatgggaaaaagactatagatgtgaatactcccggacaacagttagaattattctgaaaagaaaatcccgctatatggcgggatttttttgggggaaactacatctttttttaattctaatatttaatataaatctttgtatattaggttactattaataatgagctgtttccaatggttcaaagatactaaaatgaaagcaaatcacaacactcgccaggaagatagacgcagaccttatgctgtttccaatggttcaaagatactaaaatgaaagcaaatcacaacattaatgaattgtaaaaatacaactgtaaagctgtttccaatggttcaaagatactaaaatgaaagcaaatcacaacaagatatattctaagttgtgtagatgttatgctgtttccaatggttcaaagatactaaaatgaaagcaaatcacaacataaattatttttgaatacaaggaaaggtgctgtttccaatggttcaaagatactaaaatgaaagcaaatcacaacaataaatactcttataattaaaaataaaagctgtttccaatggttcaaagatactaaaatgaaagcaaatcacaacttcatttttgaagtgcaattaaaatgaaagctgtttccaatggttcaaagatactaaaatgaaagcaaatcacaacatatttagtaaatttagttgtttcgatgttgctgtttccaatggttcaaagatactaaaatgaaagcaaatcacaactgtagatgactgattaatagaaattttgacgctgtttccaatggttcaaagatactaaaatgaaagcaaatcacaacagtactgattattttatgtaaaatttgaagctgtttccaatggttcaaagatactaaaatgaaagcaaatcacaacgaagctcgcagcatggtcgagcagattaacgctgtttccaatggttcaaagatactaaaatgaaagcaaatcacaaccttgttgcaacagctttttctacactcacagctgtttccaatggttcaaagatactaaaatgaaagcaaatcacaactggtaaactatgttaaacaaagcgtagcgagctgtttccaatggttcaaagatactaaaatgaaagcaaatcacaacgtaaaaaagtagtgttattgtaaatagtaagctgtttccaatggttcaaagatactaaaatgaaagcaaatcacaacacattactaagaaaacaacaatacctcgtagctgtttccaatggttcaaagatactaaaatgaaagcaaatcacaacaaagagttattattataatattttgaaatagctgtttccaatggttcaaagatactaaaatgaaagcaaatcacaacggact

SEQ ID NO: 1301 - DNA, 17935 bp, synthetic construct
  misc_feature 1..17935: note = Synthetic
  source 1..17935: mol_type = other DNA
acggcgaatatcacaatgagtttgatgatgataacggtccacagcgtgcgacctatggtcatgctgcgaaatccatctcgatagaatcgatacaccttatatataatattcttatctgacatgcaggatagtagtatttttagttgccaatgactctgttggagcaattactttgcaaatatatgaaataatctgggaaatctacaaaagctgggctgttttttattcataagctatttgatggacgtccaccgacacggctgtcggatattgccacgactacatgcaacaggtattttgcgacctatatgaaaagagggggaaacaaaaaaaatcggagagcggcacactaaccgatctccgacttgtaagtcttgtcacgtgcgattaccacgtcaccttgtcgctcaggcagaaatcgagcgcatcggtaatggctttgcgatccatgtgctgaccgataaacaccagtttctgcatgcggtcgccatacatcggattccagtcgcgacgcaagtcttcgttcatcgccatcatgtcgcgcaactcgtcttcgggcatggtagcataccattgaccggctccctgaagtcccatctggcggcctgcctgctcaaacacataacagcggtcgggctcatcgacaaaccagcagatgcctttgcagcggataacgcccttgggccactgccgcgcaacaaaattatcgaagtagttgatgtcgaaaggtttgcgggcataatacacaaaactgccaatgccatactcttccacttcgccgccttcatggtcgtggtggtggtgatgatggtggtggtgatgacaggtgtgagcctcatcgtcatcatcatcatcgtcatgatggtggtggtgatgttcttcctcgttgtcatcatcgtcgtcatgatggtgatggtgatgctcttcttcatcgtcatcgtcgtcgtcatcatcttcatggtgatgttctatctcgtcaatccacgcagccgacgtggctacggcatcaaagtcaaaaccgtgggtattcaccagtttatccaaatccacgtcaccatagtcgcaagggataatctctgccttgggttgcagtgcacggatgatttgcttgatcttctccaactcctctgccgacacctcagaagccttgttgagcaggatggtgttgcagaattctatctgctggataaccaggttttcaatgtcttcctcaccaatattctggctggtcagcgcctcaccgctgccaaactcatcgcgcatacgcaatgcatcgaccacggtaacaatgctgtcaaggcgcagtatcgcgtctttcgtatattccggacccaaggtggggatggagcagatggtctgtgcgataggtgcaggctcgcaaataccgctcgcctctatcacgatatagtcgaagcgctgcatggcagcaatgtctttcaactgttccacgagatccatctttagcgtacaacagatgcagccattctgcaaggccacaaggctgtcgtccttctgattgaccacaccgccctgctgaatgaggttggcgtcgatgttcacctcaccaatatcgttgaccacaacagcaaacttgatgcctttcttattggtcaagatgcggttcaacaaggtggtttttccgctgcccagataacccgtgagcagcaatacaggtaattccttcttattcatcgtcgttttgtatttggtttcttcgagacgcaaaattactgaaaatatatggaatatcatgaacaaatagcgttaaatatcagaaaaatgactacctttgcactattcaaactacaaatctacaaacaaaatgaaaagtatattggaacaacgtcctgcactgacacaggaaattgagaagattgcagaagtggcaggatacctctggcaaaacggatgggcagagcgcaacggtggaaatatcaccgtcaatgtcaccgaactcgttgatgatgaaatcagacagatgcctcccatcagcgatgcaatacccattggagtgactctccctgaacttaaaaacacctatttctattgtaaaggtacgggcaagcgcatgcgcgatttagcaagaaagcccatggcaaacggtagcatcatacgcatcctcgacgactgcgcatcgtatgtaatcattgccgacgagcccgtcatgcctaccagcgaactgccaagccacctcaccgtacatgcacagctcattgccacaggcagcaactaccgtgctacggtacacacccaccccatcgaactggtggcaatgagccacaaccgcgagatgctgggcaaggatgtgctcaccaatctgctctggtcgatgataccggaaaccaaggctttctgtccgctcggactgggcattgtgccttacgagttgccgggatctaatacgctcgctcaggccacactccatcagttggaagactatgatgtggtgctttgggagaaacatggtgtctttgccaaaggtatcaacgtgatggatgccttcgaccagattgacgttctctccaagagtgctaagatttatgtcaacgcaagagccatgggattcatgcccgagggtatgagtcaggagcaaatgcaggagatgagtcgtgcattcaatctgccgaaataacaataaaacaaaacacaagtccgcccccattccatcagaaagagggcggattttgtgtattatagactcattgaaaaggtcttctagcattttacttttgtcctttcaggacgttcggtaaaataaccacacacacccacagggtgttaccctgggctaagaaaaccattgggctttcagcccgttgtggttgtgtgattattacccacgacacgttctgcaaccaacgccccgaacggggcaatatttccatagcccagggtaacaccctgggtttttatacctcttttacctatacgccctgtaagggcaacagtaaaatcaagctagtcagagaacacatacttctcatcatattctatgttatatagcttcaaaaattgcttgtattcctcttggaatgttgtcttcttatgatgcgctttctggtttttgatgtatgctaacgttttatcgactacagattgactgaccgataatgctgcatatcccccctgccacgcaaacattgaataatgtggtgataatgatttaatccatctgctactattgcgcttcaatgtttccaagagatttgcaatagaaatctcacgccctaatagacacaatacatgtacatggtcacctgtgccatcaacccaaatatttagacaatttgcatcgttgacgagttgccctatatacgcatgcacccgatcgagatcatcatcaagaatacatgggctagatgtcttgatgtggaagataatatgcaaatagattttgcaaagtgattgtgacatatgatttttacttttgtccttacaggacgtttgttaatttgttaacattcacatccgcagggcgttgccctgggctaaggaaaccattgggctttcagcccgttgtcctttgtttatgcggtcattatatttccatccacagggcgatgccctgggctaaggaaaccattgggttttcagcccgttgtggttgtgtggttatgactcatgcacatattctgcaaacaacgcccgttgcacggtattgcactattcacaaccgtagcatatcacttgcgaatagtagcccggagaatgaccacatcctccaacggacggtcaccatggtcgtgatccacaggagtctgttggatgcgatcaaccacatcaagaccctcaatgacctcgccaaacacagtataaccgccatccagatggggcacaccaccatattttatatagttctgttgcatcactgaatcgggaatgacataagctctgccctcacggcgaagttggtcggcatggtattccatctgccgaggcgagaaattgcgaccccacgtgatgtagaaatcatgcgacgaggaggcaaactcaggattggtatcatctccctcacgcgcggcacagagttgtccgcggcgatgataatgcgctggataacgaatttctgcaggcacacggcgctccacatcatactgcatagtatcaccggcttgcacatgacggacttgcggattgcctgcttgaatcatgaaattacgaatgacacgctgaaacgtgcaaccattataatagcccgttcgcacccgatccaagaaattgtcgcggtgtaagggggtgtcgttgtaaagccgcagaacaatggtacccatggtggtttccatcaccacctcgtgttgcgtagtgtcggcagcggtctgtgccgatagcgtggcggtgccggtcagcatcagcatcatccacatcagtgttttcttcatattcatcttcatatttgttttagaccgccccactgccccatgaccaagggaaggaacggccggttgtttctattcttacatttcttttgcctccgacagactgtcggtcaatggcatttttttgttgatggcaacggcaacggtatgccccatggtccaagctgcctgcaggttgaaaccgcctgtaacggcatctacatcgagcacctcacctgcaaaataaagaccttcatgctgcttacattctaaggtagagaggttgacattggaaagggctacaccaccacaggtcacaaactcttccttaaacctacacttacctgtcatccgatagacatcggcggtcagcgtattcaccaatcgattgatctgtttcttctgaagttctgcccaacgctgttcgccacgtatctgcgatcggtcaaccaacagttgccaaagccggctgttcaaatggggcggatgcacagtagatacctgtttgcgaccatgcgccacactcatctcccctaccatggcctccacttcggggagcgtcatcgctccacaccagttgatgcaaaggtcggtctgataaccacagccgtgcaaatggcgtgctgcacgactcgacagtttcagtacggctgggccgctcatgccccaatgggtgatgagcaacggaccttcgcctcggaatttagtaccgggaagggcggcggtcgcatgttctaccacggttcccgtcaactgggtcagagcgcggtcggcaacacatacgctgaagagcgatggcactggcgccaccatttctaaatccaaaccggcaagcatctgcagaccctgcatcgtcggactgcctcctgtggtcacaaccgccatgtcggcagtaacggttggttgctgaacgttatcggccggtgagaaagtcaaccgatagcactcatcctcatgggcaatagcgctgacacgatgccctaacttcagcgtcacgcccaactggcgcatcagcgacaacagcgtatctactatctccatcgcatactgcgatttgggaaacacacactcatcgatttgcgtcactaagcgcaccccttcgcgctcaaaccatcggcagacatcggcagcagaaaagcctttcagcagtcgcttcatcagtttttcaccacgcggatatactgcggcaaggttttccacttgccgaaacgagttggtcagattacaccgtccacctcctgtcactgccactttggccaacgccttacggccgccttcatagaccgtgacatctgcgtgaggcaacaggcgcttgaccgctatggcgcaaaagcagcccgcagcaccgcctcctatgattgctatcgtttgtttcattatgcgaagatactaaaaaaatggcaaaacagggtcattttcatgctttttccatgatttaccattcgttttcttttattttcaaacaacctattgaaataatccgtaactttgcatcgtgaataataaacatcatttttaaaactaaacacaacaaagactatgacaacaaagtattctggaacacagactgagaagaatctcgaggccgcattcgctggcgagtcgcaagcacgtaataaatatacctatttcgcatcaaaagcaaaaaaggaaggtttcgaacaaattgctgaactctttcaaaaaactgcagacaacgagaaagagcatgctaaaatgtggttcaaagaactcaatggcattggagataccgctcaaaacctggctgcggctgctgaaggagaaaactacgagtggactgatatgtatgagggatttgctaaaaccgcagaagaggaaggcttcgctgacttggcaatgaaattccgcttggtggctgctatcgagaaacgccacgaagagcgttatcgcgcactgcttcacaacatagaaatgaaggaggtatttgccaagagtgaagtgaaagtatgggaatgtcgcaactgcggacacatcgtagttggtgagaaagcgccagaggtttgccccgtatgcgctcaccctcaagcctacttcgaaatccacatcgacaacttctaagcgttgacaacctatcatctatattccatccggcagatattccttttctgccggatggttttggttgataggccatttgattgaaatacaataccagaaaaacagctttttgcatttattatacaaagttctatggttttcttcagaataatgactatctttacaacccaatactaataactaacccaacatgatattcaggaatatgaagaaacactttctattaaccgtcgcttgcctgttggcaggcatgacagcctcggcacaacaatacgaatggaagaatgtacctatcgtcggtggaggattcgtagatgggtttattctacatccgacaaaccctgacgtacgcttctgcagaacagatatgggaggcgcataccgatgggatgcggtcaacaaagagtggatacagatgctcgactgggtgtcgctcgacaattgcaatctgcaaggggtggagagcgtggctatcgaccccaacaacgaccaaaaggtgtatctggcttgtggcacttatacgaacaagacgggaagtattctgaaatcaaacgacggaggcaaatcattcatcgaggtgaaagtgcctattgccatgggaggcaacgagaacggacgcggcaacggcgaacggatgatggttgatccgatcaatccacataatatctacttcggaacacggctcaacggactctggaggtcggttgacgaaggaatgacatggaagcgtgtggactcttttcctgatgtcacagaacagacggatttctccaatccccaaaaccgcatgaacagaggcagcggcatcattgccgtggtattcgacaataaagagaagaaaggcaacgatgcaaagaatatctttgtggctgtttcgctcaaagaccgacagagcatttttgtcagccgcgatgctggaaagagctggaaagccgttgacaatcaacccgtcggactgcgccccacccacatggtcatggctgccgatagaaaactgtatatcagttatgccgattcgccaggaccgtcacccatgaccgatggcgcactgtggtcttatgatatcaagaagaacacatggacggacatctctcctttgaaattcgacaagggcaagaaatcgggattcggatatgcggcagtagctgtcgatgcacaccatccgcaacatatcattgtcagcacacacgggctctggaagaaatacggctatggcgacgaggaaatgtttcgcagtaccgatggcggtaaacaatggacaccactcttcaaacatggttacagatacgaccatagcaaagctccttatacgaagatggcaccgctccactggatgttcgacatagagatcgacccctgcaatgcggatcatgcctatttcaccactggtttcggaggttgggaaacgttcaatctctctgccggcgaacgacagggcgacaccatcgtgtggagcattgccactaagggtgttgaggaaactgtacccctcgaactctatgctcctccaacgggcgcaagcatagtaagcggtgtgggagactacggcggatatacgcatttcgacatcaccaaaccagtaccggagggcatgcactacgctccatatttcggcaataccgacggagtaactggcgcatggaacaaacctgacgtcatggtgcgcgtgggtgttatcttcaaccatctgttcgacattccgcctatctcatattccgaagatggcggacgcacatggaaaccatgcgcaaatgctcctgtagaaaaagcagagagcggacacatcgctgtcaatgccgatgcctcggtatggatatggacgccgcgcggtgccctaccctcattcactaccgacaaaggggaatcgtggaccacatgtcaaggtctccccaaaaacatcaaagtcatcgccgacaaagtaaatccacaacgcttctatgctgtcgatgtgatcaacaaaacgctctataccagtatcaacgcaggtagaaccttcactccaaaaccgctcgacatcacattgcgaaacagcgataagagaaaacggggcgatattcgtggcggtcaggatcgcatatacgccatgcccgaccgcgaaggcgacctatggcttgccgcccacgacggactgtatcatctcaacgccgacttacagaccgtgggtgccatgcctcatgtcagcaccatctatgccttcggttttggtaagtcacgcatagaagatggctatcccgccctatatataataggtgtagtagatggcgtctatggtttcttccgttctgacgactctggcaacaactgggtgcgcatcaacgacgacgaccaccagtacggtcttgtcctccacatttgcggagacatgcaagaatacggccgcgtctatgtgggtacacacggaagaggactcgtatgcggttctctccgccaataacacacggaaaatgtcgcacacggatcacacggaaatcacagaaagattatagttaaagattttgttcgagattctagttaagatttacaccataggttatttttgtcatgactcagcatagtgaaagcgagctctcactctgtcttcgctactccaaaaattcgagcatctccgatgcgatccataataaagcccttcccaaaagcgaggaactcgagcgcattttcagtcaggatttttattaaagattatgtttccgtataatttccgtctaaattctgatgattgatttctggccataggccatatttattaaagatttcctccaaagatttcttgccgtaggcaactaaaaaacatccacggatcacacggacgacacggaatcacggaacaagcagccccgggctggaagcccaacggtttccttagcccagggcatcgccctgcgtacacaacaaaacattttacaatcgtcctgtaaggacaaaagtaaaatccgtgcgactaaatcatccgcatgcaacctaaaaaggcttcacctaccatacatccttcatcatccaactaatggtgataaaaacggcaaaagctacaaataataatatatgcataatctatatttaaattgttgataatccaatgtggatttcgtttaaccccattttccttctatatcatagtaaggttttcgcccccaaaattacacatttttcttcaatccacaaactatttccaccttttattccattttcataggtatatttgaggctacaacgaggtttcatggtttttcttttccaaaactgttatactgttatattgtcacgcttgaatcgcaaaaatcgtttctggaaactgttaactgttatttgccacgcttgtgattgataatattgactacggatagctttgggatgatatcgacccatgacattagatgaatacaaaaaaaatccccaccgttaaaggacgatggggacaggacctaatgttttcacaacggaataatccttattgtgatttgctaaaaattcgatgcaaatatacgacttttttcttataaaacaaagttgttcccatttttttttgtatttttgcatcatatattactataaccctactttaaatcatgcgctacaatatgaaagaaaagcatattctcggcctagaccttggaacaaatagtatcggttgggccatcgtgaaagaaactactgacgccaacacaacagacgtgcaaaaaagcatagcagatgctggaagcagaatcattcctatggatgctgcgatgcaaagtgacttcgcaaagggaaatacggtctcacagacccacgatcgaacccaatatagaggagtccgacgattgcgcgaacgtcagctgctgcgacgcgaaagactgcatcgtgtgctgacccttatggggtttctgcccaaacattatgctaacgcattgacgcgctttggcaaattcaagccagaaatggaggttcgtctgccatggaataatgacttagaaggcaatccgcagtttattttcatgaaatcctacgaagaaatgttgcaaagattttggagcgaacaacctgaattgatgcacaacaacatgaaagtgccctatgattggaccatctactatctccgccagaaagcacttcgcgagcccatcactggccaagaattggcatggatactcctcaacttcaaccaaaaacgcggatattatcaaactcgcggagaagatgcagagacggacaagactaaagaagagaaatactatgcgcttgaggtgattgatgtcgtagatactggagaaaagcgaggaaaagacacttggtacaacgtgtttctggagaatggcatgatctatcgccgtacggcttccgaaaagccagattggattggtaaagtaaaagagtttatagtgaccacccctcttgacgaaaatggaatgcctaagaaagataaagagggggagatcaaacgaagttttcgtatgcctaattctgaagactggggacttcaaaaaataaaaacagaaaacgatattcaccagtctggattgaccattggcgaatacatattcagagccttactacagaatccgaaacagaaaattattggtggattagtgcgtgtcgtagagcgcgatatgtataaagacgagttgcgccaaatattagaaaaacaaaaggaattcattcctcaattaagagacgctcaactatatgccgattgcatcgccgaactctatcaacacaacgaagcctatcgcctttctattgccaatagagatttcacatacctcttgctcaacgacatcattttctatcaacgccccttaaagagcaagaaatctatgatcgacgagtgtccatatgaatatcatgaatataaagacgaaaatggcgaaacaaagaaaagacacatcaagtgcatttcaaagtctcatccgctctatcaggagtttcgtctatggcagtttgtcaataatctaaaaatctacacttctggaaaagatgcagaaggacgcgagatagacgatattgacgtaacgtctgatttccttcccgacgaagagtcacgcgcaaatctatttgactttctcaacgatatcacaaatatcaagcaagacgaacttctcacaaaatatttcaaaataaaaaagccaaaaggaaaaggggcaaagttgccataccattggaactatgtgcaagaccgacagtatccatgcaacaccacacgaggcgaaatcgtttcacgtctgagcaaagcacacatcgaaacgtccttcttaaacgacaaaagagcagagctacatctttggcatattctatatagcgtcagtgaccgcatagaattgcgccgtgcgctctcctcctatgccacacaatatgctcttgacaaggatttcgtagaggccatggctaaatttccgccattcgattccgaatatggcgcatattctgctaaagccataaagcgactattgccgctcatgcgcatggggcaccattggcacttggaagatatcgacccacagaccgttgagcgcataaatcatattatcgacggagaagtggacgaaaccatcagcgagcgagtacgcgagaaagccgctgacctcacggagattgggcaatatcgtggtcaaccactatggatggcttgctatgtggtatatggccgccatagcgaatcaaccgacagcgcccattggcgcacgcctgcagacatagatgcctatctttctgctttccgccaacactcattgcgcaaccccgtagtggagcaagtcgtcactgaaaccctacgcaccgtgcgcgacatctgggagaagcatcaccatatcgatgaaatacacatcgaaatgggacgcgaactcaaaagtcctgccgacaaacgtcgaaaagatacggagcgcatgctcaacaacgaaaatgccaacctacgcatcaaagcactccttacagaatttctcaaccctgagttgggcattgaaaacgtgcgtccatattctcctattcagcaggagatactgcgcatctatgaagatactgtcctcaatagcgtggatgaattagacaatgatatcagcaatattctcaaaaagtttgccgatgccaaaaatcgtccaagcaccaatgaagtgaaacgctacaagctgtggcttgagcaacactatgtctctccctatacaggtcagcccatacccttggctcgtctgttcacccctgactatgaaatagaacacgtcatccctcaatcgagatattttgacgattcgatgaccaataaggttatctgcgagagcgaagtcaacaagctcaaagacaatgcgcttggttttgagtttatcaagcagcatcacggagaaaccatacaactcagcggtggccgacatgctgtcagaatactggaagtggatagctattgcgaactcatagaacgaatctatcacaacaatcgcactaaaaagcgcaaactattgatggacgacatcccggctgaattcatcgaacgacaactcaatgatagtcgatatatcagcaaactggtcaagtcattactatccaacatcgtgcgcgaagaggatgagcaagaagccatctccaaaaacgtgattgtatgcacgggtagcgttaccgatagactgaaaaaagattggggaataaacgacgtttggaatcacatcatcattccacgcttcctccgcatgaacgaattgaccgattcacaaaatttcacctcgaatagtgccaatggacacctcatcccggccatgcccctcgaactgcaaaagggattcaacaagaagcgcatcgaccatcgtcatcatgccatggatgccatcgtgattgcatgcaccacacgcgaccatgtcaatctgctgagtaatgaggctgcttctcccaaatcaaacaccaatcgctaccaactatcccgcaaactgcgccgctatgaggacatcgttgtcaatcgcagcgatggaccaaagcgcatctccgtggccaaagagtttatgctcccatggattggatttcaaaccgatgtggagcgtgcgttgcgcaacatcattgtcacctttaagcaaaacctgcgcgtcatcaacaagacgagcagccattccctgcgcatcgttgatggcaaaaagaaacttgtggcacaaacatctggcgacagctgggccattcgcaaatcgatgcacaaagaaaccgtgcatggcgaaatcaacctgcgacgcatcaaaacaagtagtctgaaggatgccatgcaaaatccacaacgcatcgtcaatagcgatcttcgcgcaaagctcaaagagctcatcatgcatggctatgatgaaaagatgatcaagaaatacttcgatacctatagagactcttggcaagacgtcaacttaaagaaaatcgagttatggtatttcaccaaagaaacagccgaccgattctttgccacacgcaagagcatcgacacctcattcaccgctgacgctatcaaaaacaaaattgccgatacagccattcaaaaaataatgttgcgccacttagagcgatacaacaacaaagcggatcttgctttctcgcccgatggcatcgatgagatgaatcgcaacatcacggaactcaacgatggacactttcatcagcccatatataaggtgcgcacctatgaaaaggcggataagtttgctgttggacatactggcaataaaaagagcaaattcgttgaagcggcaaagggcaccaacctattcttctctatacacgaagacgatatcatcgacaaaacgactggcgatatcatcaagaagcgcagctttaaaaccattcccctcaatgttgccatagaaaagatgaaaagcggactacccattgacgaagaagccacattcatactctctcccaacgacctcgtctatctgccaacagaagcagaacgcaaatcaggcaagattactatgcctattgacaaggaaagagtgtataagatggtttcatctaacaaattccaagcattttttataaacgaaagagttgcatctgcgatacaagacaaatttgaattttcgcctctcaacaagatggagcgcgccatcacaggcgaaatgattaaagagacttgcatcccactaaaagtggatcgattgggtaatatcattaaaataggagtatagcgtatgatcaagaagaccttgtattttggcaatcctgcctacttatcacttcgcatggagcagatggtcatcaaacttcccgaagtagaaaaaaaccatcaagtggccgatgtcattcgaaacgaagccattgtcactcgacccattgaagacattggattagtcgttctcgacaacaagcagattaccatcacgcaaggtcttcttgaagccctccttgaaaacaattgcgccatagtcacatgtgatagccagcgcatgccggtgggactgatgctccctctttgtggcaacaccatacaaagcgaacgctttcaagaccaaatatcggcatcacaacccctgcgcaaacagctatggcaacaaaccatcaaagcaaagattgacaatcaagcgcgcgtgctctctctttgctcacaagccgaagtgagatgcatgagcaaatggagcaacgatgtgaaaagtggagatgccgacaaccaagaggcacgtgccgctgcatactattggaaaaacttcttttccaatatatcgggacttgaagatttcacgagagggcacgatggcatgccaccaaacaacctcctcaactatggctatgccatactgcgtgccattgtggcacgtgcactagtcagcagcggcatgcttcccacctttggcattcatcaccacaatcgatacaatgcctactgtctcgccgacgacatcatggagccctatcgtccctatgttgacgaacttgtctatagcatcgttagccaacatggcgtcaaccatcttcaactcaccaaaaagattaaatcacaactgctcaccatccccactctcgatgtagtcatcatgggcaaacgcagcccattgatggttggcgtcacccagacaactgcctctctctacaaatgcttcagcggcgaactgcgccacattgcctatcccgagcgataagttcccccaaatgttattcatattttttcaatgatggaccgatttagcgaatatagaattatgtgggtattagttttttttgatctacctactgaaactgcaaaagacaaacgtgcatacacgctttttcgaaaacatttacttttagatggcttttccatgtttcagttgtccatttacgcgcgtcactgcgccacagttgccaatgccgaggtacacgtcaagcgcgtaaaaaactatatgcctgagcaaggtcacgtagccgtcatgtgcatcacggacaaacagtttgccaatatcatagtctatcacggaactaaaatggcgaagcccaaatctactccactgcaattagaattattttagatttttaactttcattcaccacccacttttccccatttgttgcttcaacttgccttttagttcctccccacatgaagacattacaataaaagaaatgccctccatgtcgttatgttcgctctaaaaagcactcatatttttatttctaatcacaaacgtaaacaactggacataagcaaattactcatatccagttgttattgcacctacaaaggtactgaatttctagcaaatcacaaccgccatagcgattacaggagccaaagcagcgttgttattgcacctacaaaggtactgaatttctagcaaatcacaacgctgtttcacggtcagcagatgcaatgtgcgttgttattgcacctacaaaggtactgaatttctagcaaatcacaacttatacactcgcgtaccgtatgggcgttcggttgttattgcacctacaaaggtactgaatttctagcaaatcacaactgatttatttgtttattgtttcgtttatgggttgttattgcacctacaaaggtactgaatttctagcaaatcacaacaaagacggaaacgtatgtgtgtggaagtctgttgttattgcacctacaaaggtactgaatttctagcaaatcacaacgtattggagtattgagcaaacgacggccagttgttattgcacctacaaaggtactgaatttctagcaaatcacaactgtcgtcgaggtcgatgtcgatggcgagccgttgttattgcacctacaaaggtactgaatttctagcaaatcacaactaaggagcgtatgtcttccaaagtcggaagttgttattgcacctacaaaggtactgaatttctagcaaatcacaacatttcgcaggtttcaagccacgttaaatcggttgttattgcacctacaaaggtactgaatttctagcaaatcacaacactagccgtattcgtaataatgtatcttctgttgttattgcacctacaaaggtactgaatttctagcaaatcacaacggaaaattaagtttgcctattaagtaataagttgttattgcacctacaaaggtactgaatttctagcaaatcacaacctgtcaggcgcagcaatgtgcattacgctcgttgttattgcacctacaaaggtactgaatttctagcaaatcacaacacgcatgagggtttcaaactcggtgttctgttgttattgcacctacaaaggtactgaatttctagcaaatcacaactgggtggatagtactaaaccgtatcaacttgttgttattgcacctacaaaggtactgaatttctagcaaatcacaactgctgcaaaggtatgaaaaaaatctaatacgttgttattgcacctacaaaggtactgaatttctagcaaatcacaacaggtaggatattggagccttcgtgcggcgagttgttattgcacctacaaaggtactgaatttctagcaaatcacaaccctcttcctcttcatcgctgaaccactgagttgttattgcacctacaaaggtactgaatttctagcaaatcacaacaatagagttgagtattactacgaaacgtgtgttgttattgcacctacaaaggtactgaatttctagcaaatcacaacatgtcgatgctgctactggtcgtcctatgggttgttattgcacctacaaaggtactgaatttctagcaaatcacaacacatgcaaaaaactcccgtactaccttgtgttgttattgcacctacaaaggtactgaatttctagcaaatcacaacccgttgtctcgttcttttttccgtagtcctgttgttattgcacctacaaaggtactgaatttctagcaaatcacaaccaaatgtccaaccgtctcctttgcagaatggttgttattgcacctacaaaggtactgaatttctagcaaatcacaacaacaccttgaagaccttgagcagtagaaggttgttattgcacctacaaaggtactgaatttctagcaaatcacaacctaacacttaaaccactagtgtccactaaaaacgattaacaatcgttgtaagtgattgatatacgaca

SEQ ID NO: 1302 - DNA, 17897 bp, synthetic construct
  misc_feature 1..17897: note = Synthetic
  source 1..17897: mol_type = other DNA
agcgctgggttaccagcaaaaacaatctccttaccagggcatggtacaaaaatttgtggagatgtaccaaagcggcagaggtgaaaatgatatagtggcaactgatatttcgattgaagagattgaagaaaaaagcgcaaagatcttcccaaatgttgatggcataaaatttcttacgcatacattaggatgcgggggcacccggcaggatgcgagggctttgtgcgggttgctcgccggttatataacacacccaaatgttgggggggctacggtgttaagccttggctgtcaaaatgcgcagatgagcattttgcaggaagaaattgcaaagcgcgaccccaatttttcaaaaccaattgtgttgcttgaacaacaacaggtaggtaatgaacaaaagctattacaggaagctataaagcaaacgtttgcgggactggtgcaggctaataaactgcagaggcagcctgcgccattggctaaactatgcataggtttggaatgcggcggctcagatggcttttcaggaatatcagctaacccggctattggctatacgtcagatatattggttgcattgggtggctcggttgtattatcagagtttcctgaactgtgcggagtagagcaagagcttagcgaccggtgcgtagacgaacccactgcacagcgttttatggagctaatgaccacttacaactcaagggcaatggcggttggctcaggattttatgccaacccatcaccgggcaatataaaagatggtttaataacagatgcgataaaaagtgcgggagctgcaaaaaaaggtggtacttcgcccgttaccgatgtactggattatcctgaaaaaattactaaacccggcttaactttattatgtacaccgggcagcgatgtagaatcaaccactgcagaggtaggcagcggtgcaacaatagtattgtttactacgggcctgggtacacctacgggcaacccaattgcacccgtattaaagctgagcagtaacaccatgctgtacaaaaaaatgaccgatattattgatattgatacaggcacaatcatagatgggcaggaaaccattgaacaggcaggggaaagaattttagaatacattataagcgttgcaaatggtcagataaaagctaaagccgatgccaataagcatgatgattttattccgtggaaaagaggcatttcattgtagattggggattgtcccaaggacccctttggaggcgatcgcagatttatttttagcgaagagccctgcggaacttgcagttccgcagcaatatgttgtcgcttttagcggctttacgatgttgccgaaggcaacaacatgaacccacgaaactgcaagtttcgtggagcaaaaactaacaagccattatgaaaaaaatgaacctatacatttcagcagttgcaattgccgccattgtaacggcttgtaatcagccagcggacaaacaagaaaaactggcaactgattcatcgttcgccaaagggtcttatggctacgatgccgcgtttattaaacaccatacatccaaaacgcttgaacttactaatggcaatgcaaaagtgttgttatctgctgactatgaaggcagggtaatgacaagcagcgccaatggtgatagcggggtaagctttggctggcttaactataaccttatttcttcgggcaaaaaggtagaacattttaatgcctttggtggcgaggaacgtttttggttaggccccgaaggcggccaatattcactgtattttaaaaagggtgattcatttaatgttgcgcattggcaggtaccagccctggttgacacagagccttatgatgttgccagcgctgattctacgcaggcaacattttcaaaagatgcttctattaccaactattcaggcaaaaatttcactcttaatatcacgcgtaaagttcaactgctcgacaaatcttccctcgagcaaaaattgaaaacaaacatccctgcgggtgttcaatatgttgcgttcgaaacagacaaccagcttaaaaacaccggcgtaaccgcatggacgaaagacagcggccttttatctatctggctgctcggccagtttacaccaacagaagaaacaaaagttattattccgttctcagggcaaaaagatgcgcgtaattttataacagataattattttggaaagataccggctgaaaggctgctggttaaggacagtgtgctatatttcaggtgtgatggaaagtcgaggggtaaacttggcctgtcccctgttgttgcaaaacctattgcgggcagttatgattttaagaaaaatgtgttgaccattttaataccacaagttgataaaaccggtgattatgtaaacagcaaatgggagatacaaaagcagccctacaagggagatgtgataaacagttataatgatggccctatggccgatggcacacagcttgggcctttttatgaaattgaatcttcatcttcagccaaagcattaaagccaggagaagttcaggagtacaaacagactacctgccattttcaaggtgattatgccgcattgagcgcgctggcaaaacagttgctgggagttgatttggatgaggtgaagaaatggtagtttagttaattggtaaaagccagttgcttatttgattggttggccggttatggcgctgtttcagcttcaggccttacagtagactgagaatatcaagccaaacagatgcgcttaggtttcacgattcacgtttcacgacaagaacacattgctatgaaattatataaaactacgattggtattttgctgcaaagcgataaaggagtacacctgttgcatgaggattgggatgtgctgataaacaggaaaaacctttacagctaccttgtgcagcaaacaaagcataacgaacttgttaaccataacacatttaatgaactggtgaagaatgacctgtttgcaccaatcgggtcgcaggaagtgtgggctgcaggtgttacctacctgcgcagccgcgatgcgcgtatggaagaggcaaaagcagcaggtggcggtgatttttacgacagggtatacagtgcacaacgccccgagatattttttaaagcactgccgcaacgcgttgtgggcgatcaccaggaggtaaacatccgccgcgactcaacatgggatgtgcccgaaccggagcttactttgtatatcaactcgtttggtgagatacagggttatactattggcaacgatatgagcagcaggagtattgagggagaaaaccctttgtacctgccgcaggcaaagtcgtatgagcgcagtgctgccttgggcccctgtttgtatgtgccacaaaagcccatatcaaaggacacgaccatcagtattgttataaagcgcggtgacaaggaaatgtttaaagattccatacagcttagcagaatgaaaagagagttaacagaactggctgcatacctgtttcgtgaacttgattttccttcaggctgttatttgatgacgggtacaggcatggtaccgtcaaatgattttacattgcatgtaggcgacgtggttgctatttcgatagagggtattgggacattgacaaacacggttggaaagcgggaacggtaaactggccatctgtgactaaatgatgcgtgatgaaaagcgctaagccagtgtaagaatacggtattgcgtatgttgatattttgatctcttgcttaagagtgcgacgcaagaaagataccatgaaaaccgatcgccggggacacaaattattttcatcaactccaggtataatttatttcaaacacctttaagcttgctgcatgagagaaaaaacaggccgccgctcatttctaaaaaatcttggcataggtggcattaccgctactgttgcaccaaccgaattactgaaaaaaaagaatacaggggttgccgcagaccctaaagatgtattcaacagcgatatacagcctgcaagagcttttaacggcgtgtacaagggccaatatttaaaccgtgtggcttttcctgttggcggtattggtgcgggcatgtactgcctggaaggcactggggccatatcgcatttatcggtacaccacaagcccgatgtttttaatgagcccggtgcttttgcagccattcatgtaaagggcgtgcagtacggctcaaaaattttggaaggccccgtgcccgactggaaaaaattcggcaggcccgatgccgccaatggtgcggcgggcacaatttacgggctgcctcgtttttcatcggcagagtttcagacaagatttccatttgctattataaaccttgctgataaggatataccacttaaagtaacggttaaaggctggagcccttttataccgggcgatgctgataactcaagcttgccatgtggcgcgctggaatacagcttcgccaataacacatccaaacccattgatgccatcttctccttcaactcaaaaaattttatgcagaagggggatcaaaaaggcgctatcaaaaaaattgacaacggttttgtactgtcgtgcgatggcacaaaagaaaggcctgactggctgggtgactttgctgtttttatcgatcagccgggaacgatagttgaccactgctggtttcggggtggctggtttgatccgttgacgataacatgggaaactatacgcaatggcaacactaaaagcgttgacccggttgacgaaggcgctcccggcgcaagcgtttatgttccatttaccgttgcaccaggcggcaaaaaaacgatacgcctaatgactgcctggtatgtgccaattagtgaagtgcgtattggagaagagcccaccgatgctgaccttgcaaatgaccaatgttttacttccgatactcttggggatgatgttaatacaaccaaagaatatgcaggcggcaaatacaaagcatggtattgcaaacgctttaaagatatatatgacgtttcaggttatttcagcaataactacaatgatcttttaaaaaggtcaacattattcagcgacgccttttatgcatctaccctgccacctgaagtgattgaagcagttgccgcaaacctcgctataattaaatcgcccacagtgctgcgccaatatgatggccgtttatggagctgggaaggttgtggtgatggatggggttgctgccacggcagttgcacgcatgtatggaactatgcgcaggccataccacacttgtttccgtcgctggaaagaacattgcggcatactgagttttgcgagagccagaatggtgaaggccatcaaactttcagggcctctatgcctatacgtcctgttaagcatgacttttatgcagcggccgatggccagttaggcggaattatgaaagtgcaccgcgagtggcgcataagcggcgataataaatggctggaaaaaatttacccgcttgtaaaaacaagcatggactacagcatacacacgtgggacccacggcataaaggccttattgaagagccgcaccacaatacatacgatattgaattttgggggcctgatgctttgtgcacgagtttttatttgggcacattaacagcaattacaaaaatgggcgagtttttaaaacaggatgttacactgtacaaagaactttatgcaaaaggcaaagcctttatggaaactcaattattcaatggcgaatacttctttcaaaaaattgaaacaactggccttaacgcaccaagccctgctgagcaggcgaaaaaatcatacggcggctcctactcaaaagaagctgttgacctgctggaaaaagaagggccaaaataccagtacggctccggctgcttatctgatggtgttctgggtgcatggattgccagtatgtgctatttaggcgacccgcttgatgttgcaaaaacaaccagccatcttgttgctgtacataaatacaacttaaaggacaaccttagcgagcacgccaacccacaaaggccgtcttacgcttttggtgatgaaggcggcctgttgttatgcagctggcccaaaggtggcaggctttcacttccatttgtttatagcgacgaggtatggacgggaattgaataccaggttgccagccatttaatgcttatgggcaaagtaaaagaaggcctcgacattgtgcgtacttgccgcaaaagatatgacggcaaggtgcgcaacccttttaacgagtacgaatgcgggcactggtatgcgagggcgctatcaagctacggtttattgcagggccttactggtgtgcaatacgatgcagttgataaggtgctgtacattgacagcaagattggcgactttaccagttttatttccaccgaaacaggttttggtacggtaacgcttgcgggcaataaaacctcagtaaaagtgtacagcggcacaatagaagttaccaaaacagttatgggtagcccaaaagtagaaatgtaaagcacagcctatgcaggttgcagataaaaccatagtatcgctgcggtactgtatgaaaaacagtaagggcgatgtgctggaaaacaggttgcagttaagccctgttgaatacctgcacggcggcggcggcattatgcccgcgcttgaacaaagcctgctgggtttgcagcctggtgaaacaaaacttgttaccataaacaacagcatggattttcaactggatgataccttttattttgatgtggtgattgatgatgttcgcgaagcaacacacgaagaaatactgaggggcaaaccaattaagtctattatgcaggatgactgcggaccggattgtatatgttagttgccagggaactgttgagcgttgaccggtaaaacagtttacagttttgtaatcatttatcataaaatttattcaatgtataaatcgaaactcttcataacttttatagtagcatgcgttgcttttataagtaccaaagctcaaaacaagctgtacgagtttgataacaatgttctgtcatcccactggagcagccctgagaacttaaatggcaaaaaaggcgcaggtggcgctgagaacggtactgccaaaggccatgcatttgatgctattgaagcaggtgccaccagaacattgttaaacgtacagggtactggcattataaacaggatatggattaccattgacgaccgcagccctgaaatgttacgcagcctgataattgaaatgttttgggacggcgaaagcaaacccgcggtatcagtgccgtttggcgatttttttgccaccgcgttaagcaaaacagctacttttcaaaacaatttatttgcaagccccgaaggcagaagctttgtttgctatatatctatgccgtttaaaaaaggcgctaaagtggcggtggttaatgaatcatcaaaaaaattaggtcacattttttacgatgttgattttgaatatttaaaaacatggcagcccggctttatgtattttcatgcctactggcaccgcgacactgcaacaacgcccggcaaagactttgaactattgcccgctgttaacggcaggggcaggtttttaggcgccagtataggtatcaactccaaccccatttacggcgactcatggtggggtgaaggcgaagtaaaaatgtacaccgatggcgacaatactttgcctactattgttggcaccggcaccgaagattacataggcacaggctggggccagggtcagtttgcaaacaattacacaggttgtttaattgcagacagcaaggctaaacaatgggcatattatcgttaccatattgcagaccccatatttttcaccagcggttgtaaagttgcattgcagcaaataggcggcaatggtgttgataaagtaaccgaaatgcaaaaagcgaacctgcctttaatacccgttagtttagataatgcagatggctttcatgcgttttacaaaaaaccggaatccaataatttggtcggtacaaattttaaagacggctgggttaacttttacagaagtgatgatgtatcagccacttcatatttttacttaagcacaccaacatcttctttacctgccttacaaaacctggccgtaagggtgtataatttaaaaactaagtaattactggcgcaggaggaaaaaggaggaaaccaataacacgcaacacgctcatttgtagccatttataataatttcagatctatttttagacctataaggcttccaaaaccttgtaggtcttattcccatttaaactctaagcaacccgcacctggtattgttacccgaaccgagagaacaaggttgacgaaagggcaagattttagccatattgttgatttgaactcgcagcggtaagcccttaataaaacacacgtagcacaccggctaaaaaagataaacgtgtatgattatgcagtatcacgcaacaaaacaaaaagtaaatacatgcgtcgttacaccttgggtggcgctggcatgggcggttctgcggagcgttttggccctcccgcacgtgcgggactgatcttttggttcttttgggtctccgaaggagtcctttagacaagccaaaagaacaacataaatccgtgaaagatttgagatataattactgctcaatcccgcaccgccatgctttgaaaattgcaggtgcagaccttctggtttctaaaacctcataagcctccccccttcacctccatcgcacccttcttggcaaacccttccactcataaacatcagcaggcggcctgctatccgccccattattaccagtgctatccaacgccatcaattcatcacccggcggccgaaacacctgttccgtgcccgccactgccgaaggccctccccgcaccaccatttcactaacaaaactttcctgtcgttcctcaccacgtttttcgctctgtcctgcgcccggctgttcaatccgtttttcgccctgttcttcgctacgttcttcgtcacacccctccccacctgtggatggcttaacggcggcaagggcgcatccgcgctccccacctgtattaggcggctgtgcattaagcggcacttccccgtcatcaattttaagcgtaatgttccaatcctccgcatctcgctggcgtttgccatccatgccatggttcattttcaggtcaaacagcaggccccgcgtgcagccctcgccgtttatcaacgcatccagcttgcggcacatagcctcgtgctttatttgcctaataatggcggaataatttttattcttttcatatttccgcaaatcttcctccgtaacgcccccaaaaaggcaaaaaccttccaggctgtagataatttttttaggcacctccacaagcttccccctgtacagtttagtggaaacatttccgtcgcaatggccccggtaatctgcccacaatgcgcgtaaacccgccggttgtaatttaaaaggcataaagtatagtgtatatacttatatataaaaagcggtgttttgtccgctaaaaacaggatgttttttaaaaatatttttgcaacatgatggcaggggaaaatgcttgccggcgtggtattggggatgggcaggtttggggaaaagaagaaagcggttgacggaatatatgccgtaagcctattgcaaatatgaaaataaatgcgtatgttagtaattgtgttaaataaaaaaagcgacttgcgccgctttaaatgtttacacaacggaataatccttattgtgatttgctttcaaattagatgatgaaggtactttttttctcgaataaccaaaataaatcgaccttaaatattaaaaggcaccacgggatgccttttagataataaaagcaaatcacagcctactctacataaaatatattttttttaatattttatattaagtagtaaagtaaggatagctaacctcggcgcctcagttcaaaaaaggtttggaaactctttcttttttactatccagaagcaaaaataatttatttttgaatgtagagtagataaattaaataaaatgaaagaaaaagataaaattatattaggcttagatttaggaaccaattctattggctgggcaataattaaacataacaacattaataatggaggcgaaatattagctgctggctgtagaattattccaatgccgcaggatgttttaggcaaatttgatagcggtgtatcgctttcccaaaccgctgaacgtacaggttttagaagcaccagaagattgagggaacggcatcttttgcgcagggaaaggttgcaccgtgtgctgaatctccttggttttctgcctgaacattataaaaacgcaatagattttgaaaagcgcctgggtcaatttttacctgaaactgaacctaagcttgcttactacaaaacgccagaaaacccaaaagcaacatttatatttaaaaaatcatttgaagaaatgattgctgattttaaacagcatcagccacaattgcttgcaaatgaaaggaaagtgccttatgattggacaatatattacctgcgaaaaaaagcactctataataaaattgaaaaagaggagattgcgtggcttttgctaaactttaatcaaaaaaggggctattatcaattaaggggggaagatgaggaagaggcggcagataagcttgttgagttctattctttaaaaataacggatgtaacagatagtggagataggaaaaaggatgaaatatggtataatgtgcttttagaaaatggatgggtttacaggcgcacaagcagagcccctttggattggattggcaaaacaaaagaatttatcgtaacaacagaattgaaccccgacggcagtataaaaaaagacaaggaaggtaaggaaagaagatcattcagggcacccgctgaaaatgattggacgctggtgaagaaaaaaacagagcacgatattgataaaagtaaaaaaacagttggagagtacatttatgacatccttttgcaaaaacccgggcaaaagataaaaggcaggcttgtaagaacgattgagagaaagttttataaagaggagctaaaactaatactgcaaaagcaaaaagaatttcatctcgaactgcaagacaacgaattatacagcatttgcctggaagaactatatcagcataacagcgctcatcaagaaagtatagccaataaggattttacccatctttttttagaggacattatttattatcaacgaccgctaaaaagcaaaaaatcgctcataagcaaatgccgctttgaagaacgggtttatattaaagacgataaaaaagaaatcaagcggttaacgtgcattgcaaaatctcatccactataccaggagtttaggttatggaagtttattcaaaaccttcgcataattcaaaaagaaaaacaaataaatggcaaacttcaaacggacgttgatgtaacagttgaatttataaactcaactaaaagttttgttactctgtttgaatggttaaacgaaaaaagagaaataacgcaaaaggattttttaaaataccctttatttaatcttaaaaaaaatgctgacaatttcaggtggaattatgttgaggataaaatatacccttgcaacgaaaccaagtggcttattaaaagccgcttagataaaattagagatattccaccaggttttttaacgcctcaacgtgaagaagcgttatggcatatactatattctgtagaagataaaacagatatcgaaaaggcattgaaaacatttgcatcaaaaaacgatgtgcgcgaaggttttgtagagcattttaaaaaatttccgcgttttgaaaaagattacggtgcatactctgcaaaagcgattaagaaattattgccgcttatgcgtgccggaaaatattggagtgagcatgctattgatccggcaaccaaagaaagggttgaaaaaataattaatgcggaatgtgatgaaaatataaaaaaccgggtgcgggacaaagcaatcagtttaacagaactaagccactttcagggcttgcctgaatggcttgcatgttatgttatttatggtcggcattcagaaaatgccgataccaaaaaatggaaaatcccggggcaaatagaaatgctaccccagcatagtttaagaaatccaatagttgagcaggtgattaacgaaacgcttaaggttgttggcgatatttggaaacattatggctgcagtgaagaaggtttttttgatgagatacatgtagaattgggccgcgaaatgaagaacaccaaagccgatagagaaaagatttcaaagcaggtaacagagaatgaaaacacaaacctgcgtattaaagcattattggtggagatgcttaatgacggagatgttgaaaatgtaaggccttattcaccaatgcagcaagatattttaaaaatatacgaggacggcgtattaaatgcagaagatggcaaaatacctgatgagatattaaaaatttcaaaaatggcactcccaacacaaagcgaaattatacgctacaagctttggctgcaacaaaaataccgttcgccatatacaaacagcattattcctttaaataagctttttactcctgcgtatgaaattgaacatattataccccggacgaggcattttgatgattcatttggcaataaaattatctgtgaagccgcagtaaataaattaaaagacaaccgcactgcttttgaattcatacttagtgaaggggggacgattgtagaaacaggtttgggaaaacaggtaacaattttaaaaaaagatgtatacgaagattttattaaacagaattactcgaagagccgcggcaaaatgaaacggcttttaatggaagatatacctgaagcttttatacaaagacagttaaatgacaacaggtatattagtaaaattgtaaaaaatcttttgagtaagattgtaagggaggaaggcgaagaagaaacaacatcaaagaatgtaattttaggcaatggagttattacagccacattaaagcaggattgggggcttaatgatgtgtggaacgaaattattactccccgttttgaaaggctaaacacattaaccaaaagccagaattttggtgaatgggttaataaagaaggaaaaagagtttttcaaacccaggtacctcttgaattccaaaagggctttattaaaaagcgtattgaccaccgccatcatgccttagacgccattataatagcttgtgcaaccagaagccacataaattatcttaataatgaaagtgcccttggcaaaaaaacaaaagaagaaaaagcaaaaaaacgctatgatttaagagaaaagttatgcgataaaaaatataatggccctgaaaattacaaatgggttttcaaaaagccctggattgattttactgtggatagcaaaggttcgcttaacgaaattgtaataagctttaagcaaaacaaccgcgttattaataaaactattaaccattaccaaaaatggcagaaaggcgttgatagtggcgtagctaaacaagttataaggcaggaaagtggcgaaaattgggcgatacgaaaacctatgcataaagacacagtttcaggccttgtaaaattgaaattaaataaaacaataacaatagccgctgcattagatgagttggaaatgattgctgataaaccttttaaaaaatttatagttgggctaaagcaacaagggcttgataagaaaaaaatcattcaattatttaaagaaaacgataataagtggaatggagtggatatttcaaaagttgaagttttttattgggatttagatagcaacggactgggcaacaatgcagcatcaagggttgcggtaaatgagtcatttaccaaagacatgattagttatatcactgatacagggataaaaaaaataatgttgactcatttagagaactacaatgaaataaaggatggaaaaataatagaacacccggaattagctttttcccctgatggcttagatgccctcaatagaaatatacaagtattaaataatggcaagccacacaagccggtttataaagttcgtacttatgagcctaaaggcaacaaatttaacgtagggcaaacgggcaataaaaaacacaaatatgtagaagctgcgaaaggcacaaatctatttttcgcggtttataaagacagcaacagtaataaaagttacgaaacaatatcattgaatattgtaattgagaggttaaagcaaaaattgacgccagttcctgaaaaaaatatacatgggcatttattgttcatgtacttatcccctaacgaccttgtatatgtaccggaggaaggtgaagaggtagattggaacaacataaactcatcaaaaaagcgaattgcggacaggatatataaaatggtaagttctacttcttatcaatgtttctttataaaacataatgtggctacctcaatagtaaataaagttgaatttttagcaacaaataaaatggaacgttccattgatggagtgatgataaaagaatgctgtattaagctgaatattgacaggcttggcaacatcaaacctgttgcaggcatattgcaataaaagctgaaaaaagcactgaaagatgaagtgattgcgatgcaacaggcgatgccataaaaaaccgaagctggtattattaaaacccgttttatgataaagcgcaccctttgcatagaaagcccctgccaccttaaatgccgtaatgagcagttggtggttagctacgaacatgtaaagggctatgaggatagggccgaaaaaacggtaccaattgaagatatcgggatgcttgtgcttgagcaccagcaaataaccctgagccattacctgcttgataaactgctggccaacaatgccagcgtggttacctgtaacgaaacgcgccaccccagcggtatgatgctgccgctggagggcaacacgctgcaaagcgaaaggtttcgtgcgcaaattgaagcaacagaccctttaaaaaaacaattgtggcagcaaacggtaaaagctaaaataaccaaccaggcggccgtattaaaaaaatgggatattccgcatggctatttaaccaatcttgcgcagcaggtaaaaagcggcgatgctgataattatgaggcgcaggccgccgcttactattgggcaaatctttttccaccggcgtggcagttttttcgcaggcgggatgggccgccgcccaacaacctgcttaactatggctacgctattatacgcgccacggttgcaagggctattaccggcgccgggctgctgccaacgctgggcatttttcaccgcaacaggtataacgcctactgccttgccgatgatattatggagccctaccgcccttttgttgatgtaattgtaaggggcataattgacaacacatcggccgttgacgtgctaacaaaggagtttaaggtgcagttgctaaacctgccaactgccgatgtgctgatggatggggcaaaaagcccgctgatgctggcggcacagcgcacagcggcggccctggcaaagtgctatacgggcgagcagcgcagaatgctttacccgcaaatgccatgaaagcagacagactaaacgcatacagaataatgtgggtgcttgttttttttgacctgccgactgaaaccaaaaaagagcggaagatttacgccgattttaggaaaaagctgcttgccgatggctttagcatgtttcaattttcaatttacctgcggcactgcgccagtatggaaaatgctgatgtgcatataaaacgggttaaaaaaagcctgcccgagaaagggcatgtgggcatacttaccattaccgataagcaatttggcatgatggagatatattttggccccaaactggccgaactaccgaatattccccagcaattagagcttttttagcccccatagaaatacaaaaagtgtcccgaatgttatactcgggacactgtaaagtccatttttttctttctatttttgattgaaaccctttgctgacaaggcttccagcttttgctgttgtcatcaaatatagcaagaactaaaattgaaagcaaatcacaacacaaataatatatgccacagcaaggaacaagttgtcatcaaatatagcaagaactaaaattgaaagcaaatcacaacaaggaattggaaagggtataaaacccctgtgttgtcatcaaatatagcaagaactaaaattgaaagcaaatcacaacatataccaggcaagttgcatagagcgtgcagttgtcatcaaatatagcaagaactaaaattgaaagcaaatcacaacgtgaaaggattgatgatctgagttttaaagttgtcatcaaatatagcaagaactaaaattgaaagcaaatcacaacatcagttctctgcaggccatgggccaacaagttgtcatcaaatatagcaagaactaaaattgaaagcaaatcacaaccggggcgtcaagtttgcgcgtcccggatgagttgtcatcaaatatagcaagaactaaaattgaaagcaaatcacaacactgccatccatttaccgaagtacccatttgttgtcatcaaatatagcaagaactaaaattgaaagcaaatcacaacgcagagtgtggtgcaaggaatatttgttatgttgtcatcaaatatagcaagaactaaaattgaaagcaaatcacaacaaaaagtggtacataaacagcaggtcaaaggttgtcatcaaatatagcaagaactaaaattgaaagcaaatcacaacggctatacaaacataaataaaggcattcacgttgtcatcaaatatagcaagaactaaaattgaaagcaaatcacaaccaagcggcggcataacgacagcaaacgcaagttgtcatcaaatatagcaagaactaaaattgaaagcaaatcacaacagggctaccgttttgcatttaaaccaaaaagttgtcatcaaatatagcaagaactaaaattgaaagcaaatcacaacaccattataccagcaaccacaatagcagctgttgtcatcaaatatagcaagaactaaaattgaaagcaaatcacaacgcctgctaaataacccattgccacaattggttgtcatcaaatatagcaagaactaaaattgaaagcaaatcacaacaaccctgtgatagctatcgtggaattacgggttgtcatcaaatatagcaagaactaaaattgaaagcaaatcacaacgcacagggtacgccataacctttacagcaggttgtcatcaaatatagcaagaactaaaattgaaagcaaatcacaacggacagacacaggactaaccggagaagaaagttgtcatcaaatatagcaagaactaaaattgaaagcaaatcacaactcataagggtacggagttttttaaacatgagttgtcatcaaatatagcaagaactaaaattgaaagcaaatcacaactgtttatgtacattcacaatcaacaatctagttgtcatcaaatatagcaagaactaaaattgaaagcaaatcacaacaaaatggtacaggtgttgcgccgggtgtgggttgtcatcaaatatagcaagaactaaaattgaaagcaaatcacaacatggccgcgtaggtagcaacaccggtgcaagttgtcatcaaatatagcaagaactaaaattgaaagcaaatcacaacaaaatcggtaacgcttatattaggcgttgggttgtcatcaaatatagcaagaactaaaattgaaagcaaatcacaaccccctgccagggtgcaggccatggataaaagttgtcatcaaatatagcaagaactaaaattgaaagcaaatcacaaccgaaaggcaataaacgtgtttgccttatcgttgtcatcaaatatagcaagaactaaaat

SEQ ID NO: 1303 - DNA, 17854 bp, synthetic construct
  source 1..17854: mol_type = other DNA
  misc_feature 1..17854: note = Synthetic
caccttcttccccacggcatcggccgtaccaaacaggcgctgagccagccgctcggagatgaatgccttgtcctccacctgttcaggcagccggatgtcaccgcccgtgcgggcatccttcatgccgtaggtgcggagcaggttgctgccgtcgagggctacaaagctgtaggactgggcatgcacatagccctcctcccgatgcagggaggcggtgtcggcaaagacctgcgtaccgctccacgagctactgttggggaaactttgattgccggagatggcccaacactccacctcgggctgctcgcgcacgatgcgggcaatgcgcgtgtaggccaccagattcatcgagtcggaagccatgtcggggtcgaagttgccgttcgtctcgtcgtacatgccgatgttcaccacgtaaagcccctcggggttataccctcggtcgatggcacggttggcggtcaatacatagatagggtcgataacagtccaaaggaagaaactgacgaccagcagttccaggaatatccagccgttctgacgacgctggttccatagttgatgtaagatggtttgaagcatgagattttatcttttcgtattcaacgattccataatcgggtggcgcatcgcccccagcgcgggcacgagggccgacaccacattgagcaccacacacacggccagcgcgcagccgaacacggcgggattgaacagcatctcgggcgtgagcgacgtggagagcgaagtgtcgtagatgttcttgtcgaacagcgtcagaatccagtcgctggccgtcagcacaatcaggtaggagaacaacaggcctgccagaccgcccagcagcgtaagcaacaggttctcgcagagcacctgctccagcaggcggcggcgcgtagccccgtaagccttgcggatgcccagctcggcaatgcggctgtccatacgcgaggaaatcatgccgctcagattcaaggcagggatgaagagcagggccagcaggatgtagaggaagtccttggccagttccatcgtgtcgggcgccttctccacatcctggcggaaagtgctgagccagtatggatcgggttgccccatcaggtcgtattcataatccttgtcttgctgggtatagcgccggaacacatcctgcacctcgctgcgcacggtttcgaagttctccgcatcgtccaccagcagcgacacaaacacattgcccagcaaaccctgtctgtccagctccttggagatatactgcgcattgagcaagggcagccacaggtcgcctgccgtctcgggcgtagcattggaaacatcccgcaccacgccgcacacgcggtagtcgcgcccgttgaaggcgaagtgccggcccgacacaccctcgacggcggcaaacaaccgcttggccatcgactcaccgatgacggccacttgcgctttggcctccacatcttcctgcgtgaatggctggccgtcaacaaaacggaaggaaaagactttccagaaagcgccgttggcaaaacggggagtagctttgaagggctttacgtctgtggcagacacctgataatctccccaaaaatcaatcacactgcccgccacctgctccacatgaggcaaccccggcagcatctggtccacgacataataggccacgccgccgtagatgttccagctctcgggctttcccttcggatagcgtttcaggggcttcaccaccagcgtgcggtcgcggttatactcgggatagacagggccgaacttgacgtagaagatgatgaacagcgtcatcaccaacgcaatggacaggcccgtgcccaccacatagatgcctgtaaagaggcagttctgccgcatcagggtccaggcttgtttgaagtagtttttcagcatatctgtatgtacttttagtttgttccattcccattgttttccggccgatgcaccccacgaatgatgtgcttttataccccacgtaggggtgtcatcacaccccacgagtggggggcatccatcccccacgggtggggtactttcgagtacaacttgcggtgggtcagtctttcagtttcagcttgttcttgttcttatactggctcatgtcgctcaccaccacctggtcgcccggcttgaggcccgaaactacttcgacatattcgaagttggagtcgcccagctgcaccttgcgcttcacgagctggccctcgccgtcgcgcacaaagaggtcgtactcgccacggcccacatagtacgaagcgttggccacacgcatcacgtcttccttcacggcgttcatcacatagacatcggtcttcagccccgaacgcaggcggcggttgctgtcgtcctccaactgcacggtgaaagagatgacaccgttcttcgaaagcggggtaacgctgctcacctgcccttccagcttctcgctgcctatcttcacgatggcccgcccgccggctgccacacggtcgccgtaagtatcggctatctcgccctccaccttgaagtggctcaagtcggagataacggctatctgcgtgccctcgcctacctgcgcgccaatctggttattaatataggtaaggatggccttgcggggcgagcgtacctgcgcatcgtccagcgtacgtttggtttcggccaggctcttgcggaagatctcatactccagctgcttcaccttcaggtcggcggctttcaccttacgctcgttggccagctgctgacgcaactgttccagctccagtttgcccgtcttgaagttcagttccgcctgatgcacacggtcggtcgttcccgatcccaggctgtccagataacgttcattgcgcagctccacctccatgcggttcagcttcatctcggacaccttcacctgcatctccaggtcgctcaggtaagtgctgttgttcacctccagctgctccagctggtagcgcttcatctgctcctcgtcgagttgcttcttgtactcggtttcggcgctctgcaagtccagtttcaggatgggcgtacctacatccacactgtcacccccctttttgtacacctcgaggatgcgcgtattgatgggcgaattgataatttcttcgaaagcaggcaccaccttgcccgaggcgctgacactgacctcgatggtcccctggtctacggtagaaaacaccagatctttctctttcacgcctgtccgcatcagcgaaatgagcacactgagcaccaccacgcctgcgactcctgctacaccataacgaatcagtttcttgttgcgctctctacggcgctcttctttgggaatttctctatccatggcaataattttgaattagctgtttcaatccatacacagcccacaactattatgccaaaaccacaattcactgattttcaaagataagtctttattcagaggtgttcattttcggacaggtgtccgatttcgggcggacagtttcactcgttcacagctccacaatgcggacacacacccttgtgcatcagcttgccgccgcaacgaccgcaacggtagcggggcgaatgaagcgaatgcttcagccttccgatgaagatccagataaaagccgccagaaaaacatagcccacgtagatgtgcgtagtcaggataaagaagaaataacagaagatacacgacgaagccagtcccagcaggtagaacaccgccgccgcgggcgaaagctggcggaaaagatcgtcgagcacggccagcagtacaaccagaaacagccacagccccaccagaaacatcgaaagcacgaagggcaccttgaaaggcgaaagcgtggggttgtaatagtagtgttcccacgtgtcgggtgcaaaaacctgtatcgactcgtagaccgtcgcacagaaagccatcagcaagcaaagcgccaggggataaaggctgtcgatgtcgttgaagtaaaccagctgcaactgcttacgtcggaatacgcgtaccagccagacagccacaaaaatggcaaaaaccacgatgaagtacgaagcatgcgtgtcgctgaacacgtagatggcctgcgaaatgctgtccgtaggcacaaaggcgcgcttcaggtcgacttcgcgcagccacccctgtacctcctgcgagtgggccagcttcacccagacggagtctatcgagtcggccggatggacagcaaactcggctactactacgcggtcgcccctatgcagctggtagtaagcccctttcacgggcagaagctccagctggacggagtcggtcttcacctccagattggtgtcccacgtatagtgtcgttcgtacaggtaggtcagcgagtcgcgcatctgctgcgacaggccttcgtcttccagattggggcgggagtaatgacaggaagaaaaaaagaataaaatgaagaataaaaaatgaggcatgaagaatccgatgcgccaaggggcatgaaccgtcccgcgctttcttccaaggccatctatctttaattcttccttctccatgcttcactcaccatttattcattagccaacaccttcatctgacagttcttgcaatcgaactccagccggaagcggcgtccgtccgagcttgccagatagtacggttcccgatagggcgaacgtcctttctgatgaacaggacaccagcccatgctgtagcgcagacagtgacggcagaacatcagcaccgccccgtccgcaggttgcttttcgtaggcgggcgccacagctttcactccatgatccaagtagaaacgtcgtgcctcgtcgttcattacgttgcccagataggttagcgtggccgcaggataagcatggcgcgtcggcttccacacggccaattcgcgacggtaattgatgcggcgtgcagccgtcagccgttccaccacctgcctgcgccagtcggccacgaccgacgagggtacaaaccactcttccgtcagggcgatgtcggccggttccgtcagttcataaggcgtaccgcccagcttggccagctgcgtacgcaggttctctacctgcggcgtgcgtgcccgctccttggcataaccgaaagccagcgtcacgcggttgtcgtcctcgtcgtctgccgtcagcgagaagccaaaggcattctcctccagcctgaggcgcacccctatcttccgctcggccgacttgcgtgccagggcccgttcaaactcctgatccaggttgcggaagagcggcgtacgcggccgtatgcgcgccacgttgcctgccggaaaaagcttgttgccctctacgcgattgatgcggaagccctgcaggcgcccctgctcgtcgaggtagcacacgccgtcaccgttgtggaaaggcttcacacccgccacgctcacccatccgccacgctgttccttcaacgtacccatggcctcgcccagtgatttgggcgtgtcgaacgaagcgatatcctctccccttccctccagaaagtagtgtgtgaatccgcggctgaagctcttctccggctgcggacggaagtccagtcggcacgtgcccgacgaagcacgcacatattccttcctgcgcttcaggatggcgtccaggcgttggctgtaggcagccgtcacgttcttcacgtaggccacgtccttcagccgtccctctatcttcagcgaggtaactcctgcgtcgagcagctgctccagcatgtccaggcggttcatgtccttcagcgacagcaggtgtttgtctttcaccaccacccgtccgtcggcatccaccagcgagaaaggcaggcggcagaactgggcacactccccacggttggcgctgcgcccgaagcaagcctggctggcgtaacactgtccgctataacttacacacaaagccccgtgcacaaacacctcgagcggcgtgtcgggacaggccttgtggatggcggctatctcgtcgagcgacaattcgcgcgccagtaccacctgtcggaagccggcctccgccagaaagcgcacctttccggccgttcggttgtccatctgcgtgctggcatgcagcgggatgggcggtaggttcaggcgtgtcaggcccatgtcctgcacgatgagtgcatccacacccctgcgatacagttcccagatcatgtcctccgtctccttcagctcttcgtccttcaggatggtgttcaccgtcacgtagatgcgcactccgtagaggtgggcatagtctgtcaggcgtccgatgtcgtccatcgagttcgtagcagccgccctggcgccaaacttcggcgcaccgatatacaccgcgtcggccccgtggttcaccgcctcgatgccacactccagattccgcgccggtgccagcagttctattttcctcagtaccttcattccccgatctcgttgatgttgtacggcgtttcctgatagacgaagtagttcagccagtttgtaaagaggaggttcgcatgccccctccagcgcaccaatacccccttttcggggtcattgtcccgatagtagtttttcggcatgtcgatgggcagtcccttgcccagatcccgtctgtattccgtgtccagcgtcaggggcgagtattccgagtgtcctgtcacgaagaattctcttcctccgcgtgccatgaccatgtagccccccgcttcgtccgactccgagagcagtgtcagttccttcaccttcaggatatcctcccgtctcacctccgtatgccggctgtgaggcacgtagaacacgtcgtcgaatcctcggaagatggggtgcagcggttgcagcgtatgatgttcgaaaatgccgaacatctttttctcgagcggatatttcggcacgccatagtggtggtagagtcccgcctgcgccgcccagcagatatagagcgtcgaggtcacgtgtgtgcgtgcccagtcgaatatttccgtaatctcgttccagtagcccacctcttcgaagtccatctgctccacgggcgcccctgtgataatcatgccgtcatacttctcgttcctcatgagttcgaagtccgtatagaaagccttcatgtgttcgatgggcgtattcttgggcgtatgactttttatcttcatgaaagagatctctatctgtagcggcgtgttagacagcagcctgacgaggtccgtttccgttgttatcttcaggggcatcaggttgaggatgacgattttcaggggtcgtatgtcctgtcgcgtagctcgcgaattgtcgatgacgaatatgttttcccgcttcagcagttcgatggcgggcagtttatcgggcaagttgagtggcatggcatttacatctttagtttcagagggtcaaagatagtgcaaactgagagaagcacaaagcgaaaacgaagttttcaggcttttagatgaggtattgaagaaaaaaacggcattttcactttttaatatttttatttttttacttttgccaccgataacatttctaaaaaattaataccatgaaaagacatccgattcttacaggtgtagtctatcgtttaatgggaggaattttattgctcttcctatcctgtagtactgaaaacaatgcatttgacatgcaacccggcgacatccccatcacgttctcgggcactatcagtggacaattactcacaaaagttaccgcaacatctttcgaaacaaacgaccgtatcggcctgtttgccacgctgacacccaactctctcgatgggaagagatatatagacaacctgcaactgacatgcaacagcaacggcagctccttcacgccagcgcggacggtcttttatcccgaaggaggagggacactggacttcgtaggctatcacccttaccaaaaagaagggctacaagcagggagtactactctatctgtcagcatccagtccgaccaaagcacacctgagaatttctcggcaagcgacttcctgactgccaaaaaacaaaacgtgggaagcagcgaaaacgacgtgacactgaacttcaagcatcgatttgccaaactgaaatttaccattatccctggcgaaggcgaggatgcggcgagcattctggaggacgatccgaacattatcgtcaccaatatctactcgcaagccagctacaatctgacggacgaaagcatcaccaatccgcaggagcctacagatatcctcacctacggttcgtggagcaacagcggagaaaaactcacaggcaaagaaataatcatcattccgcaaagcttgacacaaacggacaatagcattcttatggaatggaacggaagggtatacacctgcctgatgccggaacaagtgatgaagacaggtacccaatgcgaaatatccatcaccgccacccaacagggaggagaatttctgaccggcatagcaggtaccgtaagcgactggactaccgtcgacgggcaaacgacggacaacaaccaggaaaacgtagccatccacacggccatcttgtctttccgagagtctgacgtttatcgcatctaccacgaagggaaggccctggcagatgtgtgcaaggaatatttaatctcggacgaactgacctccagcgctgtcgtctactatcccatatcggaagaaacagagcggcccgacctgacacgaggaactgtcctgcggctgatggacacgcccgatgccacctgcggaggaacaatcgtctggaatacggaagcaaacagcttcacttacaaccaagggagccaaacgagcatcaacaaattttacgtatccgaagacggaacgatcagcctgacctcgggcagcaatgccgtaagctgcgacgtcgtgagcctgaccatacgcgacacccgcgacgcacaaccgtcctcctacccgatcgtcaaaataggaacgcagtactggatgaaagaagatttacgggcaacctgctataaggacggaacacccctgaagaaattggagaaactcggcacagaagccgcctacttcaagccggaagggctggagtactatttctacaatggcgaagcagttctggccggcgaattaagccccgaaggctggagcattccaagcgacaaagactgggaggccctaaagagttacactggcgacaacacctcgctactgaaagcaggaacatggctgcttgagacggacaacgccgggcaggagcaagaaggagacgtggctcccgtcaacaacctgaccggattcagcgtctatccacacggttcgtggttgagtggacagcacaataatgatgggcgcctgaacggatattgggcactgaaagaaggcagtacggagatagccgacaaaatgatattcttcactggaggcagcaacaacttctacctgtccgatccgattgtaaatgggaaagactactacaaagctgcatccatccgttgcatcttgaagtaaccccaataatttagtttgtgtccattattcctgtttatcctctcattttagaagtcccgacgggccaacatccgttgggacttccctttgtcgacaggaacaaagatagagggtattatacacccggcccaatacagctatttttgtttactgagataaaaaagacaaactgagaatcgattttcataaactgtcaactgtcagctgtaaggcaaaaacattatttttacgagttttttttaatcaattttactcatagatgaaagcaagccagttctttgacagtcaacacatatttttgacgtgggtggcggaggttgtcaggatatcaatttctgaacattgacattctctgtatacacttggtttgtctgacttgtggggtcttgtatgggtaatccttaatggtgaattgctccaaattagcaaggcaaatatagtgaaacgagtgccaaagcaaatgaaaacgcaatttttcaatttgactatgccgaggtgcagcctatgttattctatccccatctgtcattctgagccggaggcgaagaatctcaaaattcatttcagttaactgtcaactgtaaggcgcaggagagaactttgcagcagaaaataaaaatcccccgttaaaggacgagggaacctaatgttttcacaacggaataatccttattgtgagttgcttcaaattagtatggcaaatatacaaaagaaaaaacaatgtacaagtggtttttcaattttttttgttagatttgtggtaaatataaagatttcaattactatgaaaagaatattaggtcttgatttgggaaccaatagtataggttgggctataataaatatgtttatcgacaaagagggcaatgagtcattgtgtggaatagaatccgctggtagtagaattattccaatggatgcaacaatcttgggagattttgctaaaggaaacaaggtttctcagacgcaaaatcgtacaaaggcaaggagtaccaggcgtatgtatgaaagaggacatttgagacgtgaaagacttcatagggttttggcaataatgggatacttgccggttgattatttgtctcaattggatcgttatggaaaattcttgccaaatagggaaccgaaattagcttggtatatggatgatgcgaatatccctcattttttgtttcaagactcttttcaagaaatgttggatacatttaaaaaatataatccgtctgtagttgctggctctcataagattccatatgattggacaatttattatctacggaaaaaagcgttatatcagaaaattcaaaaagaagagttggcttggattttgctgaactttaatcagaaaagaggatattttcaattgcgtgatgaagtggcagaacaggcttccactaaaactcgtcaatattttgatcgtcaacaggtggtggatattatagatactcaagaaatttataaaggtatgaaggtcttgcgtgttgttctgtctgatggcactcaagggaaaatttttaagaaagaaattcctgattggattggtcaagtaaaagatattatcgtaacggtcgatatagataaggaagggaaagataaatatgatgaggatggttcgctttcttgccgtttaaaagtaccctcggaaactgagtgggaaactgaatggatattggttaaggaaaaaactcagtacgatttggagacgtcgggtaaaagtgtaggtgaatatatatttgatactcttcttcacaatccgatgcagaaaattcgtggtaagctggtgcgtaccattgagcgcaaatattataaggaagaattgtatcggatattagcgaaacaaaaagagttccactcggaattgaatgacagaaaactttatgaaagatgtttggaagaattgtaccccaataatccgtcccatagaaatctgatggccgcacatgatttgtcctacttcttgatgaatgatattttattttatcagcgtccgttgaaaagtaagaagtcgttgatagataattgtccctttgaaagacatgaatatattgataaggtgacaaatgaacgaaaatttgcgccagtaaaatgtattgcaaagtctcatcctttgtttcaagagttcagactctggcaatttgtttcgaatctccgtatttatcagaaggaaaaggaggttaacgggcgtttgatgacagatgtggatgttacgcaggaatttttgcgtaatgaagaggattatgtggctttgtttgattggctgaatgagaggaaagaaattaaacaggaacagtttttaaaatatccggtttttggcttgaagaaagatgctggccaatacaggtggaattatgttgaagataagtcctattgttgcaacgaaacacgtgctttgatgttggttcgtttggaaaaggctggtgtctcccgtgattttttgactcttgagcgtgaagaggctttgtggcatattttatattcagtatcaagcaaacaggaactgaagctagccctctcgtcctttgcgaaaaaaaatgatttggatataaaatttgtggatgcttttgtcaatacaccgccatttgaaaaatcttatggatcctattctgccaaagcaatcaagaaactgcttcctttaatgcgtatggggcattactggaaggcagatgctatagatgttcatacccgcgaaagaattgataaaattctgacaggagaatgtgatgaaggtattagaaatcgggtacgggaaaaaactcttcatttggtggacttaccctctttcaagggacttcctttgtggttggcgagttatatcgtttatgaccgtcattcggaggcggaagaattttgtcgatggaagtcgtctcaagatattgatgaatatctgaagacattcaagcagtattctttacgcaatcccattgtagagcaggtcgttttggaaactttgcgaactgttcgtgatatatggaaacaagtggggaggattgatgaaatccatgtggaattagggcgtgaaatgaaaaatccttccgagaaacgtaagaaaatggctcaaaagatgctggaaaatgagaatactaatctgcgtattaaagctttgctggttgagttcatgaatccagagttaggtatcgagaatgtccgtccttattctcctgcccagcaggatttattacgtatttatgaggagggtgcatggaatgcttcaaatgcagacgatggtttgcgcgacgagatgctgggtattctgaaaaaatttaatgagtcggacgccaagaagagacctactccttcggacattaaacgctaccgactttggttggaacagaagtacaggtcgccctatacaggtgctgttattccattaagtaaattattcactcctgcttacgagattgagcatgttatccctaaagctctttattttgacgattcattcagtaataaagtgatttgtgagtcagaggtgaacaaattgaaggacaagcagcttggttatgaatttattaagaaacatcatggcgagaaagtccaattgtcgttgggtggtgtcgtggagattctttccgttgatgcttatgagcaatttgtaaaagaaaactattcgcagaatagaactaagatgaagaagcttttgatggacgaggttcctgaacaatttacagagcgtcagatgaacgacagccgttatatcagtaagttggttgtgtctttgttatctaacatcgttcgtgatgaggaggagcaagaggtccagtcaaggcatgttgtggtatgtacgggtggagtgaccgacaggctgaagaaagattggggagtcaatgatgtctggaataagattgtgttgccacgttttgaacggatgaatcaacaaacaggaacttctgatttcacatcggtcaataccaacggacgtatgatacctgccatgcctcttcatttgcagaagggattcagtaaaaaacgtattgatcacagacatcatgcgatggatgctattgtgatagcatgtgcaagccgaaatattgtcaactatctgaataatcagtcggcaggtgaaaacggcaaggcatctcgctatgatttgcaacatatgttgtgtaccaagacgcaagatggtgatggctatcagtgggttgttaataaaccttgggaaacatttaccgaagatgtatatgaaactctgaaagacgtgattgtcagcttcaagcagaatttgcgtgtcattaacaagacaagtaattactatcagcgtaaagagaatggaaaaacgattctttctaagcaggataaaggggacaattgggctattcgaaaatctttgcataaggaaacggtttatggtgaagttaatttacgtaagataagtaatgctacattgaaagcagttcttaccaatccgaaggtaattgtaaacaaggacttgaaaagaaagctgattgaattcataagccaagggtatagcgaaaaacagataaagaattattttgaagagcataaagatagttggcgggaggtgaatctgaaaaaaatccccgtgtattattttacgaaagataccaaagaacgtttttttgcttcacgtaaacccttggatgagtctttcaacaaggatgctattggtagtattactgatacaggcatacaggccattttgttgaggcacttggaagaggagggtgatgatcccaaaatcgctttttcacccgaaggtatagaacggatgaataaaaatatggtacgtttgaacgaggggcatcagcatcagccaatttataaagttcggaaatatgaaaaaggtgataagtttgctgtgggtacaaagggaaatagatcttcgaagtttgtagaggcggctaagggtacaaatttgttcttcgcggtctatgagcaggaacagtttgacccaaataatggtgagatcgtgaagaagcgtacatttgctacaattccactgaatgtggttatcagtcgtcagaaacggggtgagtgttctgcacctgcggacgggaatggaaatttgcctttgtttgttctttcacccaatgatttggtatatgtgcctacctgggaagaggtgaagagtgggcaattgcctgctaatccacatcccgatagaatttataaaatggtaagttctagtggtaaccaatgtttttttattcaatatggagtatctggtatgttatgggataaaaatgaattttctgctcttaataaaatggagagaagtataacaggagaaatgattaaggaaatctgtattccattgaaagttgatcgtctgggacatgttgcttataaactatagttgttatgataaaaaaaacgctatattttggaaatccaacttatctgtctttgcgtaatcagcaattggtgataaagcttccggaagttgaggggaacgattcgcttccagggcttctcaaacgacaggcagatgttacgcgtcccattgaggatataggtgtggttgttctcgaccataaacagattaccattacttcaggtgctttggaagccttgctggaaaataattgtgcggtcattacttgcgacagcaagagtatgccggtaggattgatgttgcctctttgtggtaataccacgcaaaacgaacgtttccgcaaacaattggaagcttcgttacctctgaaaaaacaattgtggcagcaaaccattcaaaccaaaattcgcaatcaggcacgagtgttagcggaatgtagggcggaggaagtaaaatgtatgtatgtgtgggccaataatgttcggagtggtgatccagataatcttgaagctcgggctgctgcttactattggaaaaatctgtttgccgatgtggagggttttacgcgcgaccgagacggtctgcctcccaataatctgttgaattatggatatgccattttgcgtgcagttgtagcccgtgggttagtgtcaagtgggttactcccgactttaggcattcatcatcataacaggtataatgcttattgtttggccgatgatattatggaaccttatcgcccctatgttgatcgccttgtctattctctttataaagaaagagtatgtggaaatgttattttggacaaatctgtcaaatccgttttgcttacggttcctactttggaagttcatataggaggtaagcatagtccgttgatggttgcagttggacaaactaccgcatcattatacaaatgctttgcaggggaattgaggcgtatccagtatcccgaagaagattaatggaacgttttagtgagtatagggtgatgtggattctggtattcttcgatttgccaacggatacaaagaaagagagaaaggctgcttccgatttccggaaaatgcttcagcgtgatgggttcaccatgtttcagttctctatttatgttcgtcattgtgccagtagtgagaatgccgatgtgcatataaagagagtccagtcttttcttcctcagttagggcaggttggtatattgtgtattacagataaacaattttctcaaattaagattttttatgggaagaagaccatagaagccaatgctccaggtcaacagctagagttgttttaaaaaaaaataaatcttgcgatctacaagatttatttttaagaacagcaattttgttatttctaaatttcttcctaaatggttgttttatagtatattataaatattgagctgttctttatggctcaaagatactaatttgaaagcaattcacaacagaattgatgcgctcacaaactgcgctggagctgttctttatggctcaaagatactaatttgaaagcaattcacaactagaactactaaatgaattttggataaagagctgttctttatggctcaaagatactaatttgaaagcaattcacaacgaaaggtattaactttgcaaaaaagaaaatgctgttctttatggctcaaagatactaatttgaaagcaattcacaacacgtcgcgtccgctattgttcttcgggaagctgttctttatggctcaaagatactaatttgaaagcaattcacaacaggatgcgatagtgttttaaatgatattacattatatgtgcaacaatatagaaatttgatattttgaatcatcgtactaaaataaacaaatcacccgcccctcattcttctctgaggcagcgggtgttttttacttcgtgcttgtgttgtcgtgggctgcgcgcttcgtttacagtcccatgcagctggtgacgcccagcgtagttccaatagcggtcaggatggtgaccagcgtctggataatggttttccaaattgttttcttgtccatttcgttaattgagaattgaaaattgaaagttgaaaattagatacttcgttaattgagactattccttagtataaatattaaaggaggttttgagcgaagctaattgaaaattgaaaattaatttcggccgcattcttcattttccattttcaattctccattcttacagcgggctgcctccttcttcttcgtcctcgccgccgggctcgggttcaggggtagtgccttcttcgagggcgccgccggcggtgtagacggtcagctcggtcaggcgggcggacttgcgcagctcggcgttgctccaggtcttggtgttgcgcacgttcaggtggacgcccgtaatgaggctggtggtccacgcctcggccgtctcggcgcctttcgaggagatgcctacggaaaagaggcccaggtcgcccaaacggacggacttaccgtcgagtactagctctttcaagcaggcgagcatgtcgatgagtacgccgtggatgacgccgcgcgagtagggcgagttgtgttcagaaatatgggtgacgaagtcttcgaattccaccgtgcggtcctgcacggcgcgggcataccatttggcgactccgtcggggtcctgcggcgacttggccgcgtaacgtctgtacttcaatgttccgattgttgacatagctttgttgttttaaatggtgtttggttaattgataatggagaatggataattgagaatggatggtgcctcggccgcaggcaaattcttcattcttcgttcttcattcctcattcacaaaggcaaatatagagcctttcacccgtgcggccaaaaacagggtatcggctttctgtgaaaatctgttaatggacatctgactttgtgttaataaaaataacgcgctgatttacaggttgtaaaacggtgttttcgtgcgtggaaagcactgctttttcgccggggcggcgcagcgctcattctccggctgagggatggtaccctttgttttgttgtatctgcgggggggggaagggcttttgtccgcacatgttgtgtgatgatgggtgacttgtccgaatgccgtcttcaccataccctgcgtaccctgacccttacattacaaaacttacaaaagagaaaagtgcttttctcccttggccggttagcctatttggaagtttattatatatttatatat

SEQ ID NO: 1304 - DNA, 17847 bp, synthetic construct
  misc_feature 1..17847: note = Synthetic
  source 1..17847: mol_type = other DNA
ctgagatgtcttccaacattttattttctatttttttaagttgaaagtttgactcatgagcattcaaattcacagcaacaagtatatcatcctcatttctcttaacatgatttactggaattgggttgagcaaacctccatcgacaagatgatgtgaattatgcagataaggtacaaaaagtgttggtattgagatagatgcacgcaatgcctcataaagatttcctttatcgaaaactacttccttattagtttccaaattggtagataaagccacaaatggaattggcaaatcctcaatattaatattagggatacgtttctgcatttcatcaaaaacttttttccctttcataaatcccaaatttcttatagtgaaatccataagattaaagacttctttttttgtcaacgaaagcatccaatctttataggaagctaaaccaccagcagcataagcaccgccaacgacagaaccgattgaggttcctgatattgaacttatttggtaacctcttttttcaagttcttcaattacaccaatttgagcaagccctcgtgcaccgccgctactcaataccaacgcaactttttgttttaccatctctatttattttaaaatacttcttgctattcggtttactggcaatattgctgcgataaatccaataaacaaaactatgctataaacagccacaaaatcagtaaatttcatggcaacagggaaagccgatacagcaaagtttccatccataggaattattccaaattgctgctgaattattattattataactcctaatattaaacctattgcacctccaagtaccgaaatcaacattccttcgtaaagaaatattttcttcactaaactctttgtggagccaagatatgacagggtttttatatcttcctttttttctaaaatcaaaaccgttattgaacccaccacattgaaaattgctatcaaaagtatgaatgataaaatcaaaaatcccgaccatttttcactctgagtaatcttataaattgttgcattctgtttatttctgtctttaattatataagaagtacctaacgcactttcaaggtctttaaccactttataatcaattgatttatcatgaagagctaattcaatggaggtagctttattttgaatattcatcaactttctggcaaattccaaggaaacataaattctactttcatcgatttcttgctgaacgctaataacaccgacaggatatatgggcataatgttgaaagcattcaaagggtcgatttcagaagcatcagctcgaggataataaatataaattggctggtctatttgattaatgtttatgcccattttcgttgccatgccattgcctactacagcaaaataaccattagaattctgcaccaaaaacctgcctgctacggtcattgaatctaccccgctcatcctgtaataatctggcctcacagcctttaaatccactataagttgcctttcgcttcctttagaattttcttgtgaatatttggcaagagccatatctgatattacttctgaatagtatgcaatatttttatttttagttattttatccatagggaaagaatccaaatcgatatattttccttttgctggtgagatttcaacatcaggttgaacagaattataaagcacttcaataagatcttcgaggccgttgaaaactgatagtataaggattagagctaaagttcctatagcaacaacactcacagaaatagccgatatcaaatttatggcattatgagttttttttgaaaaaagataacgcatcgaaaaaaatgacggcagatgaggcatggttgttattttattgctaccacatttagccctgtgcctgttttgtgataagaattagtatctaaataattaagtattaatgaaatggggaaagtaattatataatagaatggaagaataataaaaaatattttcgaagcattaagcatcagaataggatatttcatcgatagtttccagcttattttgcctgcgctgccgtaggtgtatgacgctctggaggaactaaatcctgctgctttaagtttagcttgaatctcatcaatattgtaaccatcgcgtacatgttcatcaatgaaagactcttctgaattttcagagtgctcgtgttcgtgttcatcaacatcgctgccaccctgatcagaaggcgtagaaatcaacagcatgcctccatttttcattgattggtagaagtttttaaaaacttgcgtatcttctaaaatatgttccatcacatctaccgacagcacaaaatcatatttattgggttcggaaaactttgttaagtcagccacttcaaatgatgcatttgtgcgtccgatattactaaagaaattattgcagtcagcaatctgttcatctttaacatctacacctttaactgtccacgaggaatttatgccagataaaaagtatgaatattgtccgaagccagagcctgcatctaaaatatttgccttaccgctttgcgattttgcccatattcttatctcttttttcacgtgccaagtgcgcagcagtagcaagtcgagaaggttatagaatacttttctaagaaatggtgttttattaaagacttcgcctaagcttctttttataggatcgtatttcatggattaaaatttattcttcgctaagaagtttgtcaatattttcaatataatctaaagaatcatcaatgccaaagacaagttcagggattatgcgcagctgatgacgcactctttcagcaagagtttttctaataaattttgtggaaattcttatttttttcagaatatcatctttatcggcagttccaaaaatgctaagaaatatttttgcttgacttaaatctttggtaatattcacttttgtaactgttaccatacagtaagagccagtgatttctttaatgttcatctgaaatatttcgccgagatctttgagcaatagcttcgagattttttgttgtcttgttgattccattttgcaaaaatagtcaaaatctgattgtagaaccattccgagatattagtcgaaaatatcattattaagtgtagaaaaaaaacaatacctaagtgagttttaatttcgataacagtatgaatgtgatatataaatacttacagattaaaaaattagacctttgcaaattaaatgaaattatagttgataacaaattttgcaagggtctcattattcaatatttattttccacttctaatcatttcctccacttcatcaatagtaataggaattcttcttcttcctaaattgcgaccaccatcagtagtaaccaaaatatcatcttcgagtctgattccgccaaagtcgcgatattgattaactttctcaaagttaatatattggttattaattttctcgttaatccacttatctataagtgcaggtataaaataaattccaggctcatcagtgagaacaaagcctggttttagttcgcgagccaagcgcaaatatgctgtaccaaattgctcgctacgtttttgattatcttcgtaacctacaatgttttcgccgaggtcctccatatcgtgaacgtctaaacccatcatgtgtccaagaccgtgaggcataaaaagagcgtgagcaccagcagccacagcttcatcggtattgccacgtgtcaagcccaaatttttaagcccatcgaaaatggttttagctgcaagagtgtgaacatctttataaaaaatacctggcttaacggccttatgaacagcgttgttggtagccaatactatttcatatatttctctttgtttttgagaaaacttaccaccaacagggaaagtacgagtattgtcagtggcataatgcatgctcgattcgaagccagcatctgtaagaagcaaatcgccattcttcaataaattgctatgatcatgattatgtaatgtttctcctcgacgagatagtatcactggaaaagaaattcttccgccatatttcaaggcaattccttcgatagtgccggcaatttcacgttcgtaaatgccttcatgtgccattttcatggaagttgtatgcatttcgtagccaatatccataattttttcgatatgatcaatctcttctgaacctttgatgcttctcagttttacaacagcttttataagttccaaagaagcattagccttagtttcattggcttttattccagttaaatcctgaagcaataatttattttctggtcgataaggaggaagaaaatgtatttttctgccattattttgggcagattttatataatcaaaaaggtttttaaatggcttcactttatctactccaatttcggaggctttatcttttatcgacggctgaggacccatccaaatgatatcatctatgtcgatatcatcaccaaaaatataattctcattttcgtcgatatcaattatagcggcatatccaggatgatcgagaccgaaaaaatataaaaatgtgctgtcctgtctgaactcataaatattgcctggataattcattggtgaatccacatttcctaaaagcaaaataattccattatttattgacttagaaagctcgctacggcgcttttgatatacttctttattaaacatgattgttaagttaaattattaatattcaatgtaatataataatatggtgtttgtgccgatttattatgttacaaaagtaaaaaaaaatgggggcaatttttttttgaaagatattttttattgacttttatagatttttaagaaggatttgattttttacaaaataattggaaaatcaatctgcaatcgataaattttttcaattcaaattatattcctataaaaaaagccttctttctcaagcgccattatgcttggaaagaaggcaaataatcactaaaatctaaaaaccactttttaatatgaaaaaaatactatcagaatgaggaagtaaatattttcgtggggttgggtgatgcgtaccaagcagagtttattgccccagagcttgtagcccattgttggaataaaggatatgcatcaattatttcgattttctccaatggattatggaagttgcttgaaccgtcaataagctcaaaaccccaaggcaagttattgacagttttataataccttccaatagttgcatttgaattgtcgttgaaagtaccgaaatagcttgaagaagctgcctctgttggcggcctattgggacaatgaatttctaaagctcgattattagatctaaagatatagaagtcttcatttatactgttgaatgcgaatccaccattagcctggctgaaggtaatagtaaaatgcaaagtatctggagtagcggctaaggccgtagatgtgttggtataataagtcgattgttcactaaatacatcatttgtaattttcacgcagtcgttatctccttgatctattgatgctcctgaaattgaggctaaaatcccagatacctgagttcctgtagcatttaaatattgcagtccaatgccattatgaagtcctgctcctaaagcacttaatatcacagtagcataagcatctacaactttattttgtgcattcacgcgatattttactttagtctttatcattaagtcattgaaatcgaaatcgcccatcgatggccacaaatcctcaaaagcaattactttatagcctgaatatggcgaataattggtgaatgcaagggagctattatttgggtattcatctaatgcgtcggcaatgccatcgccatcgctgtcggtaattggcggagtaccaataccttcaggattgcaggagcttaatggtatatagccagtacagtaaactaccgaagatgcaattgttccataatttgtttctatgccagtgctatcgcagaaatttaccaaacctgtaatatgcccaccactgtttatggtagtagtatggctaacttttacagcacaatttgatgctcctccgctaatagttccattcaagttaaaattatatgtagaaatcattgatgcagcacccatggtaatagtttgattgctatttactgtaaaagcacttgtagctttcatataaccattattatcaatgtcgttgctcacagttattgattgattagaaatcattttgcagttattttcaacttctgcggaactatttaacacaatatttccgccagctgtaaataagccataattttttaattttttgctaatggtagctgaatttacaatagtcatattaccataattatacacagagccgcttgaattaataaccaaactattcatggtcatcgaaccataattgtataacttctcatttgttgtcaaagcaccattgatgttacaactattactataattataaaattcattatcgttacctaaactcaatgaattcatttgcagcgagccaaaagatgttaaaattattgttgcgctgctgccattaaaattaagataactaatatttgcactaccacaaataattattttggaattattctttaaagtcaatcctccatttaaggaacctgttaaacatactgtttgatttgcattcacagtaagactgtacactgtgcttgaaacagtcgaattgcagccgctattgcaacccggtgaaaccgagtcggcaccaccatctttagcgcctgatttaccaacaaccatattataaacgccagtattaaagtcacttatcaccatcgaagctctgttggctggaataaataccgtcacaaagtcgttatcgagaggtatttttgcgttgaaagcggctttagttccctcaattacagaagtctcgataagtttaaaatttttatcataaagaaaaattggctgtttgtcgaggctggtaggcgattgaatattaattttgagagtcgcgtctttgtacgacatccaagagaaagtcggtggcacttgcatttctttcatttgacccactggttcagggattaccggaataggtattacatcttttttgcagccgacaaatccaaggaataggctgataatgataaataatgttgtttttcttttcatggcgtaattattataatattggctgctaaaatatagcttcacattattacaattcaacaatacttattatttatttgtctatatttcaatttatcaacattttagataagatattaaagaataagaagtgctaattatttagtttgcatttaaaatttttccaaaaaaaggaaacttaaattgtcttatggttcggaaatcaaatcttgaattttttcgtgagtgagcaccatcaagtcatctactttggtcgaaagtatagtttctgtacttatgggtttcccgaatctgataataattttaccaggtcgaattaaccaggttgttttattattaaccttccacaagcctgaaaaagcaaaaggaagtatgggaacttcagccttctgtgccataacgaaaggaaactttttgaaagtacccagtttaggctcgagagttcttgtgccttctggcaaaataactattgaagttccatgttttatcaagtccacgcctttcaaaatcgactttagagattcccgtgggttatgtctattcattggaatatttccataacgtcttaaagaccagccataaaatggcgttttaaaatgctctgatgcttcaatgccattgaaaggtattggcataaagccaaacattagtgggatatcaaacatagaaacatgattgcccattatggtgtaaactgcatttttatctatattttctaagccctctaactttactattataaaaattattttgaaaagaaaacgagctatcattttgataaacgggtcataagttttgcgcttgaaaatgtatgatataaagattaacaggaaaacaaaaagcacaaggtaaatggttcctattatccaaattattacagaaattatttgcttcattatatacttaccgattaaagaaattcattatattttaccataaatattaataagctaagtcggtgccatccatctctttgggtatttcaagctccataattttgagcaaggtgggagcaatatctgataatcggccattttttaatttattgaattttgaatttattaaataggctggcaccttgttgagcgaatgagctgtatttgggcttccgtcttggttgattgcaaaatcagaatttccatgatcggcagtaaggaaaacagaataatcatggtttttggctgcttctacaacttttgaaacgctgtaatccactgtttcaatagcttttataattgaattatacacaccagtatgacctaccatatcgctattggcaaagttcagacagataaaatcatatttctcagaatttaaagcctccacaacaatttttgtaagttcgggagccgacatctctggttgaaggtcataagtagcaacttttggcgagctaatcatttttcggtcttcaccagcaaaaggctcttcgcgtccaccgctaaagaaaaaagtaacatgaggatatttctcggtttcggctattcgcaactgagtttttccaagtttcgataggtattcgcccatggcgttttgaacattttgcttttcaaaaacaacctccacatttttaaaactctcgtcataagctgtcatagtaagatatttcaaatcaatagtttgcatttgaaattcgggcatgcttttttgagttaaaacagtagtaatttctcttaatctatcgctacgaaagttgaaacaaatcaccaaatcgccatctaaaatacttgtcaaaggatcttcattttcatccacaataagcgatggttcaataaattcatcggtaatatttttactataggaatctttaattgcctccaaagcactgtgatatttatttccattagcattcaccaatagttcgtaagcgcgcttaactctttcccaacgtttgtctctgtccatagtgaaatatcggccacagacagaagcaattttagcatgagtattttttaaataatcctcaagttcacttacaaaagcaagacccgagcgtgggtcggtgtcgcgtccatcggtgagggcgtgaacaaaaaccgccttcaaagcaaatttttcagttatttctataagtttcatcagatgcttgatggtggaatgtacgccaccatcggagacaagccctaaaaaatgaacttgtttatgattaacttttgcataattaagggcatctacaagcactctattttcggaaatggagttatcgcgcactgctttattgattctcacaaggtcttgataaacaatacgtccagcgccaatatttatatgtccgacttccgaatttcccatctgaccgtcgggcaatccaacctcctcaccgcaggcgtccagcaaggatttgcctacattattatccatttctaaagcatcaataaatggtgttttagcattaaaaattgcatcggatttatcatgtaaacctttgccccaaccatccattattactaaaattgctttttttatcataatcaaaataatgtataaaatacggctgtaaaattatgcaaaatatggagctataaaattttataaacgtataatatcatgatatttttcacaaatcttttaatatttctgattctgcaagccacggagatttccctatataaaattgttggacaaaaaaaatgccccgaattgaaagtcgaggccgcttaaatgttttcacaacggaataatccttattgtgaattggttcaaattgtagcacaaagatattatttatttcttatcaaaataattttaaaaaaataattttaaaaaaaattgtattgttataatgtataaatttgtattaagctatttcactttggtaaaaaggagtaaacgctgagatttataataatttgaaaagaaattccattcattttcatctatcaacttaaaaaaaatattaactgataaaaatatttaacatgaaaaaaattttaggactggatttaggaacaaacagcataggctgggctttggttgacaataatgttgaaggagaaggaaatattataggattaggaagtcggataataccaatgacacaagatgttttgggagattttgaaaaaggcaattccatttctcaaactgcgaaaagaactggttatcgaggagttagaagattacgcgaaagacatttgcagcgcagagaaagattacatagagttttaaatatattgaaatttcttccaaaacattactctgaaaaaattgattttaacattaaatttggaaagtttttacctggtactgaaacgaaattatcctataatgaatcaaatgattttatttttaaaacttcctttaaggaaatgcttaaggattttgaaaaaagccaaccagaattaatatctaatcaaaaaaaagtgccttatgattggactatttattatttgaggcaaaaagcactaagcgctaagattgaaaaggaagaattgtcatggcttttattgcattttaatcaaaaaagaggatattatcagcttagaggagaagatgaggatctaaatcaaaacaaattagttgaatttcattcattaaaaatagttgaagttaaagcagatgagcctataaaaagtaaaacagaaatatggtatagtttgattttagaaaacggttggatttatagacgttcaagtaaaatacctttatacgattggaaaaataaaacaaaaaattttattgttactactgatttaaacgaagacaaaacggtaaaaacagacaaggatggtaaggaaaaacgaagctttcgggcaccaggcgatgatgactggactttattgaaaaagaaaacagaaacggaaattgaaaaatcgcataatactgttgggcaattcatctataatagcttattgcaaaatccaaatcaaaaggttaaaggaaagttaattagaacaattgaacgtaagttttacaaagaagaactttttctgattttgcaaaagcaagtagaatttcatccagaattaaaaaatgtagatttgtataatgaatgtataaatgcattatatattcataatgaagggcataaaagcaacctatcaaaaaaaaattttgttaatctattcctggaggatattctattttatcagcgacctcttaaaagtaaaaaatcattaataagcaactgcccatttgaaaatagaacttatttttttgaaggagcaaaaaaatcagaaccaataaaatgcatttcaaaatcacatccattgtatcaagaatttagattatggcaatggattcaaaatttaaaaatatacactttaagcgaagattcaaatgtaacatctgaatttttaacttcagaagatgattatataaatctttttgatttcttaaacgaaaaaaaagaaattaaacaagaaactctgcttaaacatttcaaaatcaatgctaaaaaatatagatggaattttgtgcaagataaagcctacccttgtaatgaaactcattttatgataaagaatcgtttagaaaagttagtagaactgcctgccaattttttaactgttgaaattgaggaaaaactttggcatataatctactctgtaaatgataaaatagaatacgaaaaggctctaaaaacttttgcaaaaaataataagcttgacgaagatagcttttttgaaagtttcaaaaaatttccaccttttgcaaatgattatggagcctactctgcaaaagcaataaaaaaattacttccattaatgagaatgggaaaatattggaatttttcagcaattgataagaatactaaaattagaattgagaatattttaactggagaatttgatgaaaatattaaaaacagggtaagagaaaaagctataagactaaataacgaatcagacttcaaaggtttaatgctttggttagcaagttatatagtatataataggcattccgaaagcgaaaataatagtaagtggaattcagttaacgatttggagaactatttagaacaatttaaacaacattccttgcgaaacccaatagttgagcaagttgttactgaaactttaagagttgtaaaggacatatggaataaatatggtaatggagaaaaagatttcttcagcgaaatacatatagaattagggagagaaatgaaaaatccagctgacaaaagaaaacaaattgcggaaagtaatactttaaatgaaaatacaaatttacgaatcaaagccttactattagagatgttaaatgattcaaaagttgaaaatgttcgtccatattctcctatacaacaagaaatattaaagatttatgaagaaggagttttaaattctgatatcgatatacctgatgaaattgaaaaaataagtaaacttgcccaacccaacacttcagatcttgttcgctataaattatggctagaacaaaaatatcgttccccatacactggggcaattattccattgaataagctatttacgtctgcttttgagattgaacatataatacctcaaagtagattttttgacgatagttttagcaacaaagttatttgtgagacagccgtaaacaaggaaaagacaaatcagaccggttttgaatttataaaaaatcaccatggacaaattattgaaattggttcaggacaaaagacaagaatatttacagaagatgaataccaagatttcataaaacaacattatagtaagaatcgaagcaaaagaaataaacttttgatggaagatattccagaaaaaatgattgaaaggcaaatgaatgatacacgatacatcagtaaattcattatgcaacttttatccaatattgtaagagaagattcatctaaagacgatggcgtaaattcaataaatttattggcaaataatggacaaaccacatcaatccttaaaaatgattggggattaaatgatatttggaatgatttgattttaccacgatttgaaagactaaatgagataacaagttcagaaaaattcactacctacaacgaaaaattccaaaaatatttgccatgtgttccattggaactgcaaaaaggatttcaaaagaaacgcatagatcatcgtcatcatgccatggatgcactagttattgcatgtgctactcgtaatcatatcaattatttaaacaaccaaaatgcattggataaaaataaaaataaagttcaaaaacaaagtgctcgtgaagatttaagaaccattttgtgttttaaaaagtttaattatggctcggaaaaaaattatcaatggatttttaagcaaccttggaaaacatttgcagccgatgcaaaatataaattagaaactgcagtagtaagctttaagcaaaatgtgagggttataaataaatcaaaaaataaatacgaaaaatttgttaagagaaatggaatatggataaaagaaaaagtttaccaaactaaaggtgaaagttgggcaattagaaaatcaatgcacaaagatactgttgcaggtcatgtgaatttaagaaattgcaaaactgtaaatctttctaacgcaatcgataattgggaattattagttgataaaaatttaaaaactaagattaaaaaacttataaatgacggatttgataaaaagaaaataataaaattcttttcagaattagaattcaaatggatgaatgttgatattactaagcccgaacaatattattttagcgatgaaaaagaggtgttggtagcttcaagagtaaatttagattcatcatttaattcactaaaaataagtagcattactgatactggaattcagaaaattcttctaaaatatttggaaattaaacagaacaatcctgagattgcattctctcaagaaggaattgaagaaatgaatcaaaatctaagcaatttgaacaatgggaaaccacatcaacctattctaaaagtaagaaccttcgaacctaaaggaaacaaattttgcataggacaaaaaggaaataaaaaagataagtttgtagaagcggcaaaaggaacaaatctgttttttgcaatttataatgatgaaaatggaaaacgaagctacgatacaatacctttaaatattgtaattgaaagacaaaaacaaggcctctctccatgcccggaagtaaatgataaaggaaattctattgctttctatctgtcaccaaacgatttggtttatattgcaaaaagtgaagagatagaaaatcccaaaattattgattttcaaaatttaaaaaaagaacaattcggaagaatctataaggttgttagttttagtgggaatagactatatggaatttcatataatgttgctaaatcgatagttgataaagttgaatttacaatgatgaataagttagagttttcaattgataaatattcaattaagcaattctgcttaaaattaaaggtggatcgcttaggcaatatctcaatttaaattatgcagccacttcagcccgataccagctatcatattttcaaccatgccaatgggttcgagaatgtgtttcggcaggcggataactttcgttattttctggagaagtatcggttgcacatctcccctattgccgaaacttatgcctactgcttgatacccaaccattttcatttggtggtgcagatgtgcaaaagttcagagattgcgaacttgattagaaacaaaaataaaacatcttcgattttttcgatttcctcgatatcatcaaactttcccaaagttccacactttgggaaagttgaaatcgaaaaaattgataaaaccaaaatcagcaacaaacaaatagaattatttttatctaagcaatttgccaatttatttagctgctgtgcacagagcttcaacaagaaatataaaagaacaggctcattatttatcaaaaattttaaaagagagcctattttggataaagaatattttatgcaagctgttgcttttattcaccgcaatcctatccatcatcattttagaaacaattttgaagattgggaacatagctcatttacagaaattcttgatgggatttgtgatatcattgagcttgataaattgattaaaacctttggtggaatggaaatttttatagaaaaacatcagaaaagcttagcaatatttgaggatttagtttaaacgtaaattaatttgcaatgattaaacgaacactttattttggcaatccagcatatttatccgtaaaaaatgaccaattgtccattaaaaggatggatgaaaagttgaacaaggaaattattacaactgtcccaatagaagatattggaattattattattgacaatcagcaaattacatgcactcattcagtctttgaaaagctattggcaaataatgctgcagtcgtaacgtgcgactctactcatcatcctacagggctgctattacctcttagcggtaactccgtacaaacagaaagatacaaatatcaaattgaagccagtttacctttaaaaaagcaactttggcagcagactatagaaagaaaaattagaaaccaagcgatggtgttaaaaaagaggagaaatatggaagttaataatatgcttttctgggctgatagcgtaaaaagtggagattcacaaaaccacgaagcaagagcagcggccttttattggcaaaaccttttgcccgaggtcgatgactttacacgcgaaaggtatggcgattatccaaataatttcttaaattatggatatgccattttaagagcaactatggcaagagctttgatctccagcggattgctaccaactttcggcatttttcacaaaaatagatataacgcttattgcttagccgatgacattatggagccatatagaccttacgttgatagaatagttttagaaataatggacgaatttccaaatcaatttgaaataaataaaaatattaaagccaagctattacaaattcctgttattgatatttttatctctggtcaaagaagccctttgatggtaggcatttcacaaactaccgccagccttcaaaaatgtttcgaaagtggtttgcgtaagatagtttatcctgaattacagtagattatacaatgaaatacaaaaatcatgaatttagaaaaattaaatgcttatagaattatgtggataatggtattttttgatttgcctacagaaacgaaaaaagaacgtagggcagcagcaaagtttagaaaggatatgataaaggatggttttattatgtttcaattttccatttatatgcgtcattgtccaagccgtgaaaataatgaagcacatattagaagagtgaaatccatgcttcccgaattaggacacattggaatacttaccataaccgataaacaattcggcgatatggaactctttaacagtggtaaagaaaaactattgccaaaaccaacaggtcaattagaaatgttttaaaaattaaaaagctcaccaatgttgatgagctttatgctttttgaatatcatttttgatttctaataattgacttatattacaatatatcagcattttatagcatggtatgttgataatcaataagacaaagatacaatttgaaaccaattcacaaccgatatcaagctcaacatcaagaggaattggttgataatcaataagacaaagatacaatttgaaaccaattcacaacaaatcaatcagggatagtaatttggcaggagttgataatcaataagacaaagatacaatttgaaaccaattcacaacttggtgttagcaaatcgttggattttcgtggttgataatcaataagacaaagatacaatttgaaaccaattcacaaccactttttggctggaactcttgaagattatgttgataatcaataagacaaagatacaatttgaaaccaattcacaacatagccttcgcgataaagttgacccgccgcgttgataatcaataagacaaagatacaatttgaaaccaattcacaaccctttaccatggttcaaaaataagccgaaagttgataatcaataagacaaagatacaatttgaaaccaattcacaacaaccagtggcataatcgctgttaatataagttgataatcaataagacaaagatacaatttgaaaccaattcacaacgagacaaaattagataatttggtagaaaaagttgataatcaataagacaaagatacaatttgaaaccaattcacaacagcccttttgctatttatactattcaaaaagttgataatcaataagacaaagatacaatttgaaaccaattcacaactctcatcgttttccttatcggtggaatttagttgataatcaataagacaaagatacaatttgaaaccaattcacaactcgaataagccttgcaattgcatttatcacgttgataatcaataagacaaagatacaatttgaaaccaattcacaactacatagccacggactttgattcagcagctgttgataatcaataagacaaagatacaatttgaaaccaattcacaacaaccgcccagttgctaataaataggactctgagcggtgcgcagcacccagtgaggagtacatgttgaactacatccgcttcatgcgctgccgtttgaaaaatcttctatgtactttacgagtggtttgcttattaatttggagggagtgctgagaaatacagattgaattttagccttcagaccttgagatttagatgtttcaatatctttaactatcttattagtaaatatttccatcaaaaacgggccttttaggccgtaaaaacccaagcctcatgaagatgaagcattcaattggga

SEQ ID NO: 1305 - DNA, 17780 bp, synthetic construct
  misc_feature 1..17780: note = Synthetic
  source 1..17780: mol_type = other DNA
ttttctccgtcggggtattctatggtgtttattctgccccacctgtcgtaattccagagtgtttccaaattgatggtgtggctgctgtatggttgcacgagggtgtggcgttcatggtcgatgttgcccatgcggtcatacctctgctccttgatgccgcttgcgtcttgtatcttgattactctcccgcttgcattgccgtctgtggggctgccgtattcgtaatggctgtcgttccaatatctctcgctgtatgttttgcttgtcaattggtcgtagttgtatttgtagctgatgtgttcgccttggcttgtttctatgtcggtgatgtgtccggcagggtcggtgattgctgtcggttgttgtttgttagacatcctcttattaccaccactttttgattttgatataagctttatcttcaaaattcatttttttgaagatatagaagtctttatatttagacacatcacagagctcatccaaatcaactttattatcatttcttaaatcaaataactcttttgtgagactcaaataatacttattcccttgcttcgtgatagctgcttcatatagtctgtaatcatacctgacaatagccttacctgtactcttatcataatgatgaaatttccacaatgtaggtacatctttcaatttgatttcggtaatcttgtttgttttgtagttgtagatatatggcaactcctcaaaatcgccatgattactgacaagaaaacccgtaacaagcaacacttcatcgtcagaaaacggaaacatatagccttcaaatttatccgatggttttcgtaactttgttgtttttcctgtcaaaacagaataatgacataaataagatatcgtatcgatataaatcaagtcttgattattatgaattatatattcacttttgagttcaatcaatttcaaatccctgatgcgattaaatatcggtattctgctaccattatatttggtcgcattatcaaacggatattcggagcaatagtactgccgtgtcttataatcgtagaaatatagagtatcatcatcaattcccatatataatctggaataaacgtcacttctcagattaaaactgtccaacattcgtatcgtattatcctctgcattatagagacatatcaaatcctttctaccaggcatagaagtctctaatgtacatatacagaacttttcattagagtacggattgatttttgtctcaactcttaaggaataactatttgatatatttatctttttagcctcctcgaaatcagcattgctctgagctttgcattctatatatccatttccaatcatggaaacaaggataagtgtcatcaattttttcatctattattctctccaatgtgttctattgaatatacccaatgtggcttttgtggtaaattatacccgtttggtaaatctatcaaccctcgatacaacatcgtaatgactttaaacctgttttgcttctttttctttttcattttgggaaagtaaaaactgttattaccccaacattcttcatttttctctttatctattggtatcaatttgttctttctaatcaaaagaggaaattcttctaaatagacatgctcttgccaaacatcattatcaagtattttgattttataataccgtttcggaagctctttgccaattctaaacctgtaactatatacactatatttaattacaatcaagtctcccttgtagaaaaagttagagcctaaaaagacttctgttgggtcatcacaattctgaattccaacccactcatctatttgataatagcgttctccttcaactctataatgcttaatgatgtatcttgatgtgcaattgctattaagcggttcttgctctgaacattctataagttcatatttccttttacaaaccgaattcaaaaacaaggtatccccaattctatggtagtgaccaatgtcataaaagatgtttggtgaacacgtcggcatttcatagaatgaaatagaatatgttgaatcgttcttgattaccaattcgccaaagtcaccttccccataataatattcttgtgcattactgctatcaggaaataagatgaaagccatcacagtggctgtaactatttgagctattctcattatggcttttctttgttgttttactctgcaaagtaaaacgaaattattgaaactgccaaattttcttttgtttttctctttcatagtgcgaatctatcaatttttctatctcaatttgcatcaccaaatagcgaatttatgcgtttatgccattgcttccttgattgcaatacaatacaaaattataagagtttgctatattttttcgcgtttcggagtattttcaatcgaaatgttgtttttcatatagtgaaatagcctctcacatcaaaaaaaacaacatttcattacttccgaataagtatcggataaaacaagacctcatttctttatggcaaatgaatgataatctttatctttgcaaacttaatatggatagtattggagatgataacaagtgcgattaaaaaaggaatattgttttatgccgaagtattgcttttatgctgtggtctgcttgcacagaataaaagcctgcattgccgcgagctgtttgaaacggctaaaaagttctactcggaaaaagggcaatatgaaagcagggaacaattcgaggaggtattcgactgtgatgacgaaaccgtcaggcgggaggcactgaattggttggttgaacatagcacaggcgttttcaacgtaaacggtgttaagttcaaaatggtgaaagtggaaggcggaacatttctgatgggtgctacgataaaacaagataaatatgctgacaacgatgaaaagcctgttcaccatgttacactttcggattacttcattgggcaaacagaagtaacacaagaactttggcaggcggtaatgggtaacaacccttcgttcttcaaatgcagaaattgccctgtggaacaaataagttgggaagattgtcaggcatttctcggcaaattaagagaattgaccggtttgccgtttcgcttacccaccgaagcagagtgggaatatgcagcaagaggtggtaacaaaagccggaattacaaatatagcggaagcaataaaatcgaagaagtggcatggtgcgaagccaacagcaacaacagaactcacaaagtcgggacaaaagttgcgaatgaactcggattatatgatatgaacggcaatgtggcagaatggtgcaacgattggtatggagaatatcgggattttccacagatgaacccgaaaggtacagaaggaaaagagcaacgagtttacagagggcgtgcatggaattacacgggagaaagcatgcgcatatctcatcgaaattgcgattatcccaagcaagcaagtttcaacataggttttcgccttgctctctgattgcattcatcggcagcttgataagtcagccgaatttactccggcgacaaatcgggaaaacaaaaagcctctctcattcagatgacataagtagtgaggaaaaagaaatcaggatttgatgaagaaaaatttgctttggtgagaaatttgctgtatttttgcagacggatacttatatacggtttcgcagaatgaaagggtataaaaatataacttacgttttggcattgcttgcgatgatgttgatttcgcaaagcggtgtcgatgtatccacacgtggctgcaaatcttaccttttcaagacttcgttgacttctttcggcaaagccaagccatacggcaagctattcaacgccaaaaagtgcgaaacgagaaacaatatcgaaatagctctttcggaaagcaggtataaggtcagcaatcatcaagaggtgtttgactttaatccgccttacgatttagagtttcacaaaacgaggatattgaacgagcgtcttcagagcatgaaggcgggcttgttactcaccaaaaacctttatcaattacaagtgttactgatataaaagaatatctgccaaaggcggctttggcttttgtccgatattcttttgtttttaacactctcttgtgtcggttttgtgtaattctttgttttaacaccactaaaatttcaagagactacacaagagcaaattgggacgaaaaaaattttcatcgaataaatttgatggtttgataatatcaaggctcggtgcattcaaaaagtgttcgagccttttctcttacctctttatctgctatacttccaaggcttggattagttttctgcggtaagactgtgccgcaggcgtgctttgcagagcaagttgtgcggcaaattcatgcaattcgttttttatccaaccctctttttctttgtagaacaacataagttcgcagcacatctgctttacggagatacgcacattcgggttgatgatgaaagaaaagcaggcttctataagtttgtcgggatttatggaaagtaacattgtggagagtgtttcatgaagtatccctcgcttttgttgtcgcaaaagacgagatagcaacttggcatacgccctcatgctactttgattttgtatttcggtgaagtttcctaccaactcttcaatgaataactccgcataatcaggtattctctcacatagcttttccaaaatccaagcagcatgaaagcccgttttgtcagttctttccatacttacttcatacagacagacgaccgacaattcgccttcttttatccttcttatgaaacgctctattgcagcaatgcccatcgaacagtcaagctccttgatgagactttccttttcggttttactcattttcagaaagcatatcttgctccaataatgcctacgaagcgttgtgcagggtagttgtagtaattgtaatagcgttggaacgcaagattattcaattccgtgaagaaagtccattggtcggagtatttataagaagcattaaggttcaaatcgaaacgagatttcaatttgacgacttcccttttctcattcaagcatttgacagaacttgcaaaagtcggtatcaaggctactgtcaatttatccaccgaatattcgacagatattccggttttgaagttcggaacataccatgctttttccaaatcctcggttttcatgttttggaaagaagcattggctttcaaggtgatgtctttcagtttataatcgaaacgaaaatctacataaagtcgcttagcattgtcgtgtacgatggaaaacatattgttgagagttgcattggtgtcaagagtatagaaatacttgtcttgaagcgaagcaaatcctaattccaactctgcatgcaggttgttcgaaccgctgtatgaggctttggcaaaaaggcttatggtactctgcaatttcgtttgcaccaaaggcgaaatatatgggttttccctcaccatggcattgagtgtaggaagttctgtttcggacttcaatccgccttccacacctatatgttccgtcagattaggcaaggatacgactatgtcgggaagaaaataaaactttccatgatttccgaaacatggagcgagggataaagctgtgtgaatgttgaattgctttatcatgaaatccatgtaagcatttatatcgacaaccccttgtctgtttttgtaatcttcaagacgtaattccggattaaagaacggcgtaaggtcttttgcggaatatgaaccgacaatctgattataatttacctgcaatccgaggtactgtgtttgattgttgaaaagtgaaagttcttttctgactcctgccacgagatttatatccgtttctccataaccccatttacctgaagtatgcttgaaagcaaaggaagcgaaattatgcagcatgctttcatctctgtacagacttcgatagttgagacgtgttcctattgtgtgatatgtggtgcgataatcgctctttgtcttgtctatcgtatcggaaaaaccgtaataatagtacctttgatgttcgtaaaagatgtctgcgtccaaggaaaagctctcccatatcttttttgcatacaaatgcaggtcgttttccgcatacgtggagtgtgcataatcctttatctgaccgagagatgacctatgcttgaaatccgcactgtaaaccaaatccttggaacgtgtttgcgagtatgaggcttccaaaagagaggtaaaataagtgcctatgcctgctttaatatgagcattgtacaacttctcagcccgttcgtctttcacgtttgcaggctttatcttatcgaaagtcatgaatgtggggaattgtttgcctgttttatcgtatttgaatgccggaagttcgaacgtggagtcgaatacgcttggcttactcgtcagtttgtacgcttcattcaccacaggagagaacgtactctttataacgacgctttcgttatactcatctttttttggttgttgggcttttgcactcatgcccaacaaacagaaaaccatgatggcggatatatactttttcatgtaccgatttctttttgtgtttgtttcttttattgctcttgttcctctattatgacctcatcgactgccgcattatgttccatgcgtttggtttcattttccttacgcgtcttgtcctgctcttcggtcagttgaagaagtttttgttttgctgtctcgatcagttcttcatctccatcgtaattatcgactatgctttgcaatgtctgctttgcctgcaaaacattgcccttgcttttgaatatgtctgcccaaagcacaaacgtttttgccaaccagtattcgcttgacgggtttgcgttgatttggtgtatcatcttctctgcaccatcagtgtctcctgcaagaaaactcaactcagccaaggtgtattgagcctctccggcatattcgggattttttgcatggctcaaacgtttcagttctacaatcgcttgtccgctgttacggtttgcaagcaaagattttgccaaaatatacgttgctctttcctttacggtctcatctaccttttcaagagaaagcagtttattggcatacattgttgcagaatcgaatttgcttaaatggaaacaacattgcatttgtccgtccgatgccaagagtttatgcgtacttacttccgctatcgcctccagacgattgtactgctgttctgctttctcgtaattcttggcttccaaattcaattcagctgctttaagcaaggatttttcggtgaacacattcttgggattttctatcactgcttcgtaatgcttcaaggcctccgtctttctgcccgacttgttcaaacaatctgcgaggtagtaatccgcattcacaaagaagattcccttcgggtatttgctcaaatactgctcgaaacctatgattgcattcgcacaatctccttccatatacaaattctccgccgcctgataacttatggaatccctatcccctgccgatactctcgctgtcggtaatttctcggtgtaagccaagtaatcattgaccttattggctgagacatatatcgccttgatatttgccaaagccgcacgcgcttcctcactttccggatatgtcctgaccaatttatccaaatagtccaatgctttggcatcttcgccgagtttgtaatgaatcatacctatctttgcatagcaatccttcacgtgaagcgactgcgggtataaggttatgacgttttgataagtgtccatggctttgcggttttcctccaaagtgagataggtatttgcaagttcgtattttattgttgccgcatagtttcctttgctgtaattctcatacgctcgctccaaaacctcttttttacgttcgtaattgcccaatgcaccgtatgccatggctgtctgataggacgcatagtctgcatcgggatgttgtttctctacaatctttccgtactgctctatcgccgaatcgaaatccttacacatatacaaacaatcggcatatcgcaacacggcatcctcgctttgcttggcatcgagtttgtcgattgttctttggaaatagctctttgccgtggaatatttcttttgtttgaaaagattataacccatggtataatcggcttgggcgagatacgggcttttcgctgcacctgccgaagcatagaaggcattgaggttctgcacggacaaatcatattctcccatttggtagtaagcctcggctttcatatagtacgcagtggccgtaagtacattatcatgtgcctgagacaacgatttatccaagtaaatcaacgcatcctctgccctaccctcgttgaacacttctattgcacggttcaagcacaatcgctgataagccttgtttgcagacaggctgcgttcagacatttgctccaacatctcaaccgcatcgcgataattcttcatgtttccgtacaactgtgcaagatactcctttgcctcatcggctttgtcggagttcgggaacatgtccgcaaacgcttggaaagccttgacagactcgttatacgccggagcggtttcgtaggaaacctttgcgtaattcaacaaagccttctcttgaacagccttatcgaaatccatctcccaagcctccttgaacatggcttgtgcattctgcttttctcccaattcaaggcagcatattcccaaatgatagaaagcgttttgagccaaagagtccctgttatccgtcgctttcaaaagataaggcttcgccttggcatattccttctcctccaaaagggtataacccaaaagataataatcctgagcatcggcactctcttgctgtaccgccttttccaaataaggaattgcttccttgtaccgtcccaatttgtaataagcatcgcccaacatgcgattcaactctccgcttcgtttggattgggatttttccgaaaggctcggagcaatctctatcaactcctcataatttccacgatagtagtaaatctgggcaatataataaggtacaatctttccgaagttcttatcctgctgcaagtcgaggaattctttcaatgcaggctcatactgctgctgttcatacattatgtgagcgtgaaaatagcttgccgaagccgcatacctgcttttagcctccctaaccttatccaattccgtcacggcctcatcataattaccattcaagaacagacaatgaccatatttgtaatgatactcataccaactctccccttcaagagccaaagcattcattccgcgatatacagccaaagcctgctcgaactttttggcatcggaatagaaatccgccaaaagaaaagatgccttattcaagtacggagattgcggatactgcctgatgaagtcggaaagcaagacatcggcatctgcattcgtcaaagcgtgagaagctgccgcacgatagaaaaaagcctgctccgagaaaggattatcctcctgcggataacgggaaagaaagtccgaaaagccctccaatgacgaagaataattgccgctcatatagttatcgtatgccgccttgtagtcggaaacacaacgttcgttcatgattaccttttgagaataagcacaaaaggcaaacaaaacaatgcttgcgaaacaatagaaaccacctgaaagtatcctcatgataatgtagattttgattttgctaaattaactccgaaacacggcttgaaagtatatcctccctcctttttatcaaccatggaatgtttacaacgaaatcagaagcacgggaaacaaacaataatgcgataaaacaaacctctaagttctccattccgaaaggcaaaaagctggctggaaagcaagacatcaaaacagcgaaaaagcaaaccccgattcattgaaattaaaccgccgaaagaatttcgcgaaacgccgattcgattttttctttcggcgtttcatttcaacaaaacaccgttttgcagaaagacaaagaagcaagataaattcatgtcaaccatttggagacatgaataaggcaaacaaaaatgtgtttctatgcaatgattccacaagaagagaaagccctccgaacaaaaaagcgacgatttcgcaaaacgaaaccgccactcttaatgttttcacaacggaataatccttattgtgaattgcttcaaattagtgctgcaaagatacgatttttctcgaaaccgcacaaacttttcaaagatttttgtacctttggctgcaaaaagaagaaaatcatacaacagatgaagaaaatactaggtttggatttaggcacaaacagcataggctgggcagtggtaaatgaagcagaaacagcagatggcgaaaagaaacttgtaggaattgaatgtgcaggaagcaggataattcctatggatggtagcataataggtgattttgagaaagggaactccaaatcacaatcagcaacaagaacagcatatagaggaacacggagactattagagcgacatcttctcagaagagaacgattgaacagggtcttgaatatcatgggctttctcccttctcattattccaaaatgcttacacggtacggaaaatttatagagaacaccgagccaaaattaccttgggatgatggtaaatttctattcatgtcatcgtttgaagaaatgtgtgaattattcagagcatccaccaacaatccggaaataaaagtaccatatgattggacaatatattacctccgcaagaaagcgttgtatgcagccttgacaaaagaggaattagcttgggtacttttaaactttaacaagaaaagaggttattatcagctaagaggagaagaaacagaatctaagaatcaaagaatagaatactgttgtctgaatgttgtgaaagtagaaaaaggcgaagacgcaaaagatggaacatggtatagtgtttacttggataacggtatgatttatcgccgaaagagtaaatacccattggattgggaaggaaaatccaaggaatttataatcacaacagaccttgacgaaaatggaaatgaaagaaaagacaaagaaggaaatgtaaaacgctcatttagatctcctaaagaagatgattggaccttattaaaagccaaaacagatgccgacatcttacaaagtaaaaagaccgttggttgttatatttttgacgcattgttacaaaatccaagtcaaaagatagtaggtaaattggttcgtgtcatcgaaagaaaattctataaagatgagttgagacaaatacttgacaagcaaaaagaattcatttccgaactgaacagcaaacaacttctcgaaagatgcgctcaagaattatacacagtaaatgagcagcatagggatattgtatctcaaagagatttcacctcattgtttattgatgacattatattctatcagcgacctttaaagagtaagaaatctcttatagccaactgccaatatgagtatcactcttataagaaacttgataaaaatggaaaatacatcaaagatgaaaatggaaacgacttattgttcaattccccattgaaatgcattgcaaaatccaatccattatttcaagagtttcgcttatggcaatttatcagcaacttacgaatttatcaaaaggaaaaatatgatggcaataaacttcatacggacgttgacataacaacacagttccttaaaactgaagaggagataaccgccctatttgattggttgaacacactgcaaagcatagatcaaaagaagtttctgcaatatccaccattcaaattaaaaaaagaggcaagcaaatatcgctggaattatattgaagacaaacaatatccttgcaacgaaacaaggtacactattttgagcggattgaaaaacgctggtataacagatactttgaaccaagaggatgaaaatgctctttggcatatactatattctatcagcgacaaaaatgaattgaagtctgctttgacaaaattcgcaaataaacactcccttgcaatggaatttgtcgaggtattttcaaaagtaaaacctttcaacaaagaatatggttcttactcagaaaaagccataaagaaactactcccgctgatgagagttggtaagtattggagcaaagacaccattcacgaagagaccgtacgaagaatagataaactattaacgggagagtttgacgagacaatcaaaaacaaaattagagaaaaaaccatcaacttaaagagaatagaggactttaaaggattacctatatggctggcatgctatgtagtttatggtaggcattcagaaacaaaagatatcactaaatgggaaacaccggaagatatagacaactacctaaaaaaattcaagcaacactcattgagaaaccctattgttgagcaagttgttacagaaacactacgaactgttcgagacatatggaagcaagtcggacacatagatgaaatacatttggaattaggtagagaaatcaagaaaacagccgaagaaagaaagagactcagcgatacaattatcgaaaatgaaaacactaatctacgaatagaacagatactatccgagcttgcagaggacggtatcaaacaaataagaccttattctccatctcaaaaagagattatgaagatatacgaaagctatgctttaaacaatgataaaaaagacgaaggtaagacattaagcaaaagcagtatttccaagtacaaagcatggcttgaacaaaaatatcaatcaccatacactggcgaaacaattcctttatcacaactttttacccctgcatacgaaatagaacatatcataccacaatcaagatacttcgacgattctttctcgaacaaagttatttgtgaatcggaagtgaacaaattaaaggataacatgctcggatatgaatttatagagcaacatggaggggagattgttacactcaacggtggcaaaactgtaagaatatttaccacggaacagtatgaaaagtttgtttctgaacattatagtggaagtaaaaagaaaaaactattgatggcagacattccggatgagtttattgaacgacaactcaacgatagtcgctacataagcaaacatataaaaggattattgtccaatattgtcagagaaaaagatgcaaatggagaatatgaacaagaggctgtatcaagaaatctaatctcttgcacaggacaaataaccgacactctaaaaaaagattggggaatgaatgatgtatggaatcgaataatctttccccgcttcgaacgtctcaacacattgacagacacgactgatttcacaacaaagaataccgaaggacacgacatccctaccattccttttgaaattaaaaaaggtttcaacaagaaaagaatagaccatagacaccatgctatggatgcaattgtcatagcttgtgcaactcgtaatcatatcaatctattgaataatgaagcagcacactccaaatatagctcaactcgctatcaactttcatacaaactgcgaaaacgagagaaatatcagaaaaatggagaagaacgggaaacgttcaaggagtttttcaaaccatgggatacatttacggaagatgcctatgaagtcttacaaaatatagtggtaagtttcaaacaaaatctgcgagtgattaacaagacaacaaacgtgtttgagcattacaacaatgaaagaaagaaagaattaagacaccaaaagcaaggtgatagttgggcaataagaaaagctcttcataaagaaacagtatttggcgaagtcaatcttagaaaacgtaagacagttagtttattgtcagcaatacagacaccatcttacatagttgataaagaactcaagaaaaaagtttttgaattgattaccgcaggaatgcaaaacaaagacatcaagaagtatttttcagagaatacagatacatggcaagatgaaataaaggacgataaggttgaagtttattatttcaccaaagaaacaaatgatagatattttgcaactcgaacaacattggacaccagctttgacgacaaaaaaattgatagtattacagatacagggattcaaaagattttgcgaaaacatctacattctgataagcatcaaggagatccccaaatagcattctcgccagatggcatagaagatttgaacaagaatatacaaacactgaatagaggcaaagctcacaagccaatttatcgagttaggatatatgagaaagcagataaattcgctgttggagaacacggaaataaatcaaaaaaatttgttgaagctgcaaaaggtacaaatctattctttgcaatttatgagacaaacgacaagaacggacaactttgtcgtaaatatgcaactataccgttgaatgatgtaattaattgccagaaagaatatcaaaagaattggcaagcagagataacaacaatactcaaaaaacgaggtgatattgacaataactccatgttgctctttattctttcgccaaatgatttggtttatctaccaaacaaagaagagcaagaaaacagaatataccactttaacaaagaaagaatatacaaattcgtgagttgtagtggaaataaggcagatttcataccagcatattctgctaatacaatattttccatgacaaaaaagaagcaaaaagagatttttaaagatgaaaaccacttccctattcaagacgaatatggtgtaggaagtccaaaatcaaaaaatgagagagcaattacaggagagatgattaaggaaatctgtattcccataaaagtcgatagacttggcaacatagttggaataaaacaaaataagccatgattaaacggacattgtgtttttcaaatcccgcatatctgtcagtaaagaacaagcagttggttataaaactgccggaagttgagactaatgatacactgccagatagcttcaagaagaatactgttaccacaataccgatagaagacataggaatagtagtgttggataatcagaggataaccattactcagggtgttctggaacaattattggagaacaactgtgccgtgataacctgcgaccaaagccatctgccgataggcatgcacctaccattgaacggaaatagcacacagaccgaaagaatgagataccagattgaagcctctttaccattaaagaaacagctttggcaacaaaccatcattgccaagattcaaaaccaagctgcaaatctcaaacaaatcagagaaacagaagtacgcaacatgctcaaatgggcagcagatgtcaaaagtggcgatagtgataatatggaagcaagagcagctgtttattactggcagaacgctttccccaccatatcgaacttcgtacgcacaagggaaggcattgctccgaataacttactaaattatggctatgcaatactcagagcaatagtagcacgtgcattggtatcgagtggtttgctgccgaccctcggcatacatcaccgaaacaaatacaatgcctattgtcttgcagacgatattatggagccatacagaccgtatgtcgataaattagtcatggaattatttgatcaaaaccgagactgcgaaactctaaataaaaagttaaagtcgcaattacttcaaatacctgtaatagatgtgatcatcaattcccaacgcagccctctgatgatagctgtcagcaccaccactgcttcattacaaaaatgttactccggagaagctcgtaaaattatttaccccgtcatgtagcatgcaacgtttcagcgagtacagaatcatgtgggtaatggtactttttgatttgccgacagaaacaaagaaagatagaactgcggcaaccaagtttcggaaagcactcttggaagacggctttaccatgttccaattctcaatctatgtgaggcactgcccaagtcgtgaaaatgctgacgtgcacatcaaacgagtaaaaaactccctgccggaacatggaaaagtgggaattttttgcatcacagataaacaattcggcgaaattgaaatctactattgtcgcaaaccggaacatacaaaaggctgtacacaacagttggaactattctaaaacctttgttttttcttttctaattaccagtataaacaactgaatccgaggaaatttcccggattcggttgttcgtgcactgcaaagatactaatttgaaagcaattcacaacaaaggtgaaatgtctatagatagaagtttgttgttcgtgcactgcaaagatactaatttgaaagcaattcacaaccctttataccccttttctgcaaaaaagatgttgttcgtgcactgcaaagatactaatttgaaagcaattcacaacgccaagagagcggaattgcaatccaagcgtgttgttcgtgcactgcaaagatactaatttgaaagcaattcacaacaaacgacgcatcatcgttgccatgcttgatgttgttcgtgcactgcaaagatactaatttgaaagcaattcacaacgaaggcgttgttccaagacaacgtaacttgttgttcgtgcactgcaaagatactaatttgaaagcaattcacaacattgggcgtaaacacagatgaaagaaacgggttgttcgtgcactgcaaagatactaatttgaaagcaattcacaacctgttctactatttgaatttttaatttttcgttgttcgtgcactgcaaagatactaatttgaaagcaattcacaacgtttgagtataatatgtacccacttgcattgttgttcgtgcactgcaaagatactaatttgaaagcaattcacaacaagaattgttttgttaattcataatctgttgttgttcgtgcactgcaaagatactaatttgaaagcaattcacaactaatatgaagtctattagctgtatcactgttgttcgtgcactgcaaagatactaatttgaaagcaattcacaacagttcaggataccgttctgttacatctgctgttgttcgtgcactgcaaagatactaatttgaaagcaattcacaacagaattggttagattcaaaatcatgtaaaggttgttcgtgcactgcaaagatactaatttgaaagcaattcacaacggcgaagcaaaccgctcttatatggtctgcgttgttcgtgcactgcaaagatactaatttgaaagcaattcacaactaaggtcaatcaggtactacgatgcataccgttgttcgtgcactgcaaagatactaatttgaaagcaattcacaactgatatgcaacctatccgtatatacccaacgttgttcgtgcactgcaaagatactaatttgaaagcaattcacaacttcaattcgtctataaggttcttcgctcctgttgttcgtgcactgcaaagatactaatttgaaagcaattcacaacttgaaaatcgttcctatattgctattggcaagttgttcgtgcactgcaaagatactaatttgaaagcaattcacaacacaataacgaactcaatgttcaagcccagcgttgttcgtgcactgcaaagatactaatttgaaagcaattcacaacttctatttacaacggtcattatcgtaacaagttgttcgtgcactgcaaagatactaatttgaaagcaattcacaaccgtcattaactcaaaactaattgctttatggttgttcgtgcactgcaaagatactaatttgaaagcaattcacaacaataatggtaaacgaaattgttggtgctgggttgttcgtgcactgcaaagatactaatttgaaagcaattcacaacggtcaacaa

SEQ ID NO: 1306 - DNA, 17730 bp, synthetic construct
  source 1..17730: mol_type = other DNA
  misc_feature 1..17730: note = Synthetic
tttccggatgaacaattgagtaactttaaaaagtacaatgtgcttgttgaaagtgagacgattacgttttataaaagtaatatgacaaaccggtggtggatggaaattaacttgaagataaataataatttaaccagaagaacgttagtaccatgtagctataaggattatttgtctgctattgataaagagatccctgagcgttggtatgtgaataggaaaaagattaattattgatgttttaatgaaaaaaaaattcactttaggtgtaatttaatatacaattatacgtttacaatttttagaaatagattttagattatgagaaaaacaatcttgttagttctgattttaataatagctattggctgtcgtacgggaggtaaaggtgtaagagacaaaggagatttggtggtcaatcgtacaaaaaccaagtggcgtgcagaaacgcccacaggtatggtatttattcccggaggaacctttactatggggaaacaggatgaagatcagtccggtacactcaatacacctgccagaacagtgactgtacgtccgttttatatggatgaaacagaaatcaccaacggcgagtataaaaagtttgtacactgggtaagagactcaatcgtacgtacaaagttggcattgttcgcagagtacactgatgatcccgcaaacgggcctttaggagcttatactttccaggatacggtagatacagacaatatgtatatcaagtacatgcttgagaattacggtactttgggtgatattaattctcctactatgggacgttttctcaaatgggatgaagatcttgtgtggaatccggcagattttccaagtatggaatatgcggaagtcatggattctatgtatttacctttagaagagtgttttgacggacgacgtatgatagacgtgagaaaactcaaatatgagtacgtttggttggatcgtgaaacagcagcgagaaaacaaagtaccagaagcgaacaaatgcacagaaaaatagttgaagtatatcctgatacaactgtatgggtcaaagactttaattattcatacaatgacccgatgcaccaagattatttttggcatcctgcttatacagattacccggtagtaggtgtaaactggcatcaggccaatgccttttctaactggcgtaccaaatataaaaatgactatatagcttctctaccggccaaaaagaaagcttctcgtgtatcgagtttccgtttacctttagagtcagagtgggagtatgctgcaaggggtggtattgaatttggaaaatatccctggggtggtatttacacgaccagtgatcagggctgtttcttagccaactttaaaccggctcgtggggattatgctgttgatggcgcattatacaccatggaagcaaaatcctacaataaaaatggttatggtttgtacaatatggcaggtaatgttgcagagtggacaaaaacagcgtataacgaaggcacttattactttgcttctaccatgaatcccaatgtggaagattcaggtaatggtcttaaaatagtacgtggcggttcatggaaggatatagcttacttcctggaagtgagttccagagattttgaatacgcagatactgcacgttcctatatagggttcagaactgttcaggactatttgggaactgatatgaaaggtaaataatcaaataaaaaataattaacccatttaaaatataatagaaatcacatggcacaatcaaaattacagaagaaattttttcacgtagcatacagtttgggagctgcagttgttatacttggagcattaggtaaaatccaacatatgtctatctttggtattccggcaggtttggtattaaccattggacttattgtagaagcaatagtatttaccatttcggcttttgaacccgtaaatgaagatctcgattggtcaaaagtttacccggaattagcaggaggaaaatccaaaagaaaaacaacagttacagatgctgaaactcaggaagctaaatccatgctgtcagaaaaattggataaaatgcttaaagaagccaagcttgatgtcggattgatgcagagtttgaccggtagcatacaaaacttcaaaggtgcagcagacaacattaaaccggcagtagattctattgctgcgaccaataaatacagtgaacaactatcgttggctgcttctcaaatggaatcgttgaacagcttgtataaagtgcaattggaatcgactaaccgtcaggcagaggtcaatgaacaaattgctcaaaaagcggctcagctgaaaacgcagatggaatccatgactgccaatttagagaatctaaacaatgtctatggcggaatgttatcggcaatgaccagaaaatagaatattaccaaatgaaattattaatcataaaaacactttttaactaatggcaggcggtaatttatcaccaaggcagaaaatgattaacttgatgtaccttgtattcattgctatgttagcgatgaacatgagtaaacaggtattatctgcatttgggtatatgaaagaaagttttgcagattccagtgaaagattggacaatgcaaacaacgggattttgagtagtcttgaagcaaaagctgaagaaagtcccggacgatataaggttaaatatcaaaatgctcaacaaatcaaaacggtatctgatgagttttttaactatatagctaccgtaaaatctgagttgactaaaaatgtaaaggatactaatgattacgaatctatggacaaggaagatgaaggtgatgattatttctttagtaaagatgagaaatattctacagaaggtcaggcatttgtcgataggatcaatggttataaggatgaagtcattaagattttaggagactctattaatcccggtctgaaagcacagatagaagagcgtttcagtacacctgtacaaaaagctgataacggtagggatcaggattggttggtcaatcgctataaaggttttcctttggtaactactttggcaaatcttgaaaagatgcaagctgacgtcagaaccactgaaggtgaaattttcaattcactactcggtggtgctttgattgacgaaactaaaatgactaattacaaagctatagtggctttggataaaacggcttacttttcaggtgaacaagttaccggaagtatagttttaggaaaatatgataaatccatgactatcgatggttttgaatctaatgtaggtggtaagaaagaagccggacaggtactgttaaactttaaagccggtaatcccggtgaacatcctatcaaaggttcttttgtgtttaatcaaaaagagggtgatcctatcagattggaattcgacagtaaatatacagttatcacagaacccagtgatgcggtgatttctgcagataagatgaatgtggtttatcgtggtttacaaaacccattgtctatttctgttccaggtgtaggtgatgctaatgtcaaggtgagttcatctcaaaatatccgtaaagtaagtgccggtaaatatgtgatgacaccttcttctggaagtgaagtcaatattaacgtaagtgctaaattatcaagtggtaagacggttaatacgactaaaaagttcagaataaaagacgtacccgcacctatgggagctttgagaaaagaaaccggaaaaacaagtatgcctaaagagagtttgaagcgggcagctgtagaagttatgttaccagattttgtctttgacttaacgtttgccgtcacaggtttttctgtaaaagtacccggtcaacctacggttgttgtcaatggccccagaatgaatgccagagcaaaagccgccatagataaagccagtagaggtgatcaagtgaacatatttgatatcaaatcaaaaatcgtaggtgaaggctcaggccttagagtaaaaaaagcttcggctgttttagttgaaattaaataattacaaattatgaacaagatacaattaatgtttgtggctgcattgcttctgttcacagaagcaaccatggcacaattcaatatattaaacgctaaaacgcctcaggaaataggtcaaaaaacgcctgaacaagaggcagccggcggcgataaaccgttagattacggttatgtggaagatcgtgatatattttggaagaaagtcgtttgggaatatgtggatcttaacgagcgtatgaatttaccattgtattatccgatcaaaaataccaaccccagcagaaaatctctttacaatgccttgatagacgggataaaatccggtgaaatcactgaagtgtacgaagattcttattttaacaccaaaatatcttttgaggatattgataagaaattgttcaggatggatactatagatgccggttatgacatcatcaacgctgatgcatctgcagatatctctgactatgtggataaatacaaaatagaagcagatcttattgatgcttttatggtcaagggtatttggtatgtcgataaacgtcaaggagagatgaaataccgtattattgccattgcaccggtagctccggatgtgcaaacccttggtcgtgatgagctgggagaggatttatcagaagaacgttttccgttgttttgggtgttctatccggatgccagaaaagtcatgcacaaccaaaaagtctttaatcccaaaaactcagcatttcccatttcatatgaccatttgttaaactcacacaggtttagcagtattatatttaaaatagaaaatgaatatggtgaccgggaagtcgtagattatgtaaaaggtaattctttattccaggttctggagtctcagcgtttgaaagaacaagtgagaaataaggaaattgatctttggaactattaatattattgatctttacaataaaatgactaaagacgctctgtatcgggcgtctttttttaattttacacaaattttttcagatgaaagatttccttattgtaggttttggcttagccggtatgtccatggcctctgtactggaacgccgggaacgttctttccgggtcgtagatacgcctacccccgatgcacaccgtgtcataggtggtatgtataatcctgtaatcctaaaacgattcagcccggcatggcaggcacatgagatgtggcaacaatcggtaaaaacttaccggtggtttgagcagaagtttcaacaaacctttatcaagccctttgatatttatagaatattacacagtgtagaagaacagaataattgggttgtagcctcagataaggcggtgatgaatcagtatatgttaaccccggttaaacctaattttatcaacggtattgaagcaccttacggcttgggtcagcttcataatgtaggcagggtagaaggcgaactcattttggcgcattacaataaatatttaagagaacaacaattattgcatgatgtgacttttgattatgccgatttggtgataaaagaagaccatgtggactatcatggggaaatctaccggcacgtgatttttgcagaaggctcatacatcgcccataatccattttttaattatttacccatgaaggtgtccaaaggtgagatgctcatcatacatgtccctgatttgtccctcaatgatactataaagtccaaagtgtttatggtgccgtttggtcaacagttgtttattgtgggctctacctatcactgggatgataccacgcatttgttgactgcaaaagggcaagaagaattggaaagcaaactcaagaaattcttaaaactgccatacacagtcatggattacaaagccggcgtgagacccacggtttcagacaggcggccattgctgggacaacacccgcaataccaacctttatatgtactcaacgggctgggaacaagaggaatcatttatgcgccggcattggcagaaaccttgtatgagatgattgtctcacacaagcctgttgatgaagcgatgcatataggaaggtttaaacaacattatcaataccaataaaaagagatgatagatattaatgatttatcagtgtcattttccggaacggcattattttccggtgtgagttttaaacttacacccggtgaccgggtgggattaatagggaaaaacggtgcaggaaagtcaacattactcaaggtaatcgccggtgaacaggaatataccggtgttttggctatagaaaaaaacaccaaaataggggttttaaaacaagatattgactttcagaacgggcaaactattctggaggagacctataaagcttttaaggatatacaggctatcgaaaaacaactggacagtattcataaggcgatagaacacagggaagattacgagtctaaggcttatgaagacctgttacatgagatgacagaactcaatcacaggtatgaggttttgggtggctataaatacaaaggggaaaccgaaaagatattacaaggcttagggtttaaacctgaagattttgataaaaaaaccgaaacattttccggtggttggcgtatgaggatagaactggccaaaatacttttacaaaacaatgatgtcttgttgctggatgagccgaccaatcaccttgatattgattctatactatggtttgaacaatttttaaaaaattatacaggtattgtcgttttagtatctcacgatagaatgtttctcgaccaggtgaccaatagaaccattgaaatatctctgggttccatttacgatttcaagaaaccttattcacaatatatagctatccggcaagagttgctggaaaagcaactacaggctcaaaaaaatcaggaaaaacagattaaacatacggaacaacttatagaaaaatttaggtataaagcttccaaagcggcttttgcccagagtttgattaaaaaactcgacaaggtagaacgtatagaagttgatgtagaggatcattcgtctatgaaagtggcttttcaaatggcggttaaccccggcaaagtgatctttgaagtcgatgatgtcaccaaatactatggggataaaaaagtgttggagaacgttagcttacagtttaacagaggtgataaaattgcatttgtaggtcaaaatggtatgggtaaaacgacattagccagaatactggtcaatgaaataccttatgaaggtactgtaaaacccggtcataatgtagccatcggctattttgcgcaaaaccagtctgattacctcaaccctgagcatacattgatagaggaaatggaaacggtagccaatgattctaaccgcgtcaggattcgctctatgttgggtagttttctctttgggggagatgctgtagataaaaaagtcaaagtcttgagcggtggggagcgcaaccggttggcgctttgtaagctgatgctcaatcctctgaatgtgttgattatggatgagcccaccaaccatctggatatgacttccaaaactgttttgaaaaacgccttagaggcgtttgaaggcagtttgattttggtgtcgcatgacagggattttttacagggattggtggataaggtgtatgagttcagggattataagattaaggaatatctgggcggtatagacttttatttaagtcagcggcagtttgaaaatttcagggaggttgagatgacaacccggccaactgatacgccaaaagaagaaaaatctaccgtaaccgattataaaacccaaaaaaaactgaaaaacaggttgcaaaaggtggaaaaggatatcaatcgtttggaacaacaattggcacagatggatgaaaaactatcagaatctcccgaggtggtccacgaagacaaagatttttttaaaaactatcaggcgacgcaggaagccatagatgttttgatggaagattggtcagatttgcaggaacaattatccggaaatgattagcctttttcaaatattttacaaatttttagaacacgtctaaccttatttttatacttttacgctcatctatgacatatttacatcatataggctcttattttctcatgttgggagaagtatttaaaaaacctcaaaattggcgggtgttttgggaaacgttttttaaagaagttgaagacttgggcattaagtctttaggcattacagcatttatctcgttttttgtgggaggagtggtagccatacagacagcgctcaatgtggacagcccgtttatcccaaaatacctgataggttttgcgaccaagcgatcagttatactggagttcggacctacatttatttccgtaattctcgccggaaaagttggttcttttatcacatcgagtataggtaccatgcgggtgactgagcagattgatgcgttggagattatgggtattaattcaatcaactatttggtattacccaaagttgccgcagccttgttgttttaccctatattactggtgattgccatgtttttgggtattttcggtggttgggttgccggtcaactgacggatttgtttttttcagaagattatatttacgggattcaattggattacaatccttatttgatcaaatattcattcattaagaccatagtctttgcctttgtcatcgtcactataccgtcttatcatggtcataaagtagaaggcggtgcgctggaagtagggcgagccagtaccaaagcagtggtatggacgagtattgtgattattatactcaattattttttaactcagatatttttaggctaatgctggagattaatgcaatacataagtcttttaaaggcaaaaaagtgatcaaaggtgtttctacacagtttgaaaaaggtaaaaccagtatgattattgggcagagtggtagtggtaaaaccgtgatgatgaaatgtatgttgggtttatttataccggaagaaggggagatttcttatgatggaagggtttttaaaaatatgaatgagaatgaacgccgggatataagaaaagatattggtatggtttttcaggggagtgctttatacgattttatgaccgtagaagaaaatgtgatgtttccgttgaaaatgtttaccaagcgttccaaaccggaaatgctggagcgggtcaatgcggtattggacagggttgatctgtcaggaactaacggtctgttgccttcagaactatccggtggaatgaaaaagagggtagccatagcacgtgcgattgtgatgaaccctaaatatttgttttgtgatgaacccaactccggtttagatcccaaaacggccatcattattgataatttgatccaggaaataaccagggaatacgatattattacggtgatcaacagtcatgatatgaattctgtgatggagataggggataaaattgtttttttaaaagatggcttaaaagcatgggagggatcaaagtataatatctttgaaacagataatcaggctgttgtggattttgtttactcttcagagttgtataaaaaagtaagagcgacctatcttaaagatttttagaaaaaatatttcattttttttgaatattaagaataatagttttacatttgcaacctcgtttgagagactcggtagctcagttggtagagcaacgcccttttaaggcgtgggtcctgggttcgagccccagccgggtcactgttaagttaaagatttatagcggacacttgcaaaaatgcaagtgttcttttttttatccaatattatgatggtttaagaccgtaagcgaggcttattgattaccggtggatgatatgtagggtggttttaaattgttctcagttgttatcttttcaggtgttgttatggtgcaaaaaaatatgctcatatttgtttttgattgactgaaaaaacttatctttggattctgtcaaaaaaacaaaaaagagtatgaaatcaccatctaaatttttatttcatatacgattgtaataatggtggtttcatctgtcaccattaacacaataaagcgataaacagatgaagcaaattttaggattggacctgggcactaacagtattgggtgggcgttggtcaaacagaatttcattacaaaagaaggcaatatagatggtctgggaagtagaattattcctatgacacaggatgtgttagataaatttggaagtggtcaatctatttctcaaactgcagaaagaacaggttacagaaacacgaggcatctttatgagagatctcatttaagaagagaaaggttacacagaattcttaatgttttaggttttttaccggaacattatcaaaaacaaatagattttgacaagcatttaggtcagtttaaagaagaagtaaaaatcaattataaaccaattgatgaaggaaggtttgagttcttgtttattgattcttttaacgagatgattaatgagtttaaaacaaatggcatctataaaaatctcccttatgattggacgatttattatcttagaaaaaaagcactttctcagaaaattgataaatatgaattagcttggttgctgttaaatttcaatcaaaaacgtggttactatcaattaagaggtgaagaggaaactgaagatgataataaatcttttgaagtgttaaaagtagaacgggtcgaagattcaggagaacgaattaaaggaaaaggggatgtgttatatgatatatattttgaaaatggttggcggtatgataagcagactacaaagcctgaagattggttgcataaaacaaaagagtttatagttacgaccaaaactttaaaggatggtagtgtaaaaagaacatttaagaatgtagatttagagaaagactggattgcaattaaaaagaaaacagaacaagacatttatcaatcaaagaaaacagttggagcatttatttatgatactttgttgaccaaacccactcaaaaaataagaggaaaattaataaaaactatagagagaaagttttataaagatgaactaaggcaaatactacaaacacagattaaatatcatcctgaacttcaggacagagaattgtataaagcctgtgttgaggaattgtatccaaagaataaagcacacaaaaataatattgagaatgaggggtttgattatttgtttttggatgatattatcttttatcaacgaccgcttaaaagcaaaaagtcaagtataggcacctgtcaatttgagtataggattttcaaaaggatcaataatgaaaccggtgaaataaagaaagagaaacagtttttgaaagttataccaaaatcccatcctttatttatagaatttagattatggcaatttcttagaaatctaaaaatatatcataaacaagataaaattaatgtagatgttactcaagagtgtttgcaaaatgatgaagaatggtgtgatttgtttgactatttaaacgatagaaaagaagttgaccaaaagaatattattgattattttgtcaaattgaataggttagacaaacgcaaaaaagatgaatatcggtggaattttcaagaagataaaaagctgccgatgaatgaaacaagagcgcaatttttatctcgtttaaaaaaggtgaaaaactttgatattaatgatttaaattatgattttctggagcatttatggcatattatttactctgtaaaagataaaagacaatacgaatctgctttaaaaacttttgcttataaatacaatattgatgaagaatcatttgtagaacattttatcaaacatcctccatattcatctgattatggttcatattcacaaaaagccataaaaaggttgctacctttgatgagagttggtcgttattggaacagagaagatattgatacagatgctatagaaagaattgagagaattgtagaaagaattaaacatttacagattgaagaaggatcaataagtgataataaattaaaggaagctattgccaaagtggctgatgatgaaattccggcaagatttatcaagagctttttgatgtttaaagataaaaatcctttagcgggattgaacacatatcaagctggatatgcggtttatgaacgacattcagagttgtctgatatcacacagtggaaaacagctgaggatattgataactatttggctaatttcaagcaatacagtttgcgtaatccaatagttgagcaactcgttatggaaactttgagaaccgttcgtgacatttggctgtattatggggacggtaaagaaggtttttttgatgagatacatgtagaactgggacgagacatgaaaaattctgctgataaacgaaaaagtatttcagataggaatagtgaaagagaacgtaccaatgagcgtataaaagaattactaaaagagttacaagaagactataaagaggcggatattcgtccgttttcgccaagtcatcaagaaatattaaaaatctacgaagagggtatttacaagaacccttcaacgaaatacgataaggttagtgaagatgatattcaaaaaataagacgtaagaatacgccaactaaaaaagatattgaaaaatataaattatggttggaacagggctatatttctccttatacaggtcaaattattccattgagtaagctgtttacatctgcttatcaaatagaacacattattcctcaatctcgcttttttgatgattctatgaataataaagttatttgtgaaagtgctgtcaatgaagcgaaaagtaatcaaacagcttatgcttttttgaaatcaagaggcggagacgttgtagatttaggtaacgggcagtctgttcctttattgagaataaaggattatgaagatcactgtagcaggtatttcaaaaagaacagacaaaaattaaattacttattgagtgaagaagtgccagaaggttttatagaaaggcaaatgaatgatagtagatatattgctaaagtggtcaaaagtctgttgagtaatattgtaaggctagacaatgagcaagagccgacatcaaaaaaattactgccaacacccggaagtgtaaccagtaggttaagacatgattggggcttaaatgataaatggaatgaaatcatcgcacctcgattcaaaagacttaacaccttaacaaaatcacaggattttggcttttgggacaatgagattaatgcttttagaagtatggtgcctgatgagttagcaaaagattttaataaaaagagaatagatcacagacatcatgcactggatgcgcttgttattgcttgtactaccagagatcacacccattacttacatgctttaaacgccgaaaaagagaattatagcttaagagataaattactgattaagaataagcacaatgattacaccaagcattttcaattaccatggaaaagttttaccgaagatgccaagagtgcattagagcaaatcgttgttagttttaaacaaaacttacgtgttataaatagaactaataatagataccaaagatgggtgaaacagggtgatggttcttataaaaaaaagttagttgcccaagaaggtaaaaattttgctgtgagaaaatctatgcacaaagaaacggttgccggaaaggttcaggtcaaacgcatacgaaaaagtgtcattacattaaataatgcattagagcaatggcatttgattgtagataaagatgtaaagcaaaaggttaaaaaagtgatgtctgtttatggacatgacgttaagaaagtcaaaaagtatctgagaaataatcctataacaatagatggtaaagaaataactaaggttaaagtttatgaaatagttgaagcgactgccaccagaatagtacttacagataaattcactgaaaaacaattacagtctgtaacagattcaggtatcagaagaattttgaaaaatcatgtggagaaatataaagatgacaagggtaaaacggattattcaatggctttttcaccggagggtatagaggaaatgaataaaaatattcaatcattaaatggtggtaagccacaccaacctatttataaggttagagtttatgaagaaggaagtaaatttgctgtaggagaaacgggtaataaagtttctaaatacgtagaagctgacaaaggcacaaatttgttttttgcaatctattgggatgcggaacaacaaaaaaggcaatatgaaacagtgcctttaaatgaagttatagcacatcaaaaagagcaaagtaagctgaaaaatgcaaaaaaaacaccaatacctgttaaacctgaaaaaggtgtgtttatgttcagtttatcgccaaatgatttggtttatgtgcctacagctgatgaaatagataacccagcattagtggattttagtcatttaacagttgaacaagttaaaagagtttataaatttgttagttgtacaaaaagtgaagggcactttgttcctatgactatttcaaaggaaataattaaaaatgaaaatggaacaaatagtaaaaatgaacgtgtccaagaaattcatttaagtgaacttgatgaaaagaataaacctaaaatgataaaatcaatttgttggaaacttaaaaccgatcgtttaggaaatatcataaaagttataaagtaaaactattaaatacctcttgttaaatggattataatggaaatgatggttataatgttttttagcaaaaaatcaataataagtgaaatagtattataaatatatgaaacgttcagaatttataaaatcacttggtttgggagcttccggtttgattttaccacgaaatttgctgtccaagtctaaagttaaaatctatgacaactatatcagaggtataaatcgctataattactctaagataaaatcccaaatagcgataggtgatgaactgcaattgataagagaagagtccaatatacacgatgtgtttgctgtacaggtgttttatgacggctataaattgggttatcttactgcttatgagaatattgtgatagctcatatgctggatgcagaggtggaactcaaaagctatgtcagtgaatggggagaggataaagatagttatagtcgtatggcgatagagatttttgcagaacggatttcgcctacgccacaattgattaccgcattgcaaaacacgagtgctgatgaagttgtagatgtttaccgtaaaggctataaaatctaatctgatgttaaaacgtagtatttatattggtaatcccgcgtatttaaaattaaagcaaaatcaaatgctcgtggttacaccggatactaaagaggttaggggaacagtacctatagaggatatggctttattggtattagaccatcatcaggtcactgtttctacccaattattagaccggttgatggggaacaccgtagctgttgtgcattgtgatgcccaccatttacccaatggtttgatgttgcctatggcaggacatacagagttgacagaacgttggcggtatcaattagaggcttcggagcctttaaaaaaacaactgtggaagcaaacggtcatggctaaaatcaacaaccaaaaacaagtattggccaatcatgacagggattataagcctatgttgcgttatttggcacaagtcaattccggtgatacgtataatatggaaggtaaagccgctaaccattattggaagcatgtgttagatgattttaaacgggagcgttacggcgctatgcccaataacttcctgaattttggttatgctgttttaagaagtatcgtggcgagagctctggtcagttcggggttgttgacggctatggggattttccataaaaataaatacaatccgcattgtctggcagatgatgtcatggagccttacagaccttatgttgatgaatcagttttagaacttatggatttataccccatgagcgttgaattgaccagagaaattaaagcacatctgttgacaatagccacccgggatgttgtaatcaatggtcaaacccgcccgctgatggtcgcggtcaccactaccacagcgagtttgtataaatgttatacgggcgagagacgaacgatcttatatcctcaactatgagccaaaaccgtttaaatgcctaccgtgtcatgtggattttagtcttatttgatttacctacggaaaccaaagccgaacgcaaagctgcaggattattcaggaagcgattgatagatgatggttttagtatgtttcagttttctatttatttacgccattgccccagtagggaaaatgccaaagtacatgtcaaaagagtcaaaggtatgttgcctaaatacggtaaggtttgtatttttgagataaccgataaacagtttggaatgatggaaatctaccacggtagaaaagaaatagacaagcctcaggtatctcaacaattggaattgttttgattttttacattctataaactaaaaaaccctctgaaaaagagggttttagtttttaccttgtgaatcctcacgtaaaaatagaactttgaaattaattcacaacataaaataaacttattaaggtctttacacgcttgtgaatcctcacgtaaaaatagaactttgaaattaattcacaactgatcagtatttcggacattatcctgtttgcttgtgaatcctcacgtaaaaatagaactttgaaattaattcacaactgatgtcctcctattaagatgggctggtttcttgtgaatcctcacgtaaaaatagaactttgaaattaattcacaactttaggagcctacttaactccttcgggtagcttgtgaatcctcacgtaaaaatagaactttgaaattaattcacaactggctttaatgcaccggtactgtccggctgcttgtgaatcctcacgtaaaaatagaactttgaaattaattcacaacacaaattgtctataactatttgattaaggccttgtgaatcctcacgtaaaaatagaactttgaaattaattcacaacaggacagggtcttttggtttaggctctactcttgtgaatcctcacgtaaaaatagaactttgaaattaattcacaacatgtggtagtagtgttttgtatgcttttttcttgtgaatcctcacgtaaaaatagaactttgaaattaattcacaacttactgacattgttcatgtttttaatttagcttgtgaatcctcacgtaaaaatagaactttgaaattaattcacaactcatagaagctggtgtacgaccggtagaagcttgtgaatcctcacgtaaaaatagaactttgaaattaattcacaaccaatagacctttttaaattagtgacctcgccttgtgaatcctcacgtaaaaatagaactttgaaattaattcacaacattacaaaaaaggcttagccgatacaaacacttgtgaatcctcacgtaaaaatagaactttgaaattaattcacaactctatgacttcttttaaattttgttcagtcttgtgaatcctcacgtaaaaatagaactttgaaattaattcacaactaatctgacggtacggagttctgcgctttccttgtgaatcctcacgtaaaaatagaactttgaaattaattcacaacaatataaggcatcagttaatattttggtcacttgtgaatcctcacgtaaaaatagaactttgaaattaattcacaactaataaaggagattataataccggtgacttcttgtgaatcctcacgtaaaaatagaactttgaaattaattcacaaccc

SEQ ID NO: 1307 - DNA, 17723 bp, synthetic construct
  source 1..17723: mol_type = other DNA
  misc_feature 1..17723: note = Synthetic
  variation 5262..5350: note = n is a, c, g, or t
tcataggtgacggatggcataactacctgatacatgtaccgtttgtattacgtctgctggcagttacttttctgtcaatcgctttggcgcgcccgcaactaaccaaccgttggcagcaggaaagcaccgagggtatcgacatcatgatggcactggatatctccggcaccatgttggccgaagacctccgtcctacgcgtctggaagccgccaaacaggttgcttcacaattcgtcttagagcgacccaacgaccagatcggtctggtcgtcttcgccggcgagagtttcacgcagtgccccctgaccaccgaccatgccgtgctggtcaacctcttccgcgccgtagaatacggcatgatagaagacggcactgctatcggactgggtctggcaaatgccgtcaaccgcatgaaggactcacctaccaagtccaaggtcatcatcctactgaccgacggaagcaacaaccgaggcgatattgacccccagacggcagcccgcatcgcacagacctatggcatacgtatctacgccatcggtgtaggctcgtacggacagtcatacgctaccatacagacgccttacgggccgcgacgggtcaccgtcaacggcgagttcgacgagaacaccctgcgacaggtagcacaaaccaccggcggtgagtatttccgagctactgacaacaactcactgcagcgtatctacgagcagattgaccgccttgagaagaccaaactgcgtgttcgcgaatacagcaaacgcagcgagaacttcctgccctggctactgggcgcactgctctgcctcatgctcgatatactcatccgacacttcgcactaagaaccatcgcccaataattaaatcgtcaatcatcaataaatcgtcaataaagctaaatcgtcaataaatcgtcaaatcgtaaatcgtccaatcgtcaataatagtatgtttagatttgcaaatatcgacctactctggctactgatgctcataccggtgttcgtagctgcctatatagccctcacggtacgcaagcgccgccagctacgcgagttgggcgagagccggctggtcagccgcctcatgccggatgcctcgcacacaagacccgctctgaagttcagcctaatgctcgttgccttcgcgctactcatcatcgcagccgcgcgaccgcagttcggacagaaggaagaaaccgtcaaacggcagggtattgaggtcatcatcgccctggatatatccaactccatgctcgccgaggacgtagctccttcgcgtctggaccgcgccaaacagatgctcagcaagatgattgaccagatggtcaacgataagatcggcctcgtcgtctttgccggcgagagttacatccagctgcccatcacctgcgactatgtgtccgccaagacattcctgaactccatcacaccggcactcattcagacgcagggaactgccatcggcaaggctattcagacctccatcaccgccttcggcgcgcccgagagcgaggccggcagggctattgtcatcatcaccgatggcgagaaccacgaagatgaagccgaccatatggccaagaaagcctatgaaatgggtattcaggtcaacgtcatcggtatcggcaaacccgagggacaacctattcccatacccggtaccggcaactacatgaaggaccgcgcaggcaacgtggtagtcagccggctcaacgaagatatgtgccgctctatcgccaaggaagggcacggtatctacgtgcgctgcgacaacaccaactccgccatgaatgccctgcagaaacaactcgaccaactggccaaaaccgatattcagaccaccacctttaccgactacaacgagcagtaccaatcctttgccctcatcgcgctgctactactcgtcatcgagttctttatcctggcacgccaaaaccgcaccatcacacggctgaatatcttcggtgagaacaaactgcgccacctaaccctactggcactactcatcacccccttggcacttaacctcagccccctacacgcacagcgtgaggcaccgcagattcggcgcggcaaccacgactaccgtaatcaggatttcaccgaggcggaggtcaactaccgacgcgccttggagagcaacgactcatccttcgtggcgcactataacctgggtaacgcactcatgcggcaggataaatacggcgatgctgctaaggcctacgccgatgcactggacgactaccgcaaagaccacataaccgactccatcgcgctggcgcatacgttccataatatgggtaacgcactgttcggcacccagaactacggtcctgccgtcgaagcgtacaaagaggctctgcgactcaacccttccgacaacgacacacgttacaaccttgtcaaagccttagagatgctcaaagaacagcaacagcagcagcaaaaccaacagaataaagaccaacagcagcaaaaacaagaccagcaacaacagcagcagcaacaagaacaacaacagcaacagcagcagcaacaagagcagcagcaagaacaacagcagcaagaacagcaagacccgcagcaaatcgataaggaaacagccgagcaaatcctgcaagcccttgagcaaaacgaacaggaaacacaagagaaagtcaacctacagcgtcagcaaggccaaaaacgccgggttgagaagaactggtaatagtattaattgacagttgataattgacaattgacattttattagtagcatgaaacgaatagcatccatactcatcatcctcagcatcgctcttatgggctttgctgacgatgttgtttttcaggccaatgcccctaaacaggtggttcaaggccagcctttccaactaacctataccatcaaccaacgagcgggaaatatcgagccacccgagttcaccggttttgactacctggcggggccatacacctcgacctcacagtcatctacctttgtcaatggtaagttcacctctacctaccagcagcagtacacctacacgctgaaggcgcagaaagagggaaccttcaccctgggacccgctaccattaaggtgggcagcaagcagttcacctccaatggcatacgcctcaccgtcctgccgcccgacaaagatgaacccgccgcaaccgagggcggcaaccgaggaagtcagcaaccctcgcagagtgcgcaagcctcaacggggaacggagatatattcctgcgcaccatcgtcacgaaatctcgcccctacgaacaggaggcactgacactgagctacaaactctatgtcaccggtcttgacatacgcggttttaccgagaagacatccatacccgatttcacgggcttcttcaagcaggatctcgaccagcagaacatccagttcgagttggagcactacaacaaccgcaactaccaggtagccaccatctaccaaacactgctctacccgcaacacagcggcgatatcgtcatcccctctgcctcctttgaggctatcatcctcatgcctaacacgcgccggcgttccttcttcgatgacgcgtatattcaggccaccaagacgctgcaggcgccctccgtcaccattcatgtcaatgccctgcctgccggcaaacccgccggatacagtggaggcgtcggacgcttcacactcaatgcctccatcagcgacaccactatcgctaccaacgatgccgtcacgctaaaggttgagattaagggtgccggcaacctcaaactactcaagacacccgccatcgactggcctgagggatttgaggcttatgaccccaaggtcaataataacttcaagacaacggcctcgggcatatcgggcagcaagaccattgagtacctcgccatcgcgcgtaatagcggtacctataccctacccgcactcaccttcgcgtacttcgataccgagtccggacagtatcgcacgctccgcacacaggattataccatccgcgtgaagaagggtgccggcgatgccgcctcacccgccgctgtcaatgactatactgcaccgcgtcaggaggacatcaaggaactcggctccgacatccgttatatctataccggcgagctaaggacacctcgcaccgactcctcgtttggcaccttctgggcttcgccacgaggactatgcctgctctacctgctgcccacaatcattgccgcagctatctttatactgatgctcaaacgcatccgcgagaacgccgatatgacacgcgtgcgctaccgccgcgccaacaaggtggcacagaaacgcctcaaacaggctcggcaactcatgcagcaagaccggaaagaagctttctacgaggaaatcgagcatgctgctttctcctacctcagcgaccgactatctatccccacggctgaccttaacaaagacaatattgccgatatcctgcgccgtaaaggttgccccgaaaacgacatcaccgaggtgctcgacctgctctccaacgccgagttcgcacgctatgcgccctccgccggacacgagatgaataccctatacgaccgcacagccgaactcatcaaccgcctcgaaaatcagaaactgtaacaatcttaaatcttaaatcttaaatcttaaatcttaaattttaaatcttaaaaatgcttacatttttaatcctcctttccaccctcttcgccgacgccaacagcgaatacgccgccggcaactacgctgaggctgccgaactatacgaacaggctctgacacagacaccggctgccgaagtctattataacctcggcaacgcccgtttcaaacaaggcgaactggcgcaagctatcctcgcctacgaacgctgcctccgccttaatccccgcatgaaggatgcccgccacaacctgctctttgcccagtcacgcattcaggataacatacacgacaacgataacttcttcctgcgcaagtggtacctggctatccgcaacagcctcagcctatccgcttgggctacgatcagtgtcgtctgcttcctgctattcctgacgggtattctgctctttgccctttcacgcgagatagccatccgcaagacggctttctacctctcgcttgtcttgctgctggttgctgtcttatccttcacgcacgcctggggcttgcaccaacgcgataccctgcgcgaggaagccatcatcacccagggcatcgtcaatgccaagtcctcgcccgaccgctccggcaccgacctctttaccctgcacgaaggcacnnnnnnnnnnnnnnnnnnnnnnnnnnnnnnnnnnnnnnnnnnnnnnnnnnnnnnnnnnnnnnnnnnnnnnnnnnnnnnnnnnnnnnnnntgccctgaatcaaatttggcatgacgataccgattgataccattatccgctcgtttgagcctatcagtttggcgcaaatggagagtgtgaagttgatgaaccgcatcgacaccaagttcgtggtgcccctggcggttctaccggctatcctacaggcggctgaggcggattattatgcccaacagatcgacggcaaacgcatcgctacctacgacaccatgtattacgacaccgactcgctcgatatgtaccttcgtcaccacgaccgacaactcgtgcggcagaagatacgcatcaggcagtatgtcgatagccacctgaccttcctcgaaatcaagcgcaagaacaacaagggacgcaccaacaagaaacgcatcattgttccgggctttgacatcacagccgacacaccaagcgtgctgaagcacaagcgaaaagatgacgaaccggtcaccgtcgagaccttcattgacgccaagagccggtaccgctgggcggacatcagtccgcatctcaggaccatgttcaggcgcatcacactggtcaacaaggccaaaaccgaacggctcaccatcgatatgaacttgcagtgggataatgtgctgaacggcgaaaagaagacctaccccaatctggtcatcatcgaactcaaacgcgatggcaatgtaaccagccccatgatggacatcatgctcacccatcgtatcaaaccactgaaaataagcaagtactgcatcggtatcgcccttaccacacccggcatcaagcaaaaccgattcaagaagaaaatccggttaatagaaaaaatactaaatgactacatgacccaataaatggtacatggtacatggtaaatcgtaaatcgtaaataatatgatgtttttccaagttgatttagccaaccccacgttggagttcctgacggatgatccgtctatcgctgcacgcttcggcaccagcgacagtatctcgtatgtcattcataacattgctgaatttatgcatgtgagcgaagacctcatcgctatgccgctgatgttcctctttaacctgttagtcgcttgggcgctcatctacggcatctactatcgctacagccgccgtcgtgactactacgtgcagttcatgctcttctccagcggcatgttcctgctgctgtggctcatgcagatactcgatatccagacgggattcgtgctcggtctgttcgccatcttcggcatgattcgttaccgcaccgagaccgtgcctattcgcgagatgaactatatgttcctcatcatcgccctctcggtcatcaactcactgagcctcaaggccgacggactggcgtggtacctgctgctgatagccaacgcgatgatgctcgccttagcatggggcttcgaactatggaacggacgcaaacgactctctaccaagatcatcctctacgagaaaatcgaaaacatcaagccccagaaccgagctgccctcatcgcggacctgaaggaacgtacaggactcgaagttatcgatgtagagatcggacatatcgacttcctacgcgacgtagcttatatcaagatgacctaccccctcgagaaaggcaaaaccgttaatagtatcgaccaaataacgaaattcagatgataaaatctaccaacaggcgattcctcgccctacttatagccttggcagtctgcgccttagcgcacgccgtggactacgactccgaagctgccaccaccacacaagcggcacaactacgcttcggcgctgagttcaacaaaaaatggcgcaacggactgcgattaggtatcggccaggaattgcgtttcgatgtctataactccgctgtcggaccccatttccgcaagtcatacacgacgcttgattttggctataaacccattgagtttgtcaaattcgatgcgggatatacgctgcgtatcttcggacccgacagcacctggactgccaccaaaaaagccgacccaaacgagtggattcgacaccgcgtcttcttcagcgtaaccggctcttacaccttcgactacgccaagatatacctgcgcgaacgcttgcaattggatatgcggacggatagcgtgaacctgctggagaaaaataaatacgaattggtcttgcgcagcaaactcggtacggagtttatcattccgggcaaacccgttaaaccctatttgtgggtcgaactcatcaacacgctcaatgcacccgaatatcagcagaagaacggacaccagttcatcaccgatgtacgcgcacaagccggcgtcaaatggcgcgtcagcagactcagcagcctcgacttcttctaccgctttacctatggctacgaacgcgacatcaatatcaccaagaagaaaggctacatcgaactgaccgaggaaacactgtatatgcactccattggcataacctacctcctcgactggtaaacaacacacccaaccacaccaactacgctaactacaagcaatcatgaaaagatttttaaccatctctatcctcttttcgatactcgcttcgctctcggcgcagagccttctcacacccgagcaactcgccaaacgcgagaaaaagaagaacctgacggtcaaagaatggaacaccgacgccaagaccaacacgcgctggctcgaccgcattaagatatacgatgaccaggggcgttgtattgaggagattgagtacgccacttacggccagaaatggcgtatcaccagcacctacgacgatgttaccggcaaggtcattgaggaggtcgagtacaacgaccgaaaccgtccggtgcgtatccgcaaatacgaatggaacgccgatggcaccaaggcgaagcagtacaattacttacccaacggcaagctctattccgtcaaggtgtacgagtacatcttctccgacaaataacctccccttttgcggatgattcgaatagtaaactcgcttcctattggactagttcactatagcactatagcactagtccacaaaaaaaatcgccatttcgcaagaatttggcgattttttttgcgtatatcagaaaaatgtagtacctttgcagcgaatttgtatagcgcattatacaaaatcacatttaatttgtattttgcattatacaaatgtgaggcatttttgaataattaaccatacacgaaaggatagatatgcaacggttatttcaacttcaagagcagttattgaacgtaacgccaatgaagattgtgcggcaatgtgcgtctaaaatcaattgggatcaacaactgattgccattcgcggtgcacgcggtgtcggcaagtcaaccatcatgcgtcagtatatacggaatcattatgcaaaaaatgaccaaacggcattgtattgctcgttagatgctaactattttgtggatcactccatcttagatttagcagaacagttctatcggataggcggtaagcacctattcctggacgagatacacaaatatctcaattggggtagggaaatcaaagagatttatgacttttaccccgacctaaaggtggtcatcagcggtagttcgttactgggtctcacgcagggtgaagccgacttgtcgcggcggtgcatgaactatgatatcgttgggctcagttttcgggagtatcttcggttctacgaatcaatagacctgcctacctgctcattagaggatttcaatagcctgcatgatttcattgaaaagatctatcagaaatgcaagcctatggcccatttcgatacctacctcaaatatggctattatccctattataagaataatccggtggagtattacgcactaataaataatgtggtgcggtatgtgatagaggatgagctacctcgaatctgtaaggtggaattagaaaacacgcgtaagatcagggcgctgatgaacattcttgcagccagtgagccatacgaagtggacatatcgaagatgtcggtacagagcgcgctgcagcggcctaccatattatcgtatctcaagttcctcaatgatgccaagcagctgaatctactctatagcgatttgctgaatgtcaaaaagatgcaaaaaccagataaaatctatatcgagaataccaatatgctgtatgcgcttgctacgcacccaataaaggaaggcacactgcgcgagacgtttgccgtgaatcaactatgtgtaggacacgaagtcgaatatggcaagaaaggcgattttagggtagatggtaaatatacgtttgagataggcggacccagcaaagacttcaagcagatagccggtgtgccggactcatatatcttggctgatgatattgattatccttttggcaataaattgccgttatggattattggattcttgtattagcatccccccccccgaccaccttagaaaggggggtgactagatactagaacactcgttcactaatctactactccaaaaaaatcgccctttcgcaagaatttggcgattttttttgcgtatgtcagaaaaagttcgtaactttgcagcagaaaagttgcaaagcttattgattatgtactccattaacgacaatgggatcgttgaggcgggcaacgtaaaaaaaatatatatacaaaaggcgtttgctaacgcttatttttgagaatacaatataaaacactcttatatgcagaagaatattcttggattggatttaggaaccaatagtatcggttgggcaattgttgcagaagatgaggatcaaaaacggatattgcatgcgggtagtcgtatcattccgatggatgcggctctgatgggtgatttcgagagcggaaatagtatctcgcaaacagctaatcgaacagcagcacgtggtgcacgtcgcttatacgagcgtcatgcgttacgtagagaacgactgaatcgagtactatcaatacttggtttccttccagagcattataccgaatgcctgaatcgctatggacaattaaataaaggtgctgaaccgaaattggcatggcagataattgacgggagatacactttcctgttccaagaatcatttcatgagatgcttcgcgactttcaacagacgcatcccgagttgttggtcaatggcaggaatatagcatacgattggacgatatactatcttcgtaagaaagccctaactcaacctatcacgaagcaagaattagcttggattcttcatcaattcaatcagaagcgcggttataatcaagcacgtggagaggaagaggatttgaaacccaacgagcgcaaagagttaatcactcaaaaggtggtctccgtacgcgataccggcgaggtctcaaaaggtcgcacgtggtacgaagtgacgcttgataacggcatgatttatcgccgccaaagtgcttatccattggagtgggaaggcaagacgaaagatttcattgtgaccacgaaacttaatgacgatggcacggatgcaaccgataaagaaggtcatgtaaaacgttccattagtgccccgcaggaagacgattggggattgcgtaagataaagacgcaacatgatatagatacaagcggtaagactatcggtgaatttatttacgatgctctattgcataatcctgatcaaaagattttgggtcaacttgtacgcgttgtcgatcggtcgtactatattcaagagctaactcgcattctcgaaacgcagaaacaatacatacccgaactgcaagacaccaatttataccgcgaatgcatacacgcactctatccgcataatgaggcataccgaaatagtatagcggggaaggactttacgtatctgttactcaaggatattatcttctaccaacgtccgctgaaaagtaaaaaatcccttatcaatgagtgcccgtatgagtaccatctatatagggataaggacggtactttgcagcgtcaatacttgaaatgcatctctaagtctcatccgctgtatgaggaattccgcatgtggcagtttgtggagaatatgcacatctatcgtgaggcagctaatggcctaagtaaggaggactgcacggcagaatacatttctgataaagcaaacttggtaacatggcttttgacacaaaaagaggtcggcgaatcgaccgttttgacgcaccttgccggaaagcagaagaaaggcttgtcatggaactatgtgtcggataagaaatatccggcagcaacggttacggctacattaacatcggttatacaagatgccggtggcacgcctgattatagcgagatagagcacatctggcatatcctctactctgtatcggacaaagcacaactaacagcagcattaaagcactacgaagaggccaaaggtttatcatccgtattttcggagaaattgggtaagcagaagcctttcgacgctgattatggtgcctatagcgaaaaggccatccgcaggttactgagcttgatgcgaagcagagagtattggaacgaagaatcaatcgatgctcatacaaaagcccgcatcgaacatcttcttaccggagaagttgatgataccattagtgcacgcgttcgcgagaaaatggctacgatgaatcaactatccgatttccaaggcttacccctatggatggcagaatacgtagtatacgatgtacgtaaaaatgataccaaatgggataaacccgaagatattgatgcatatatccagtcattccgcctgcattcgctcaataatcccatcgtggagcaggtcgtgatggagagtttgcgtacggtgcgtgatatatggcgtcaagagggacatatcgatgagattcatatcgaaatgggtcgtgaactcaaacagaatgccaagcagcgaaaggaagccctgcaacgccaacaagagaatgaaaatgcaaatctagaagcggagcggaagttggtagagtttttatatccgaagaagccatctgttcaagacatcaagaaataccgtttatgggtagagcaaaattatgtatcgccttataccggtcaacctattccgctggcccaactattcacttcggcttatcagattgagcatgtcataccccaatcgcgattctttgatgactctatgacaaataaggttatctgtgaagccgaggtcaatgcccgcaaggatcgtatgttagggcacgagttcatcgtgcaatgtagcggagagaagataacactaacgggtggaaaagttgttcaggttctctcccctgctgcttatgaggatggaatcaagcagaactttgccggtaacaaacgcaaacaggagaaactgatgttggatgatattccggaaaagtttgtggcgcgacagatgaacgatagtcgttacatcagccgattgatgctgcaactactgagcaatattgtgcgtgagaaaatcagcgaaacggaatacgaacccgaatcaaccagtaagaatgtgattgcctgtaatggtgctacaacgacacgcctgaagaaagactggggcatcaatgatgtctggaatcgcatcatcttaccacgttttgagcgtcttaatcggttacaaaacacatccgcctatactgccatggcagccaacgggcatatgaagccaacggtgcctatcgaattgcgtaacggatttgagaaaaaacgtattgaccaccgccatcacgctatggatgctatcgtgatagcgtttacgacacgcagtcatgtggctttattgagcaacgaatcggctttgaataacgatgaacgggcgcggtatgacttacaaacgaaactgcgtaaacgtgaactatggcgaagtgcggatggaaaagaacacactaagtttaccgattttattgaaccctatgagggattccaaaaggatgtacaaacggttctcgaaaatatcattgtcagcttcaagcagaatctgcgtgttatcaataagagcaataatcgttcgctgcggttcgtagatggcaagaagcagatggtgcgccaaactcaaggtagaaactggtctatccgcaagtcgctacacaaggcaaccgtttttggtgaagtcaatctgcggaagaaaaaatatgctacactctcgtacgccttgcagcatattgacgatattgtggagagagacgtacgaaccaaactacgcgaattggtgcaacaaggcatggatgagaagcaaattaagaaatacttcgcatcaaatccaactattctgccggatgttaatcttagacgtatagaggtatattattataccaatgacaccaatgaccgttattatgcggtccgcaaaccgctttcggatgcctttacagcggattatattaccgatagtattacatcagacggtgtccggcgaatcctcctggcgcaactggagcgctgcaacaatgacccgaaacaggcgttctctgctgatggtattgagcagatgaatgcggacatcgtacaacttaatcgtggcgttccgcacaaaccgatttatcgggttcgcacctatgaaaaagccgataaatttgctgtcggacaaaccggtgccaagagtaagaaatttgtagaggcggataaggggaccaaattgtttactttcgtttacgaaagaataaataacgatggcacaaaatctcgaaaattggtagcccttacacttatagatgttgtaaatgctcaaaaggatttcggtacaaaatggattccttcattaaatgaaaaactccaaagaacaggactaagcccatccgaatggtcttttgcttttgtcatttcaccgggagatttggtgtatgttccatctgatgatgagattaagaacggtcaatatgtttttgcgataaatagaatatataaagttgtttctttagacggagaaaatccaaatttcatacctgctaatattgcatctatgattgtagatggtcaagaatttacacgtcacaataaaaccagtcgagatgcagatggccgtttaataaaggaattttgtataccgattaaaaccgatcgtttgggaaatataataaagatatgattaaacgcgtactttgttttgagaatccggcacccactcaaaaaaagtaaacatatagtcctaaaacaaggaaactgaacaatggtggattcaacaacaagttgtgtatgccactcaaaaaaagtaaacatatagtcctaaaacaagattcatcagccttgctacatcatggggagcgttgtgtatgccactcaaaaaaagtaaacatatagtcctaaaacaagcgtccaattacaagccagcgaatagctcgcgttgtgtatgccactcaaaaaagtaaacatatagtcctaaaacaaggggaagcaggaactatacggtgtacttcatgttgtgtatgccactcaaaaaaagtaaacatatagtcctaaaacaaggttgatatgagcacgttcacgtggatggagttgtgtatgccactcaaaaaaagtaaacatatagtcctaaaacaagaatcatccgaaccgacaaacaatgggcagtgttgtgtatgccactcaaaaaaagtaaacatatagtcctaaaacaagagactattaataattagctggttatcaaacacatacaactgattttaggattataaaaagcagtgccgagaggtactgcttttcttgtgtatagaccctttttgcttttctaaaatagctctaactgttgaaccggttgcttcactccaatctccttgctacattcaaaaatttgcatgtcaccaaactgcttatctgtgattcgcaatattcctatcttacccatcccaggcatccaacgcttcacacgttggatatgcacatccgcattttctgcgcttagaaccaatacccgcataatcctatattcactaaaacgactcattagcatgcaaaagtacaaaaaaatgcgtatatctgcaaaatttcttgccaaaaatttgcatatgtcagaaaaaagcagtacttttgcagtacttttttgagtgacatacacaataaggattattccgttgtgaaaacattcaaggtgggacataagtctcgccttttttttaagttatggaatacagcctaaaaaaacaattccctacgcatcgtctcatagaggcggtgcgtttttttatgctcctaaaaagcagtacctttgcaccgcatattgccaaggtgtagccacgtaggtttaccttaacaggcgtatgcctgcaattatggtatttccgcaaactaaaaacatcaccgcattggatctcaatgcgttatggagaactttcctgcatcaagaactgaaacaattcggattagaacaccccgaatgtaagtttaacatcaactgctgggtcgatgaccttgtgaaggataccgcccgagaaatctatgattatttggtggaaaatcagtgcccttctgttctcaaaacagggggcgacatgattggcaaggaacgtacaacattctatcgtttggtaaaaaatgaggtcttatgaacgattgttgcaaatatgcaacacccttatcgtttttttgttgtaattttgcaccaaaattttataaaaccattaaatatgcgtgtcagaaataaccgacaggacactgtcattgattacattgaggaaaactatctcgccacccagcggctccggcatgatgtcattacagaccaggttcagatcttggatgaacggagccctgacgcacttcatcatgaattcaattacgcgcgctggcgcgacatcaccaccgccgacatcaacgacatcgtttgcaactgcgcttccgagacaggactatccgtcacacccaacgaggtgctcaccgtcatcaagtcgcaccgactgccattcgtgcacccactacgcgaatacgtccgctcatgcaacccctacacacccgaccaacccgactggatcgacttcctcgccgaacaggtcaccatcgagggcaccaaacaggaccagcaactatgggctatatgcttccgcaaatggttcgtcgctatggtcgcatcgtggctcgatgacgcagtcgtcaaccaccaggttctcgtcctcattggcaaacagggtatcttcaaaacgacatggctcgaacatctgctgccaccggaactgcgcgactatggctgcaaaatgggcaactgtacccaactcaacaaggacgaacgactacgcatcgccgaatacggtctcatcgcactcgacgagattgatgctatgacttcacgcgaactcaatgtcataaaatccatcatcaccgcttcggatgtggccgaacgacccgtctatggctataccaaggaacgacgcattcggctggcatcgttctgcgcatcgggcaacaagaaggagttcctcaccgacatcaccggcaaccgacgatggctgcctttccatgtacgtaccatacagaatcccttcttcactaccataccctacgagcacatctacgcgcaggcactctacctcatcgaacacgactttaactactggttcgacctcgacgacatacaggcgctcgaactgcacaacgaggacttccgagcgcagcagaacgaagaacagctgctctttgtctatttcgacatccctgccgagggcaaagggcagttccttaccaccgccgaaatcggttccaaactcgtcacttggggagccatcaggaacccgatgagtaacgtacaactgggcagattactccaacgcgctggctttcaatcgaaaaaaatccatcacggtacgcaacgaggttggttgatatacgaaagaacaaccgatgagataaacgcaaatcgtaaattaaacgcaaagatgggtacatatgacagctgaaggggggacgggtgacgggtgacagatccaatttatatatacatacacgcgtataagagataattatacatctgtcacccgtcacccgtcaccccccccaaaaaaaaactatcaactaaaaaacactcaactctaaactgcactaaacactaaactctcaacactaaacactcaactctaaactgcactaaacactaaactctcaactaattcctaacccaaccatatcccttctccctccccgcgtggggagggtcggggagaggttcctaaacaaaaagaacacttcatcgagtcaaaaccgcgaccatatcgcgacctgaccgcgacctcgccgtagggtccgtgtcaaaaaccaaccaaaaaccaacccaaaccaacaaaaccccaaccattatgcaaatcattcctattatgcccattgagaccatgtttggcatggtgaatcgtcgagccggttattacatccgtcgctcgcctaccggcaaattatacagttgccgctgccccgaccgttcccgtcatgtcaagacacctgccgaatctgccaatcagcagcgtttcgccgcccgctacgccggccgccacact

SEQ ID NO: 1308 - DNA, 17704 bp, synthetic construct
  misc_feature 1..17704: note = Synthetic
  source 1..17704: mol_type = other DNA
  variation 7910..10185: note = n is a, c, g, or t
atacacattaaagtccctctccttcaggagagggatttagggtgaggtctttctctaaaaaaatcgttcataaatagaacttcaacacttgctgattagatagcatatttagttgccggatcactccaggcactttgacctgctgtacctactgcagcaactttaaaccaatatttttttccgctttccagattctttatagtagttctggacttggtagaaacaatggccacagtccagctatcatctttgctcaaatctgatgtaagttgtactatgtaacttttagcaccttttacagaatcccaggaaagttctatttccttttcattggctgccacagccaataagccttccggtgctgaaggaattcctgtaggactctttgaagcttttacactcattcccgccagcttaattttaatttcatctccctttgctgtgctttctacataagcacctaattgattcagtacagcatcaagttctgaagatctgtcatctaaaatgctgtacttggttgaaagggtttgtcgggctagctttacatcagcatttgctttttccaattctccaatagcagaacccactgtttccagtgatggaatgggcgaaggaaaatgttcgtttgctgtaagtgcctgtacaatttgtctggcgagagtaagtttttcttctagtgaagatgctctaaggttaagcttaacctttgcttttttagcggttgtcatagctgatatgtttttgttattaaaaaattgatgggacaaaagtttaaatattgccaatcaaatgcaataaaattttaaaaaatattttattgcatctatttaggaatcagttggttttatgatttttcctagatgaaaacaaagtctactagtatataagaaaaaatagaaaataaataagaagaaaaaatatctatgacaaaatcaatttctgaataaatatctctttcacctatctgaaattttaaaaaggcataaaattatattcatccagtaagtaaaaaaaacaattttattacttgtaaatcagaattacagtcttgcaaatcagaattacaagcttgtaaattgaaattacaagcttgtaaactgggattgcaagcatgtaaacttgaattgcaagcatgcaaatcgaaattacaagcatgtaaactgggattgcaagcatgcaaactggaattacaagcatgcaaatcgaaattacaatcttgcaaattgggattacagtcttgtaaattgaaaattcaagtttgaaaaatgaaattgcaagcttgcaaaaggaagccccttcattaaaatcattatttctttgtgtgaagtgatatacacatgaaagttatttcggatgttatgccctgtcctaggctgggcttgatgatatagtggtgtgattggaggagggagtaagcttctcttgtggtgtctggtctttcctgacacttttgaaaggtaccagtgacattatatctctccaccgtggtcaccttacagatcactctgtctaaagccaataaatttcgtattaccgcagtagctatggaaaatcatttataaagacaatctgcaactcctggatttagctatttggaaagttttttagtgaaaggaaagttttatcctgtcaggggacatgccacggagcggagattctcgtttagaaagtgaagcccctttttagttttgttcgtttagagatatttctttaattttgttaatatgagaatgactgtaatgctataacaccctttcaagcttagttctataagcaagcaatgcgctttatttatacaaagcgtacttttctattattcattcattttattgataatcctataaccatgtcaattgaccgacaaatcctgttgctgtctgtgcatggtttttaataaataaattatgtcagatttactaagtaaaaaggaaatagagcattttattcataacggttttgtccgtcttgataattcattcaccaaagaaattgcagatgctgcattagaaattttatggaatgaccttccttgtaatagggcagatccttccacctggattgagcctgtaattcgtttgggaatgtataccaatgaaccttttgtcaattccataaatactccaagattgcatggtatttttaatcagttaattggtaaagaaaaatgggttccttgtcggagtgttggaacgtttcctgtcagatttccaagttttcaacagccaaatgataccggcaaacatgtagatgcaggttttcctggaaatgaccctaataatttttttgaatggcgtgtaaatgtcaaatcaaaggggcgagcgttgttgatgttgattttgtattcagatgtcagtgaaaatgatgctccgactatcatttatgaaggttctcatttggatgttgcaaagttattgtctaaagagggagattcaggtctttcttttatggagcttgcaaacaagttacacgacttgccggaaagaaaagaagtgtatgctacaggtaaagctggtacagtttacctatgtcatccgtttttggttcactcagctcagccacatcggggaagtgctcctaaatttatggcacaaccacctttgctcttaaagagtgagttgtctatctcaggttctgatacagattattctcctgttgaatgggcgattcgttttggaatagatcagtcataaagggtttatgttgaaagaggttgcttttagcagcctctttcttttttgagacgctcgaaaaccagaagacaggaacactatgtatatttttgcatcttgctaatcctttaaatatcctctggagccccagagaggctacaatgtcttgttgcaattaaagtttaataattgtaggagctatggaaaatcccatttttaaaaccaattccaattccaggatgaatcttcaagaagaagtaggcaacgcacgtcagtcaggagaaaattgaaattctcattcagggaaatcacgcctcttcattaaaatctttatttctttgagtgaagtgatatacacaagaacgttatttctgatattatgcccggtgagttgtcttgtctagatgggataagttgggaacgttaatatatcaaagtaaaacaaaaaagccccgtattgtaagacgaggcggcttaaatgttttcacaacggaataatccttattgtgatttgctttcaagttcaaatatagattatatttgaacatatacaaaaaaatgctagctactttttgatttttaaatctttcaaacaaacagaaatatgaaaactatacttgggcttgatttgggtacaaactctattggttgggcgctgattcaacaggactttgataatagtgaaggtcagatccttggaatgggaagtaggataattccgatgagccaggatattttaggagaatttggaaaaggaaattcagtttcacaaacagcagatagaacaggctttagaagtacaagaagattaagggagcgttttttgttgagacgggagcgtttacatcgtgtattaaatattttgggttttcttcctaagcattattcagcagatattgattttgaaagacgtttgggtaaattcttagaagataaggaacccaaaatagcttatgaaaacaatcaattcttatttacaaaatcttttgggaaaatgctggtagattttcgtcagcatcagccagaacttttaaaggatgaaaaagggaaagacctgctaataccttacgactggactatttattttttgagaaaagaagcgttgagtcgaaaaatcgaaaaagaagagctggcctggattattcttaattttaatcaaaaacgaggatattatcaattgaggggagaggaagaagaagaaaatgctaataaattagttgaatttcattctttaaaaatcacagatgtttttgcggatgaaaaaccgaatagtaagggagatacttggtattcgctgcatctcaataatggctgggtttataggcgttcaagtaaaactcccctgtttgactggaaagataaagtcagggattttattgttaccaccgaattaaatgatgacggaagtgtaaagaaggacaaagaaaataatgataaaagaagttttcgagcaccgttggaaaacgactggactttattgaaaaagaaaacggaacaggatgttgccaaatcaggtaaaactatcggaacttacatatatgatgctttgttggaggatcccaaacagaagataaaaggaaagttagtaagaactatagaacgaaaattttataaagatgaattaaggcagatccttcaaaagcaaaaggagtttcaccctgaactacagaataccgatatctatattgattgtattcgtgaactatatagaaacaatgaagcgcataagatacagctaagtaagaaagattttgtacacctgtttcttgatgatataattttttatcaacgcccattacgaagtcagaaatcttccattggtaactgtactttggaatacaggaaatataaggatgcagagggagttgagaatattgaatatctgaagactgttcccaagtccaatccatattatcaggagtttcgcatatggcaatggataaataatctgtcaatatataggaaagatagtgatgaaaatgtaacaggtgagtttcttgaaagcgtggatgatagagtaattttatttgaatatttgaatcaccgaaaagaaatcgaacaagagaatttgataaaatatctacttggacaaaaaggagtaaaaggaaaagcattaaaagctgaatcagaaaagtatcgatggaattatgttgaaaataagagctatccatgcaatgagaccaaagctcttattatttcaaagttagaaaaagtaaatgatttacctcttgattttttgacaggagaggtagaatataagttatggcatattatctattccgtaaatgataaagcggattatgagaaagccttaaagtcatttgcagaaaagcacaagttagattcagagtcattcgttaatgcatttagaaagtttcctccatttcgtagtgagtatggagcttattctgaaaaggcaattaagaagttattgccattgttgcgaataggaaagtactggagtttggcaaatatagacactaaagtaaaaggtagaataggtaaaataattacaggtgaatttgatgaagaaataaaaaacaaagttcgtgaaaaagcggaaaagcataagctggtggaagaaagcgactttcaaggtttgccattatggttggcccagtatgttgtttatggaagacattctgaagcaggtctggaaggtaaatggaattctgttgacgatttgaagaaatatttaaaagagtttaagcaacactcattgcgaaacccaatcgtagagcaggtagttacagagatattaagggttgtaggggatatctggcaacagtatggaaatggggtaaaaggtttttttaacgaaatacatgtagagctaggtagagatatgaaaaaaactgctgaagaacgtgcgaagttgactaggcagattactgaaaatgaaaacaccaatcttagggtaaaagctttattagctgagcttctgaacgatacatctgttgaaaatgtccgaccttattcaccatctcaacaggaaattttaaaaatctatgaagatggtgttttgaattcagatattgaagttcctgaagatattcaaaaaataagccgtatagcgcagccgacaaagtcggagttgcagcggtataaattatggctggagcaaaaatatcgctctccttacacaggtgaaatgattcctttagggaagctatttacacatgaatatgaaatagaacatatcattccacaaagtcttttctttgatgatagttttagtaataaagtgatttgcgaatcggctgtaaataagttaaaagataatcagctaggtttagagtttatcaaaaataatcctggacgtattgtagaaataggctttggaaaaactgtaaaagttcttgatgaagtctcctatagacactttgttattcatagttattcgaataacaggtcaaagaaaaataaactcttgctggaggaaattccggaaaaaatgattgagaggcagatgaatgatactcgttacatcagtaaatttgtattgtctgtactttcaaatattgtccgtgaagaagcaaatgatgatggcgtaaattcgaaaaaccttattcccggcaatggaaaaataacttctgagttaaagcaggattggggattaaatgatgtttggaatgaacttattctgccaagatttgagcgtttgaacgaattgacaggttcaaaggattttacaacctggaatgaaaatcatcagaagtttttgcctacagtacctctagctctttcaaaaggttttacgaagaaaagaattgatcatagacatcacgctttagatgctttagtgattgcctgtgtaaccagaaatcatataaattttttaaacaatgaacatgcattgcataaaaagaaaagtaaaacggaaaaacaaaaattcagacatgatttgaggacagctctttgttttaaaaaatacaatgataagtcaggtaaagattatcaatgggtgtttaagaaaccctggaatgattttactcttgattcaaaaagtgctttggataaaataattgtaagctttaaacaaaatcttcgcataattaataaggcaacaaataattatgaaaaatggaccgatcgggatggttctaaagtaaaagagttacataagcaggatggagtaaactgggctactagaagacatattcacaaagatacagtttccggaaaagttgatttgaaaagaataaaagtccctaatggaagagtattgacggcaaccaggaaaagccttgattcatcatttgatttgaaggctattgaatcaattactgatactggtatacagaagattttaaagaactacctcagaagtaaatcaaataatccggagctggctttttctcccgaggctattgaggatatgaataaaaatatcagaaaatataacgatgggaaattgcatcaacctatctataaagtaagagtatttgaactaggtagcaaatttccgctaggacaaacaggtaataaaaaaactaaatatgtggaaacagctaaaggtaccaatcttttctttgctgtatatcaagataaaaataaaaatagaatttatgaatctattcctttaaatgaggttatagaacatcaaaaatggaaggcaacattgcctgtagaacaacaaaaagatttaccacctgttccgattaagcctgaaaaaggagatttgctgttctggctttctccacatgatttggtatatgtgccaacagatgatgaaagagaaaatttttcgagaattaaattaaataaattaaccaaagatcaaaccaggcgaatatacaaaatggttagttgtacaggaggggaatgtcatttcgtaccatttgcttatgcttcaccaattgcgaataatgaatgtggaacaaataataagaacgaaaggttaatgcagttttttaaagaagatgatttattggaagtagataacaaaggtgttaagaagccaatcatgattaaagcaaactgtgttaaacttagggtggatcggcttggtaatatccttttatattcgtaaaaaataagtagtgctatagttgttcgctataaatagataaagagaaagcccggaattgtatttgttataggtttgaagttaaccacattattataatattaagattgaaaaaagttcggctgaaataccggactttttttcccagatgaaaacaaattcagtcaacgatctttgaattatcagaaacaacgataaatattttattnnnnnnnnnnnnnnnnnnnnnnnnnnnnnnnnnnnnnnnnnnnnnnnnnnnnnnnnnnnnnnnnnnnnnnnnnnnnnnnnnnnnnnnnnnnnnnnnnnnnnnnnnnnnnnnnnnnnnnnnnnnnnnnnnnnnnnnnnnnnnnnnnnnnnnnnnnnnnnnnnnnnnnnnnnnnnnnnnnnnnnnnnnnnnnnnnnnnnnnnnnnnnnnnnnnnnnnnnnnnnnnnnnnnnnnnnnnnnnnnnnnnnnnnnnnnnnnnnnnnnnnnnnnnnnnnnnnnnnnnnnnnnnnnnnnnnnnnnnnnnnnnnnnnnnnnnnnnnnnnnnnnnnnnnnnnnnnnnnnnnnnnnnnnnnnnnnnnnnnnnnnnnnnnnnnnnnnnnnnnnnnnnnnnnnnnnnnnnnnnnnnnnnnnnnnnnnnnnnnnnnnnnnnnnnnnnnnnnnnnnnnnnnnnnnnnnnnnnnnnnnnnnnnnnnnnnnnnnnnnnnnnnnnnnnnnnnnnnnnnnnnnnnnnnnnnnnnnnnnnnnnnnnnnnnnnnnnnnnnnnnnnnnnnnnnnnnnnnnnnnnnnnnnnnnnnnnnnnnnnnnnnnnnnnnnnnnnnnnnnnnnnnnnnnnnnnnnnnnnnnnnnnnnnnnnnnnnnnnnnnnnnnnnnnnnnnnnnnnnnnnnnnnnnnnnnnnnnnnnnnnnnnnnnnnnnnnnnnnnnnnnnnnnnnnnnnnnnnnnnnnnnnnnnnnnnnnnnnnnnnnnnnnnnnnnnnnnnnnnnnnnnnnnnnnnnnnnnnnnnnnnnnnnnnnnnnnnnnnnnnnnnnnnnnnnnnnnnnnnnnnnnnnnnnnnnnnnnnnnnnnnnnnnnnnnnnnnnnnnnnnnnnnnnnnnnnnnnnnnnnnnnnnnnnnnnnnnnnnnnnnnnnnnnnnnnnnnnnnnnnnnnnnnnnnnnnnnnnnnnnnnnnnnnnnnnnnnnnnnnnnnnnnnnnnnnnnnnnnnnnnnnnnnnnnnnnnnnnnnnnnnnnnnnnnnnnnnnnnnnnnnnnnnnnnnnnnnnnnnnnnnnnnnnnnnnnnnnnnnnnnnnnnnnnnnnnnnnnnnnnnnnnnnnnnnnnnnnnnnnnnnnnnnnnnnnnnnnnnnnnnnnnnnnnnnnnnnnnnnnnnnnnnnnnnnnnnnnnnnnnnnnnnnnnnnnnnnnnnnnnnnnnnnnnnnnnnnnnnnnnnnnnnnnnnnnnnnnnnnnnnnnnnnnnnnnnnnnnnnnnnnnnnnnnnnnnnnnnnnnnnnnnnnnnnnnnnnnnnnnnnnnnnnnnnnnnnnnnnnnnnnnnnnnnnnnnnnnnnnnnnnnnnnnnnnnnnnnnnnnnnnnnnnnnnnnnnnnnnnnnnnnnnnnnnnnnnnnnnnnnnnnnnnnnnnnnnnnnnnnnnnnnnnnnnnnnnnnnnnnnnnnnnnnnnnnnnnnnnnnnnnnnnnnnnnnnnnnnnnnnnnnnnnnnnnnnnnnnnnnnnnnnnnnnnnnnnnnnnnnnnnnnnnnnnnnnnnnnnnnnnnnnnnnnnnnnnnnnnnnnnnnnnnnnnnnnnnnnnnnnnnnnnnnnnnnnnnnnnnnnnnnnnnnnnnnnnnnnnnnnnnnnnnnnnnnnnnnnnnnnnnnnnnnnnnnnnnnnnnnnnnnnnnnnnnnnnnnnnnnnnnnnnnnnnnnnnnnnnnnnnnnnnnnnnnnnnnnnnnnnnnnnnnnnnnnnnnnnnnnnnnnnnnnnnnnnnnnnnnnnnnnnnnnnnnnnnnnnnnnnnnnnnnnnnnnnnnnnnnnnnnnnnnnnnnnnnnnnnnnnnnnnnnnnnnnnnnnnnnnnnnnnnnnnnnnnnnnnnnnnnnnnnnnnnnnnnnnnnnnnnnnnnnnnnnnnnnnnnnnnnnnnnnnnnnnnnnnnnnnnnnnnnnnnnnnnnnnnnnnnnnnnnnnnnnnnnnnnnnnnnnnnnnnnnnnnnnnnnnnnnnnnnnnnnnnnnnnnnnnnnnnnnnnnnnnnnnnnnnnnnnnnnnnnnnnnnnnnnnnnnnnnnnnnnnnnnnnnnnnnnnnnnnnnnnnnnnnnnnnnnnnnnnnnnnnnnnnnnnnnnnnnnnnnnnnnnnnnnnnnnnnnnnnnnnnnnnnnnnnnnnnnnnnnnnnnnnnnnnnnnnnnnnnnnnnnnnnnnnnnnnnnnnnnnnnnnnnnnnnnnnnnnnnnnnnnnnnnnnnnnnnnnnnnnnnnnnnnnnnnnnnnnnnnnnnnnnnnnnnnnnnnnnnnnnnnnnnnnnnnnnnnnnnnnnnnnnnattatttgattattagcttgttatctctgaaaatacgaatgaaaaatagatcgaaattctggtattctatttaaagaaaatgttgtttcttaaatcctcctgaattaaagcgggaggatttttaatttcaaaatagttcaagttgctcagggttagagtttttaaccttttgctcactgttataaaagatttccatgagaccaaattgtttatccgtaatacacattatccctacgtggcctttttcgggtaaaaagcttttcactctctttatatgaacttctgcattttccctgctcgagctatgtcttagataaatagaaaactgaaacatagtaaaaccatccttaagcatcttttttctgaattcagaggcaactttgcgttctttttttgattccgtcggtaaatcaaataataccagtacccacataattctgtattcatttaatctcatataaaccggggataagctatttttctgagtttcccttcaaagcattttgcgagggatgaggttgtgcgttgtactccaatcattaagggacttttttcttcatctattactacatccatcgttggaatagataatagttgtttttttgtagagttggtcaattcggtaaaatcttctccattttttataatgctatatactagactatcgacataaggtctatagggttccataatatcatctgcaagacaatacgcgttatattgattacgatggtatattcccagcgtaggtaataagcctgatccggtcagacttctagctactattgcccttaaaatggcataaccgtaattcaaaagattatttgggggatgaccttctctttcccttttaaattctattaaatgagatgccaagcttgaattttcaattaattggatattgctgaataaatttttccaataaaaaacagctgctctggcttccaaattatccgaatctccggatttcacgtcatcagcccactttaaaagattttcatggttaataccattctttttcagaaggagtgcctggttaaatattttttgttttacagtttgttgccaaagttgtttctttaagggaagggtagcatcagcttgggttttaaaacgtgcagactggagctggttgccatcaagattcaacatgagtccggttggatgatgagtatgatcacatgtaataagagcagcattatttgccagcaatttcgccatcagggaatgactaatagtgatttgctgatgatcaagaatgacaacaccaatatcttcgattggtacagtattcatttttgtaagatcatcgattcccttagctcctgggaaatttataaccaattgctcatcccttgtattgagatatgccgggttgccaaaatatagagtcttcttgatcatattccgttcttgagaggaaagtaaacttctttcagaattatatgttcaaggagcgattggaatttcagataaaaaatgatggaggtagtagatatttattctttagtaatttggctttgtgctttgatttctctcactggaatgtttaatcagaataaaaacactattgacaccatcccgatgccaatagattctataaacatcattcaggtagtcttcgatttttttaatctaatcataattaagctggtttaaaagttcttactatttcatttgttctcctgcattataaaaagtcaaagaggagagaaggagctctgatattgttcagagaggttgacttcagtgaggtacaccaatactcacctcgatagtcattgcatggataatcggatcatatcttagctggttttaaaaatttttacttctttagttaactcctccagccttccgacagggcattcttacattaattcaggttttatcatttagcttctgtcttgtgctgtgcaagtctggaagagctcttgtaaaatgaccgaatgtaaatccagtaaacaatttgaatataggtttgaaataggtaatttagtacatttaaataattaataaacgtacgtggtgagtttataaataagttatccggggcatttgaaatcatgaagaatttaagcataatatatatattcttattggctctcgttagttgcggtattgaacgctatgatgatggcagtaaattatataagttctactattttgatggaactctaaaaaaaactcaattacagaaacctggtgaaggtattggaaatggttattggaaatattatgatgaagatggtaatattactaaagaatttcagaggactggtggaaaatccaatggaatggtaaaattttattggaagaatggcaaattgaaagctgaggaatttatggtgtttggagtattgactggaagctatacgtcttattatgagagagggagcaaagaatatttaggtcagaaagttaatggtaaatttgaaggcgtttggttgcatttcaatggagacggtgatactctacaaaagttcttatataagaatggagaacttattggggaaacatctcttgcccagacaaaaaacaataaattaaaatgaatattagattaagagaccttttattgtacgtatttggagttgttttcattttgtcatgcgaaagcaaaaaaagtggtcaacaatctgagaataaaaagtcattgataaaacgtgatactattaccagttatttccccgaaaggagagaggtacatattactgatacaattttggatcctgaaaatggatttaaagtgttaattaaaaagacatcattaaagaataaatttgtagtgcagagttttgaggctgataataatgaagtacaaaaacatatttactatgacaattcaattttagttaaagtattttctgataacaaagtccttttagatacattattaacaaaggataaattagaacaaattggagaccgagatttcttaaagcaggctatattgtataatgcctggattgatagttttgataaagacaaacaagaggttgtagttttattctcagtgaatgttccggatactgattgggcttatgatttttctattattgtatcaaaggacggtagaaaagaaattttgcttgatcgaatcgaatagtaaatctgattaaaatactattgacacctcccgcgatgccaatagtattccataaacatcattcaggtagtcgtcgattttttaatctaatcatagtttagctggttttaaaagttcttactattacatttttgttctcctgcattataaaaagtcaaagaggagataaggagctctgatattgttcagagtggttgacttcagtgaggtacaccaatactcacctcgatagtcatcgcatggataatcggatcataacttagctggttttaaaaatttttacttctttagttcacctgcctttgtgaagaaatcaataagcagataaaagatctctgatgtgtttttcagatcagagcagtagacatcgttttctgcatagtagatgtacatgaaaaagacatagatcagcaccttgttcatgtcctgaggtgtaatcagcttgagcaggatgtccagctcatcaatgatttcctgattgagtacagtgtcttcctgtaagataacagctactctctttaatggatttgtttccataaatgtttgtttgggttttgtgcttcgttccgcaagcggttaaaaataagacgtaaaaaaagcgtggaacagtagctaccgatatagaggtaccgcgaagaacccgagatacaatagctacgcccacgcaaaagcggaacaccagctattcttgtatctctgaaaattcgcggttttctatatgcaagaatatgctaacgcaattttattatatgtaaaagtctttatgtcttgactctattcgataatcattacagtgttaaggttgaacggggcaaagatagggaaaaagttgaaaactgaaagtcaaaagtttaaagaaaagtgaaggataaaatatattaaacgaagcggattcgcactagaaatgtgagcgttggaagaagttttaaaagtcagtttgattaatgcttatagagttagatagtgcagtggggcacgctttacgaaagcccgccagcctgatatttgactatgttcacgcaattagatgaaaaaacgtccatttgaggctattaaattaaagttgaaataatagtatagatgccttatggttgtacatcataaaaaatattctaaaattacattcaatttcaaatttttatagtattaaagtttcatgaagcaaaatcgtttttatcaaaatagtaaatttttaaaaattctgaattcattttttcagaaaaaggacattctaatcttagtgaataaacttttcatttttgcctttatattttatttacaggcctgtagttccggtacagatcctgagagaagattacaggagttaaaagcgtttaggaaaataaactcttatgctcaaccctggagcggacttgagccctttttggagaaagctaaatggggatttaagggtgaatatggaaaggtagtgcttcctcccatctatgaagacatccatatacccggatcggacagcttctatgaatatctgattgttaagaaggatggcaaatgggagttatatccactagtggtaagcaggttattccatataagtttgatgatataagatttaactatcaaaactattatgttttaaaggatactaagttttctgtgaaatctgaagataaatggggaatggtagaccttaaaggcaaatacctgatcttgccgcaatatgattctataggcaattgcatctccatgcaatattattttgtaaaagtgggtaaggcaaataagtatggatatgcaagctttaagagtggcaaagagcttattcctgttgaatttgattccatatggttctatggagaccgttttgttcaattttgttccggaaaaaaatatggattctttgattttctaaaaaagaaaaaaacaattcccgctctctatgatgaaattttgcccccatactataaacgtctcacagttcgaataggtgaaaagtatggtgtgattgattggtctggtaaaacattaataccattgaaatacgaagctttaagacagcatcataactatgagtatttattatctgatgtaaaggttaaaggtaagtgggggattatagattctatgggaaaagtagtatttccaatccgctatgactcgatttattataaagaggattatgatttagctaaagtcaagaataataacctttggggatttgtaagtaagacaggtgaagaaataattcctgtaatatatgaagaaatagaccatttttttcctcagaaactaatgatagtaaagaaaaatggcaagtggggagtcattgacaaagactcaggtgttgtgatacctataaaatatgatgctattcattatgcaatggttgatggagcgaaacaacccgatagcccgcctactaaagtaatgcggaatggaaaatggggatttattgacagtactggaaaggaggttactgaaataaaataccaaaatatcggatttacaaaaggacggatgattgctgttaagtataataataaatggggtttcattaactccaaaggaactcccattacttcatcgatttatgacacgattattccatttcataattatcgttcttatgtatgccgcaggaatggaaatttatggggtattgtaaatccgatggggaaagaggtaacgagcttcgatcatgatgatttgcataagtattctgacggctggattattttcaagcggaatggggattgggaattgcttaatgagtcgggcaaaccgattgtatacttcaaagagttatatgatcaaattattcccaacactacggatttaacagctgttatgaaagacgacaagtgggggtttattgataattcaggtaaagtaatagtgccattaaaatatgatgagataacttctggatggacaaatggaaagattggggtcagccttgacagcaaatggggaataataaataataaaggagttttaatcgagcgtattaaatcagattatgataaaatggctactgaagagtaagatgtaatttcatttgataggattagtgatttaatttccgtcattaaggtattgaatacgggcaatttataatacgtcccattatattagttttcattcttttggaaagctcagatgcttcgcaagctcaacatgagcatgcaatgatttattatgttggcctatggtgtgccacaggccagggataagagcagtagtgatatctttgtaactgctaaaacttataccctaatgtcacaaatgtattgaaagtctttattctattatcgacaggtatatcaaaaacattgttgaacgtaaattgataacgactcgtcacgtgccaataaatattttcgtttatgttgcatcctaaagtaatacctccaaggcctgcaattaagaatgaattatactctggttcagcggaataatcagaagatgagcctatattgagcataggagaaacaccaatgtgcgcccctaatacaaatgatttatgaagaggaaatatattaaaggttattggcgcttcaatatatttgccttttaccttgaatgttttatctgcaaggacacttccattaacatctgtaatagttacaatatccttatatccatatgttgaatagcttggctcaattcctatatcgaatatttttgaaatgcctggataaaaaacaaggccaaaagaaggcgttaaaatagaattaacattcatgtaaggactatcaaagtctattttgctaatgttaatccctcctttaattccaatagattgagagaatgtaataacgggcaaaagtgtaaagattaaaataaaaatcttcttcattgtattgatgtttattgttgaataattaaaaacaaagtacaaaattattgaacaaaatagatttatccaaagaagagatttcattctttttaaaccgttaaaaaagaacagaataaagatagatcattagtggaactcaggacaaggcaatactttaagtttctttatacctttcttcttattgaagatataggtgatattcagttcatgtgctccggcaggacgggctgtttttaatttggaaactataaaatcataactgtatgtaagcctgaattgcttgattctccatcctgccaatacgatcatagattcgttattctgaagtccggaattatacttcttcacaggaatacctctgtaccacaccccaagaacatattcgttgtaaaataaatagactcccatatctaattgatctgactttccctgaaacttatactgaacagtaggaataaggtaaagtgattgtgttgcataccccatgtgatttttagtatcacctttaatagcttcaattctgtagcccgcagtaattgaatgttttaatggtagagggctactttcgttccagtaggattgattgggtctgt

SEQ ID NO: 1309 - DNA, 17613 bp, synthetic construct
  variation 17054..17284: note = n is a, c, g, or t
  misc_feature 1..17613: note = Synthetic
  source 1..17613: mol_type = other DNA
cactagttgtatttctctcaaaagacaacttctctccatatgacctcaacaaaataaccgaagcaggatattgtctcatccaaaccaccgatgaagcacaattagtggaagcagtaaaaacacttcgtccgatattcttaggggaattaaaaccggttgatgatagcccaaatgaaaaaggataactatcggcaaattcaagctacttcaaactcgtttttatcgtatttttgccgataacggtatatttataaagtagatgaaatatatttcagtcaatgaacacaaaaaaaacaccttcaacaatagatcgggaagcattatactatcaagctattcaaatggcctatgatacctttttggaagaagaaaagaaaggacaaatttttacggagttgcgattaatggaagccataaaagcagcaagaacattatacaaaccatttaaacaaaaagtaaatgcaccttttcaaaaataacaaggaagctctttccacactcaaagaaatgtcctttcaactggaaaagaacattcagaaactctttgaacaaaacttggagttaatcacgaatcttaagttgattaaatccgaatttgctattaagagcaatcgcattgatacgttggcgtttgatgaagaaagcagatctttcgtaattatcgaatataagcggaatcaaaactacagtgttgttgaccaaggagtttcctatttgaatctgatgttggaatacaaagccgattttatagttgagtataacgaaacacaaaaaggcagccttaaacgtaacgatatagattggtcgcaaagcaagatcatttttgtatcaccatcctttactgattttcaaaaacaatcttccaatttcaaggatttagcgattgaattatgggaaatcaagcagtttgaaaatgatattattgttatcaatccgatcaaaaaatcgaagtctgctccaagtattagacaagtacaacaaaatgacaattcggaaatcagcaaagtagcaaaggaattaaaagtatatacagaagaagaacatctggaaggaaaatcagatgatataaaagaactttatgaggtttttaaagacgcaatcctcagtttaggaaatgatactgatataaaaccgaaaaaacaaagaatcggttttacttcaaaagataaaatatttgcagatgtctgtattttaaaaagcaatctaaaattttggattaatttaaaaaaaggaaaactggacgaccctaaaaagttagcaagagatgtctcatctattggtcactggggtaatggagattatgaaattattgtatcagatacatcaaatattgagtacatcatgagcttggtgaagcaagctttgtagttatgtgttttaactactcaaaattatcttcagtaattacagatcatctaaattagaacttctggtttttggaagaaaaacccccaacaaaaaaagctacctcatctgagatagcttttccgaaaaattatatgaaattaattagatcttcttgacgttaactgcattcaaaccttttcttccttcttcaatatcaaaagaaacttcgtctttttcagtgattttgtcactcaaccccgttacgtgtacgaagtattcttttcctgtttctgcatcaacgatgaaaccaaaacctttagtttcgttgaagaattttacggtacctttattcattttgtatttattattttctacgaagataccgatctgagtgaaataacaatgaaaaaaaagcaaataattgaaaataaatttgttttcccgggtaaatgagcgaaaaagaaatgggttaccgctccagtcgcatttcaacaattgaacgtttgaacccgaatttttcacagatcggagcaagggaagaatctccttttaaatgcagtgcaacatctccttttgcatggcgcaacacctggtcgatcatgttgcgtgcaactcccttgtttctgaatttatcagagacggcaatatacaccaacacattttctgccatgtacccttccattcctgtctggttaacaatcgcagctcctacaatttctccgtgtgatttattgacaatagtgaatccaccaaacgacaagcgctcttttgtggcatattcaatggcttttcggataaactctttattgggttccataccttccaggtattcggaaaggaagtcgacgattttgtgcttctccatttgagaaggtctgttggtcgcgttaaacaacaaattttctgtaataatcccatctaaagtctgcatattggagtagtatttgagtgaacaaacatctaaaaagtcgtcttttttccttggatggtctcgttaagtgtctgcaagatacacattatctgaagacatcaatgacttcgatcggagttattggccacagataaacatatgaacaatctgaacgaatattaacaggaggtcattgaatatttacagttattttctataaaatcccatttcatccacgtagttgaaaacaggtggtgtaagcaggtagcgaacgtcttttcctgccgcaatggatttccggatgtagctggaagaaatgtgcatcacaggtgcatctttgagaaaaacaaccgacggatacaggtgcaattcatttgtttcctgttcccggttttccatttcctgcaaggtaaaaacgcgcgggtagacaaaaatgcggtaattcttaagtaagtagtcgtagttgtaccatttgtgcagcgtacgcagattgtcctctcccatcaacagggaaaattccatgtcagggtattgctcgctcaacactgccagtgtttttgctgtataacttggttgttccaatgaaaattcaatgtcactggcacgtagtttcggattgtcgtcaactgcttctttgaccaatgccaaccggtgatgatctgccagcagggtctttttatctttgtggggattgtgaggagaaacgacaaaccagacctgatccagatcggtgtgatctaccatgtaattggcaatgatcaggtgtccgacgtgaatcgggttgaacgagccaaaatacaatcctactttcatgcgtgaatgaattccttaaccagttgttttgcttcttcgcacgccgtttccaggtgatcattgagcagaataacatcaaattggtctgcgtggctcaactccagtttcgcttttgccagacgtgtttgaattttctcttctgtttcggtagaacggtgacgcaggcgtttttccagatcggcaacagacggaggttgcacgaacactgccaacgcatgttttcccaatttctttttcaggttgagtccgccgacaacatccacatcaaaaatcacaacgtgtccgtttttccagatgcgttccaactcggaaaccagggttccatagtaattgtcggtgtatacttcttcccactcgacaaaggcacctgctgctattttcgctctgaatccttctacaccgatgaagtagtaatcttttccgtctacttcattgtgtcgcggggatcggctgcaagcggaaatggagaattccagttctttcagatgcgtcagcaaatagtgtacgattgttgtttttccggctccggaaggggcagaaaagatcacacatttgcctgtatgctttaattcggtcattttacaaggtatttaacacctgttcttttattttttcgaggttgtctttcatgtcaacaaccagtttctgcatttctgcgtgattacttttgcttcccaatgtattgatttcccgtccgatttcctgtgaaataaacccgagttttttacctgcccccggtgttttcatcgtttccaggaaataatccaggtgattggcaaggcgcattttttcttcagaaacatccagtttctcaatgtagtaaatcaattcttgctccagacgattgtcatcgtacccgcctgcggaaatgtcttccaatcctttgcgaatacgttcacgcacagtttcaatgcgttcctgctcgtatttgggaacttctgtcaacaatgtacggatgccttcaatacgctctgtaaattctttttccaaagccattccttcctgtctgcggaactcatttaatttaccgcatgcttccccaaccagtttcaataccgtttgtttttcgccttcggacagttcttcccgttcgttgacaaaaatctccggcatgcgcaacagtacggacaagtaatcttctgtggtattaccgatctcatcgttgatggacttcagatctttgaaatatgcttttgctaaatctgcgttgatggaatacgttttggaatctcctgtgctgtccaggttgatcgtcaaatcgatttttccccgctccagttgttccgtcacctgctttctggcaagtggctcgagttctttgtaatagttgtgtagtcgtgcgttcaaatccagtcctttgctgttaagcgatcggacttcaacggaaatttttttactttcaaatgttccggaagcacgcccgaaacctgtcattgacatcagcatatttgcaattttcgccaaagctactaaaaaacatagtatttcaaccgtttttagctacaaacaccctagtaaaagcatctaaaacgttcactcttattccccatcatgctaatttctttactgatttgtctaaaaatagctcgccaagccgctaaggaatgccttattctgattgcgtttttgcacctttgtgagaacaagttaaatgcatttaaaatttaatcaaaaataaatgtgtttgtcctgtaaaaacagtaacctgtcaatgagaaagtgcatatttaattgacactaaacgagaagaacaaggattcagaaggtgaattcttcatggtctctcctcgcttgatgatatccatcaattgggcaacttcaataacagataaaggactttttgttcccagtgaacggtgttgctccaatttgtattcagctctttttattgcattgttaatcataaccttcaattttaatttcaattcacaagcaccatttacgggaagaattttcagatggttacattttttcaaaaaaataatgttgataacatttttgaacgcatcattaataaacaatatttcgttaaaaatcaacaacataaccacttgttttaaaatgaacttttcaacaatttaatcacagctatttccggagaagtcatctttctgccccggcgaacggtggcagcttcaacgaaaaaagcgggtgtttccgaactgtttgacgtgtattgatttaccagccaaacagtatacggaaacaaagctattgaggtgaactagaaccggcagacggttgaggcagccatcatgaatccctcctagggatcaataaattcagcacgaataaaataacaactgctcccaacgctccggtcaagatgaaaccgatggttcctcctccgaaactgacattcaacaagccgagcaaccagtagcccactcctgctccgacaattcctactataatgtttccgattaagcctagtccgcttcctttgtacaatgttccgcccagccatcctgctatggcaccaacaatcaatgtccagattactcccatgtttagttgttttaattggttaatacttcccaatttaacaacttaagacattgcaaacaagtttttttagttattttaagatttttccgaacggttatttcagtactttttccgtcactgctttgttcttattggccaactgaccgcacgctgcatcaatatcttttccgcgacttctgcgcacattgacaaccaaccctttgccttcgaggtatgcggcaaattcatccgtttttttcggatcggcgcgctggaatgcagcatcgtcaatcgggttgtattcgatgatatttattttgcagggaacgcaacgcgaaaatgccagtaattcacgggcatcttcaatggaatcgttaaagtctttgaaaatgatgtattcaaatgtaacgcgcgttcctgttttttcatagaaataggccaatgcttcggctaatgaatccaggttattggtatcattgatttccattattttactgcgtttctcatcattcgcagcatgcaaagacaaggcgaggttaaatttcacctcgtcgtcacctaattttttgatcattttggcaattcccgccgtagaaacggtaatgcgtcgcggagacattcctaacccttctttagaagtgatgatttccgtagaacgcaacatgtttttgtagttcagcaatggctctcccattcccatgtatacgatgttcgacaatggaatgttgtaccgttgttctgcctgatttttcaggtacactacctggtctacaatttctccggcagacaaatttcgcaacaatttcaaacgccctgttgcacaaaacgtacacgacaaactacaacccacctgtgaggaaatacacgccgtcatgcgggaagaagtcgggattaaaacaccttccacaacctttccctgttcaatttcaaacgcgcatttgatcgtcttatcagacgaaatctgctggtcggccacagcaattccatcaatgtagaaatgtgtttccaattgcgctctcaattccttgctcaggctggacatttcttcaaacgaatgcgcatttttattccacaaccattcgtacacctgcttggcgcgaaaggcttgctgaccgaaagcaatcatttgcgttttcagttcttccagcgataaattgcgaatgttgatcttgtccgtgttcatatttcggtacaaagatagggaatttttatcctaaatgctgcattgatagttaaatccatgcacctgtctgctgcgctcagaatctacgattttacctgcatctgttccgatttcaaattccggtaacggcaactcgttttctacggcttttcgggtgtaataactttttctggacggatgatccggatataccaggttatagattcctggttccacccgatcttccaaaatgagtttcataaagtccaaaatatcctgtttgtgcaccagatttaccggcttttgtccatcggcaattccttttctgcctgctaaactgaaaaccgggtgccgatctgctccgatcaatcctcccaatcgtaaaatcgttgctcttcccgaaaattctgtgagcaaaagctgttccatcaaataatagactgaatctgtcttcaattcggtactggcttcatccaccactccctgatccgatgcgtagacgccaattgttgaagtaaatactacctggcattgttgtgacactttttcttgtaattcattaacaaaaccagtaagttgtaacctgttttcttttggtaatgttgcggtgataaagagcacatctaatttctcaacaaatgcctcggggagttcgtcaccaaattcgaatcgaaactgattgtgggattcaactgattgcttacttctgttcgttgaaacaaccgatatatcggaatttactgataatgttttcaccaggtctttccccagccatccggctccaataactccgatttttttcattttctgtttcgttgtcgttaaacttttacaacaaaatgttctttccgctggcccgatcgtttcaacagcatccccattcgaaacaggtcgacagaaacatggaaccgctcatccttacaaagttgttcccaggctccaaacatggaatcactccagcgaatgtcatccagaatcaggaaggtgtcatcgtgcatgcaaggttccagcaaatcgacatatcgcaataaagcgataccatcgtggtgtccgtcaatgaaaatcaaatcataggatttcagttcattttcattcaggaacgtatcaaatgttttgtttactaatgtaatcgtgtctgtttctgtttgctggaagtttttctgtgcaatttttgctgtctccggacatgcttccaccgttgtgatggatgcattggggtttccttttgcaaagtggatggttccgattcccagagatgttccgaattccaaaatatgttccggtttgtaaaatcgtgccaacttgtaaaataagcgcgcatacctgcctttactggaactgatccgaagaatatcgtctatttttcgttctttttttaaggttttggaacctgctccgaaatctgagacctgaatgactctccgatcttttgacagctgatgtaccaaggtttttatacgaattgcatcttctttttcgacaggggtccggagacattcatccaccagtttataaataaaaggagaatgagttccatgccttcctttggctttccagcgatattttatatattcgaacacaaaattcacggtacaaagtaaatcaattgtgattaagaatcaggtatgaacagcgaagaaaaaataaacggacagcgtgaacaggtgttgaacgaccaatcaaaagtgatgttatttgctccctgcagaatcggagaaggaattcttcaactgaatgcagaagagtggaacacgaccatccgatcgtttcaaacgagtaatgcttcaccgacgtatttcattcctgcatccggatccggatcacgtatgtttgcttttttgttcgattttttaaatcagccgaacacatcggatatcggatctgttgaacgttttatgaatcacattcaggagtttgctttttaccagctgcttcccaatgatttgaaattaaaaatccgtgaaaatgcacttgatgcggaagaattagccaatttcctactcggtcggtccggtctggattttggaaatttaccgaaagggttaattccgtttcactacaatgagccgtttgtactgaaccctttccaggaacacgtattacaaggaacgcgcctctctaatggaagagcgaagtttcattttacgattcaacctgaatttgaagaaaaaataaaggcaagcattgttaacctggagggattaaccggtaaacaatatgctgtctcctactctacccaatcaaaagaaacggatgcctatgcatttgatcaaaaaggactggtagcattggacgaagggaaagaaattcgccgtcctgcgggacacggggcattgctcgaaaacctcaatgggctggacgaagaattaatctttatcaaaaacattgacaatgtacaacatttcaactcctcgaattattcactggaaacatggtctgtactgggtggtttactccagcaattcagagttgcactaagtgcgctgtcacgcaatccggataaagcaaaactggtcgaactgaacgacaaatatcaattcctttcacctgcagaaatcaatgccgtacggaccaatgaagaactaattcagttaatcaatcgtccggtacgtgtgtgcggaatggttcgcaatgaggggcaacccggcggcggtccgttctgggtagatgacaatggtgttatttccaaacaaattgttgagaaagctcaaatttcgcatcatggagaacaattccgcctgatggtgaaaagtacgcacttcaacccggtaatgattgcactgtgtccacgggatctgcaaaacgaaaaagtggatttaactgctttccgcgacaattcgaagtatttcattgtcaacaaaactcaaaaaggacaggaaattaaatacatggaactacctggtttgtggaatggcggtatggcgaactggaacacgttgtttgttgaaatttctcaaaaaacattcagtccggtaaaaaccgtattggatttattggaagaagggcatcggggatgactcacttaatactatcatcacgaacaaccttcgtacaatagttgaagaattatctttttagttgctcgttacttctttcttttacgaagtgaactctttaagcataaaaaaacctcctgattatggacaagaggtaacccaaatgttttcacaacggaataatccttattgtgatttgctttcaagttcagcaaatataatatttttcatcaaaaaaatccaggtatttctacgtaaaaatagttgagtggaaaaaaagtatggttgaaatcgttatcttcatactttaaaatttcactaaaaacggcactttcatcacgcggaatgattatgaaaaaaatattgggactggatttaggaactaactcgattggttgggctttaattcaacaggattttgacaaaaaacaaggaaacatactcggaatgggaagtcggattatcccgatgagtcaagatatattgagcgagtttggaaaaggtaattcagtatcccagaccgctgaaagaacgagttatagaagtacacgtagattacgggaaaggcatttactccgaagagaaagattgcatagagtgttgaatgttttaaactttttacctgaacattatgcgaatcaaattgattttgaaaaaaagtttggaaagttcaaagcagaatcagaacctaaattagcttatcataataatcaattcatttttaaacggtcttttgaagaaatgctggaagacttcaaaaaacaccaaccagaattattgacaggagaaagcggaaaagaaaaattagtcccttacgattggacgatttattatttgcgcaaaaaagcattgtctcaacaaatagacagacaagaactcgcttggattatcctaaactttaatcaaaaaagagggtattatcaattgagaggcgaagaagaggaagaaaatccaaacaaactagttgagttttattcattaaacgttgttgatgtaatcccggatgaagaaaccaataaaaaaggagaaaactggtattctttacagttagaaaatggttggacataccgacgttcaagcaaaacatcattgaatgattggaaaggtaaaacgagggattttattgtaactaccgatttaaatgatgacggtacaataaaaacagataaagaagggaatgaaaaacgtagtttcagagctccaggtgaaaacgattggggattggtgaaaaagaagactgaacaggaaatcgagcaatcgcacaaaacagttggggcatacgtttatgatgcattactccaaaatccaaaacaaaaaatcaaaggaaagctagtccgtaccattgaacgaaagttctacaaagaggagttaagaacaattttaaaaaagcaaattgagttacaacctgaattatttaccgaagatgcatatactgactgtgttagggagctttaccgcaataacgatgcacatcaattaacattgagtaaaaaagattttctgcatttgtttttaaatgatatcattttctaccaaaggcctttgagaagtcaaaaatcatccattgggaattgcaccctggaatatcgaaattacaaagttgatgagattgagaaaaaagagcatttaaaagctattcctaaatcgaatccctattatcaagagtttagagtttggcagtggttatataatctgaaactatataaaaatgaagatgatacagaggtaacaaacgaattcattaaagatcaaacggataaagaaaaactgtttgattttttgatgttgcaaaaagaggttgatcatactgacatcctaaaatatttcttcaaagagttaaaaggtaaagtactaacaaatgaggtgggtaaatatcgttggaattatgtttatgattcagataaaaaggaatctaaaaaatacccgatgaatgaaacaggttatgaaatcaataggagattaagtaaaatagaaactactcctattaattttttggatagagaaacggaacaaaaattgtggcacattatctactctgtgacagataaaaaagaatatgaaagtgctttaaaaacatttgcacaaaaacatcatttagatatagaatcttttgttgatcatttcagaaagtttcctccttttaaaagtgattacggaacctattctgaaaaagcaattaaaaaattgctccccttattgcggataggaaaatactggagttttaattctattgacaataaaacgaaaaacagaattgacaacatcatcaatgctgttgatgatgaaggaatcaaattacttgttagagaaaaggctgaaaaacacaaactagaaacagaagctgatttccagggattgcctctctggctagcccaatatattgtgtatgacagacattcagaagccgatattgccggcaaatggaattctataacggatttagaaaaatttcttgctgatttcaagcaacattctttgcgcaacccgattgttgaacaggttgtaaccgaaacacttcgcgttgttaaagatatttggcaacattacggaaatggtagagaaaatttctttgatgaaattcatattgaactaggtcgggaaatgaaaaatacagctgatgaacgtaaacgattgaccaatatcgtcactgaaaacgagaacacaaatattcgcatcaaagctctgttaattgaactgatgaatgatgctacagttgaaaatgttcgtccacactctccaatgcaacaggaaattttgaaaatctatgaagatggagttttaaattcaaacatagaagttgacgatgaatatttgaaaatcagtaaaaaagcagaaccaaccaagtccgaattacaacggtacaagctatggttagaacaaaaataccgctctccttatacagggcaaatcattcctttaaataaactttttacacacgaatatgaaatagaacacattatccctcaaagcaggttctttgatgatagtttcagtaataaagtgatttgcgaatctgccgtaaacaaactaaaagataatcagctagggcttgaattcatcaaaaaccattacggtcaaaaagtttctaccggggttggaaaagaaataccgattttcaatgaagatcaatacagagattttatcaaagaaaattattcgaagaacaaaagtaaacgaaacaaacttttgctggaagatattcctgaaaaaatgattgaacggcaattgaatgacacgagatacatcagtaaatttatctctaacgtcttgtcaaacattgtaagaagcaaacaagatgatgacggtgtgaattctaaaaatgtgattccattaaatggaaaaatcacatctgaattaaaacaggactgggggctaaatgatgtatggaatgatttgattttaccgcgttttgagagaatgaatgcgttaacaaatactgatttatataccacttacaatgagaaatatcaaaagtttttgcccacggttccttttgaacatagtaaaggatttcaaaagaaaagaattgaccacaggcatcatgctttagatgcgttgattattgcttgtgccaccagagatcatatcaacttattgaataatcagtctgctaaatcagctttgaaacgatatgatttgcaaaataaattacgtagcaaagaacgttattttcatccaatagaaaatcgggaaaaagaggcttttaagtcattttttaaaccttgggatacgtttacagaagacacaaaaaaatcattagaaacaatcattgtaagtttcaaacaaaatcttcgtgttatcaataaggctactaataaatatgaaaaatggattgagaaaaacggagaaaagaaaaaagaattagtcgaacaaacaggagtgaattgggccattcgaaagtccatgcataaagatacgatttccggtaaagtagaattaccaagaattaaggttccaaaagacaaaattttaacggcaaccagaaaacatattgattcctcatttactcagaaaaccatcgaatcgataacagatacagggattcagaaaattcttcaaaattacctactaagtaaagatggtaattacgagttagcgttttctccggagggtattgaagatatgaacaaaaatatcgcaaaatacaatgataacaaaccacatcaacctatttataaagttagaatttttgaaataggaagtaaattttctctagggcaaacaggaagtaaaaaagataaatatgtggaagcagcaaaaggaacgaatttattttttgccatttatcaggatgagaatggaaaaagaaattacgcaaccattccgttaaatgaagtaatcgaaagacaaaaacaaggattgtcatctgttcctgaaacaaatgataaagggaataaattactgttttctctctctccaaatgatttggtgtatgtcccaaatgaagatgaaattacttcgatgattgatttcaatcatttgaccagggaacaaacagaaagaatttataaaatggtgagtactacacaagacaaactcgaatgtgtacccgttcattatgcaagcccaattataaataatgaaataggctcgaataataaaaaccaaaacactatttatggaactcaggtaaaagcagtctgcatcaaacttaaagttaacagattaggcaccattttaaaaacttaaaaatgaacgaaatcatcatctatcaaacccaagacaatcaaactcagttagaagtccgttttgacggtgatactgtttggctttcccaggctcaaatggtagagttatttgcttcgagtaaagcaaatattagcgaacatttaaaaagcatatttcaatcgggtgaattagataacctttcaactgttcggaaattccgaacagttcggaaagaagggaccaggaatgtttccagagaaatagaacattacaatttagatgtaatcatttcaaccggttatcgggtaaacacgcaaagaggtgttttgttccgtcaatgggcaacgcaacgtctaaaagaatacctggtacagggttataccatcaaccaaaaacgcttggatgaactccgacaaaccgttcaacttattcaaacatccatttcagatgacaccaatttatctgaaacgaaagggttactcgaaatcattactcaatacacccaaagttttgtattactcaatcaatttgacagcaattccattcagttggaaaaattgaacgaagaaataacttacgaaatcgattattcagaggcacgaaatgctattttggaactcaaaaaacaactcattacaaaaaaagaagcaacagaattgttcggtaacgagaaagaccaaagttttgaaggtacactaaaaagcattgtacagacatttgacggaatttacctgtatccaagcattgaagaacaggctgcacatttattgtatttcattatcaaaaaccatcctttttctgatgggaacaaacgaattggagcatttttgtttatatggtttttagagaaaaataaacatcgttttaaacaaagcggagaattgaaaatcaatgacaatgcgttagtggcactggctttattggtagctcaaagtaatccggcagaaaaagcattgatgacaaacttaattatacaactcattaaaaatcaataagatttgtaaccttttcaattaaactcagtaaaaacggatacatcacctgaaaaaccgttttactatggtaaagagaaccctacactttagcaatcccgctcacttgagtgtgaaaaatcgtcaattgattgtcgaattaaaaaatgaagagcgattgacgcacactgttcctattgaagatattggagtagtaattttagaacatccgcaaattaccattacatcagttttaatgggagaactgttagcggaaaaagttgcactgattagctgcaatagtcaatacatgcctagcggaatgtttttaccgttcgatgccaatacagagcaaacagcccgcatgaggacgcaggtagaatcaagtctcccgttaaaaaagcaattgtggcagcagaccgttcgtcaaaaaatacagaatcaggccaacctcctccgaaaagcggggctgaacgatgaacgactgctcaatctcagagaaaaagtactgagcggtgacaccactaattgtgaagggcaagccgcgtcttattactggggacagttatacggaagtcactttatgcgatcaagggagcgaacatcacccaatgcacaattaaactacggatatgcaatccttcgttcagttgttgcacgggcactggctgcatcaggaatgcatccgtcattcggtatttttcaccgcaataaatacaatgcattttgcctggcagatgatatcatggaaccttaccggccttttgtagattggattgttttaaacctgctacagcattcggaaacagaagaattaacacgggatcagaaaatcgagctgttgaagcttccgcaaatggatatgcccattaatgacatcaaacgcccactgtttcatgctgtaagcattaccacagccggactctataaatgttacgatggcgaatcacggaaaattccgtatccggagtttgaataaaatcatatgagatgaatacttcacgttttaatgcatacagaactatgtgggtaatggttttatttgatttgccgacggaaacaaaaaaagagcggagagacgcctctcaattccgtaaaaaacttttggaaagtggttttatgatgtttcagttttctatttacatgcgtttttgtcaaagtatggaaaatgcggaaatgcataccaaacgtgttaaaaatatacttcctgaaaaaggaaaagtcggcatttttgcaattactgataaacaatttggtcgaatggaaatttttcatggtataaaaaaacaggaaaccaatccgccggctcaacaactgtcactattctgaacagaaaaacagaaatgaataattcagtgcttttttagccctaaaaaagaaaaagtcctgtttttttatttctaaaacaggactcaatcccttgctatttctacgattcaatacagaacgttgtaattcatccgtaaaaataaagaacttgaaagcaaatcacaacacgtcattcaaaaacttgttgtttttcttgttgtaattcatccgtaaaaataaagaacttgaaagcaaatcacaactagttggtggatatatttaatttctattgtgttgtaattcatccgtaaaaataaagaacttgaaagcaaatcacaacattgtgtcttttccattcaccatatatacagttgtaattcatccgtaaaaannnnnnnnnnnnnnnnnnnnnnnnnnnnnnnnnnnnnnnnnnnnnnnnnnnnnnnnnnnnnnnnnnnnnnnnnnnnnnnnnnnnnnnnnnnnnnnnnnnnnnnnnnnnnnnnnnnnnnnnnnnnnnnnnnnnnnnnnnnnnnnnnnnnnnnnnnnnnnnnnnnnnnnnnnnnnnnnnnnnnnnnnnnnnnnnnnnnnnnnnnnnnnnnnnnnnnnnnnnnnnnnnnnnnnngttgtaattcatccgtaaaaataaagaacttgaaagcaaatcacaacggaaaaaggtagtttaattcgtttgtatcagttgtaattcatccgtaaaaataaagaacttgaaagcaaatcacaactgttacgttatcctgcactgtcatggttgagttgtaattcatccgtaaaaataaagaacttgaaagcaaatcacaacgtaatacaccatctgtttgatagttgatatgttgtaattcatccgtaaaaataaagaacttgaaagcaaatcacaacaagttcttttgcaagctcttgtcttgccgcgttgtaattcatccgtaaaaa

SEQ ID NO: 1310 - DNA, 17552 bp, synthetic construct
  source 1..17552: mol_type = other DNA
  misc_feature 1..17552: note = Synthetic
gtcatttacatcatgcaataaagaatgaagaaaatgtttgaacttaggatttgattttctttactttgcaaaaaatttagaagcaccaaaatcatccttcaaaagtatggaagagaatctggtaatagtcgaatcgcctgccaaggccaaaacaattgagaaaattctgggaaaggatttcctcgttaaatctagttttggtcacatccgtgatctggataagaaagatttcggagttgatatcaataataattatcaaccaaattatatcatttcggaagacaagaaaaaggttgtcgccgaattaaaaaaatgtgccaagaccgccacgaaggtttggatcgcttctgatgaggaccgggagggagaggctattgcctggcatttgatggaggtattgcacctcgatccagaaaagacaaacagaattgtttttcacgagattacgaaagaagcaattttaaaggcaattgagaatccacgccgtctgaacagagatcttgttgatgctcaacaggcacgtcgcatactcgaccggttggttgggtttgaaatttcgccggttctttggaaaaaagttaagccatcactttcggccggaagagttcaatctgtagctgtacggcttattgttgaccgcgaacgtgaaataacgaattttcaaagcgttccattctttagggtaaatgccatatttttggttcccgagaataatggtaagattacaccactgaaagctgagttaaacaatcgtttcgaaacagcaaaagaagcaaaagcatttcttgaaaagtgccttggctctgaattcaccatcgcggacattgttacacgtcctgcaaagaaatcaccagctgccccttttacaacttccacgcttcagcaggaagcaagccggaagcttgggtttcctgtaggtttaacaatgtcggtggctcaaaaattatacgaatccggatttatcacttacatgcgtaccgattcaacgaccctttccgatacagcactccaggctgctaagaaaaaaataattgaatcatatggtaacaaatatgtaaaaatccgccaatataaaacaaaggtgaaaggtgcccaggaggcgcatgaggccattcgcccaacctatttagatcaggaagaagttaaaggcacaccgcaggagcaaaagctatacagccttatctggaaacggacattggcttcacaaatggctgacgccgaaatagaaagaacgacagttaatattacagtatcgaaagcaaaagagatttttgttgctgccggcgaggtgctacggttcgacggattccttggtgtatatatggaatcatcggatgatgaaaccaatggtgaagatgagaaaggtatgcttccgatactaacggttcatcaaaaattagaacctgaggtaattcaggcacttgaaagattttcgcaaaaatcagcccggtatacagaggcaagtctggtccgtaaacttgaggaactgggaattggtcgtccttctacctacgcaccaacaattacaactattcaagcacgcgaatatgtaatcaaagaggatcgtgaaggaacagagcgttcatttctgaccttaaccctgcgtgatgcaacaattagcgaagaggttaaaaccgagatcaccggtgcagagaaatcaaagttatttccgtcagatattggtctggttgttaacgatttccttgttaaacattttgaatcgatcgttgattttaatttcacagcaacggtcgaaaaacaatttgacgaaattgctgaaggtcaattggtctggaatgaaatgattgatggtttctatcgtccttttcatttgacaatcgaagataccctcaataactctgaaagagcacgcggcgaaagaatgctggggcctgatcctgtaactggaaaagaggtatcggcaaaaatcggtcggtttggtccgtttgtacaattgggcgaaatggttgaaggaagcgaagaaaaaccccagtttgccagtcttcaaaaaggacagagcatcgaaactatctcgttggaagaagcgatgaaattatttgatcttccgcgtgatctgggaatgtttgaagataagaaagtcattgttggcattggcaggttcggaccctatgtccgtcacgacgggaattttgtatccctgaaaaaaggaatcgatgaaccaatggaggtaacgatcgaacgtgcaatcgaattgattgaagaaaaaagagaacaaaccataaaatcagttctgaaaacgttcaccgaagagccggatatcagggttcttgaaggacgctggggtccctatatctcctttaaaaaaggaaactataagattaaaaaaggaactgatatcgaggcactgacaattgctgactgcaaattgatcattgaaaccgaaggagccaagcccaaaacgagtaagcgacgcgccaaataaaggtatcgaacggcttgtgcagcatctgatatttttaagagttaaccattaattctgtttcccatgttgaacgaactgattataccggcatcagcgttagaggttgtaaaacaatacgaagggagctccgatcagttagggcattttctgaaaagtcaggtctgggatatagatcatcttccgcatattgccattttaggtctgccggaaggaagaggctcactttgccatcaggtagaggcagctcccgatgcaatcaggcgtcatttatacacgcttacaacttttccagctgaaattggcattgtcgatcttggaaatattatatgcggcaacgaactcaaagatacctacgccgctgttaaaattgtgacggaggaactttcagccctgaacatccaccttctgatacttggcgggagccaggaaatgacagttccgctaattgacggattcgctaaaccggcatttaatctagtgatcgtcgatgacaggatcgacaataacataaaaaaaaatagtccagccgacgaattttttatcaacaacctgccgattgggacaactgtaagtgtaattgccggacaatcttattttatatgtcagcaggaacacgatattgtagccgaaggatacaatggtgagattttgactttaggagagatccgtgccgattttaaagagatggaaccactgctccgaagatctgatctcgtcagtttcgattttggatccattaaatcaggtgaagcgccgggtcaataccgcatttcgccgaatggactaaccggcgaagaagcctgtcagatagcgtggtattcaggtatttcaacaaaacaaacctggtttggcctttttggctatgccccgtcttttgacttcacaactgccggagcaatgatggcagcacaaatcagctggtattttatgaatggggtttctaaacgacttgacgaagaacctgaggacgaagccactaattttgaacactatcacattcctgtggatggattagatgagccgatctcattcttacgacacccggtatcgcaacgatggtggatggaagtgcccgatgaagattgtaccattttccccgtcagaattccctgtgccaaaaaagattaccgaaaagcttgcaaaaatgagattcctgaaagatggtggaaatatttcgacaaattataattagtaaagttatatctttgtttatgaaattgcgttaccgctaaatgcgaatccacaaaagttaccatcctgctcatgaattatgaaaaaacaaatatcaatgatagcataaggcaaatattgaacaatgctattctattgttgttattaataaatattagtatttttgcagcaaaagctcagcaagatccccagtttagtcagaatcggttgaatcaactgacagtaaacccgggctttgcaggatcatcaggacttataaacttttcattattaaatagatatcaatgggttggattcccgggtgccccagttacaatcgttttcaatgctgatgcatcagcccatttaatcgggaagaatgacggaattggtttatctgtagtaaatgatgttatcggttttgaaaaaaatatttcgtttggattaaattattcatggaggacaaaaatcggcaatggtatcctgggatcgggtgtttcgttgggtttgatgaataagaatcttgacatgtcggaaataaataggtggagcgattttgataatttcaatttaacagatccgggacttccccaaggcaaagcaacgggtgttttggttgacgtgggagctggattctattaccagtgtaaaaatttcgatcttgcactctctgccaggcacctgaatcagcccacgttgttgttcgaagaaacaggcaggtattcacttcgaaggcactattacatgagtggaagctacactgttcaaatggcagatgaacgattcgaagttcttccttcgttcttctttaaaactgaaacaacaacctggcaagcagacctcaacatgactgttcagtatgataaaagaatatggggaggaatcggttatcgcgtaaaagatgcaattattttaaccttcggaacagagttatggaacggtataaagtttggctacgcttacgacatcagtacgtcctcattatcaagatataacgccggatcgcatgaattatttctggcatattcagttttattaaacaaaaaacgtacgcacaagtacagaagtgtaagatttttgtaactttggcgtaaaaatatagttgagcacaacatattaaacgaactatgaagcgattgtttttctttggttgtatatcgtcgattctcttgttagtcggttgccacaaaggtggtaacggagaattgacgggagtggaaaaacggggcaagtattttgagccttcccctcttggcatggcgctaattccagggcgaagtttcaatatgggtcccggtgatcaggatgtggcttatgctacctcaccaacacggactgtcgacctatccactttctggatggacgacactgaaattaccaataacgaataccgacaattcgtttattgggttcgtgactcgatggcacgaacaatgctatccgatcagttcgcagaatttaaaattacagaggaccggaaaggtaatccgattgacccgccgattctcgactggaaaagaaaactcgactggcgcaatcccgattataaagatgctctggaaccaatgtattacgctggcaacgacaggatcctgggtaaaaaggaactcgatccaagaaagctaaactacagttattcgtgggttgacctgcagcaggctgcccgtcttcagaatgcttacaacttccagacacaaagttatcagggaactgtgaacgatcttacgggaaaagtggtccctatcgagggacgctcaagttttataatgaatgaaggaactaatatttaccccgacacattggtctggatccgcgacttctcttatgcattcaacgaaccacttacaaacaagtatttttcgcaccccgggtttgacgattatcccgtcgttggggtaacctggaaacaggcaaaagcattttgcatgtggcgtacgaatttcaaaaattcaacccttgccgaaagaggtgactttgccgtacaggattaccgtttaccatcagaagcagaatgggaactggcagcacgtggcggtttaaataattcgatgtatccctggggtggatattatacacgctctcaaacaggttgttttctggccaactttaaacccatgcgcggaaattacagcgacgatggaggtaaaactactgttaaagttgcaacttacgatcccaacggatatggactctacgacatggccggtaatgttgcggaatggacaattagtgcctacgacgagtcggcctataatttcatgcacgacctgaatcccaacttcgaacaaaacgcacttccggatgatccaccggcgatgaagcggaaagtaatccgcggcggatcatggaaagacatcgcctattttatccaggttggtactcgtacgttcgaataccaggatacagccaaatcgtatgtcggctttcgctgcgtccgttccaccttcggagatgagtttcaatcaaaaaaataacaacaatctaaaaaatactgattattatgggaatgtctgaattaacacattcaagtaagtggaaaaacttcatgaattattgctacagttggggagctgccgttgttttaatgggagcattattcaaactgcaacattggacaggtggaggtacaatgcttaccattgggatgtcaaccgaagtactgatctttttcctttccgcatttgaaccttctgtcgaaatacctgactggaaaaaagtataccgtcaactccgtcccgactatattggtattgaagaagaggaagaacttccttatccaaccaaacagccaaaatcgattgacaatatattcgagaaagccgatatttcgcctgaattacttggcaaaataaaaaaaggacttcaggatctttccaacgctgcaagtggaattgcagatatctcgagtgctactttagtgacggatgaatatgtaaagaacatgacaggcgcttcagaatcgatggccgctatcaacgatattaatacccgtgcaacccattcgattgaaaaatccacgaccgatctgatccattcttacgaccaatctacgcagattttgactaattcatcaaagaatctggctcagacgtttaacgactcttcgaaaaaaattaacgaacagctatctacatccggtgacaaacttgcacaatcgtataaaagttttacagaactgataaataaggatttgacggtcttaaccgatcaaaccaaaacctacagtaacggactttcgcatattaacacaagcttgtcggccttaaattcatcttacgaacttcatttacagaataccaaaaagctttccgactcatcggcaaaagcctttgaaggttattctaaaatgaccgaagtggtaaataattcgcttgaagaagctcagaaataccgcaaacacacagaacagctaaataaaaatttggaagcacttaaccatgtttatggtaatatgcttggagcaatgaacgtaaaaggttaattcgaagatgggaacaaaatactgtccggaagcgccccgacaaaaaatgatcagtttgatgtatcttgtattgaccgcgatgttagcgctcaatgttgacaaatcagtgttagatgcatttgccgtggtcaataataatttcatgcaaacaatcgaaaatttcacggctaagaaccagcgggtttacaacgatttcaacaatgcagcacaggaaaatccgcaaaaagcaggtgaactcaacaaagaagttttaaaagtgaaagcaagttccgattcgttgtaccgctacattttcagtttaaaagagttaatcgttaaaacggctgatggtcccgaaggtgatgtcaatgccataaaggcacaagagaacctaaactttgcggcagagattatgattactaaaaaaaatggaacagcattgaagaatgcaattgaagcctaccgaagttcacttcttgctttaattgatacctcaaataccgaattaataacttcaatcaaccagagtcttagtactgcacctcctccaaaaaaggaaggaagcacaccttcgtgggaatcgagtaaatttgagggatatccattgatagccgttattaccctaatgtcaaaaattcaaagtgacgtacgtaatgccgagtcggatgttatccatcacttatatgctcagattgatgcttcctcattcaaatttaataagcttcaggcgcaggtagtttcgaaatctgactttgttcttcaaggtagtgcttatgaagccaaagtttttctttctgctgtcgatacaaccgttaaaccggaaattattgttggtggatcgaccttgccaatgatgtcgggcgaaaatgccggattatacaaagttgtaacatcacgggagggcaaagttgaatggagcgggcatatcaattacaagaatccggatggcattatcgtcgcgtacccgttcaaacacgaatacgaagtggccaaaccttcgatgactgtttcgccaacaaagatgaatgtcttttatgcaggtctcgataatcccgtttcagtttcagtacccgggatatcaccaaccaatgtaaaagtatcgattacaaatggttctattcagcccggtgcaacaggttatgttgtcaggccggataagataggcgtcctttcgacaatttctgtgagtgccctgattgacggaaccacgaaagagattggttcgatgccattccgtgtaaaaagagttcctgaccccgttgcttcggtcgcaggtaaaatagagggagcaataacaaagaatgagttattagcacaacagggcgttgtggcgaagatcccggatttcgatttcgagatgaacttttcagttacttcatttgtcgtttcaacatccaagggcggctttgtagttgataaaccggcaaaaggaaaccggttctcgcaggaccagaaagatctgatgaaaggattaaatcctggaggccggttatatatcgagagcattgtagtaaaaggtgatgatggctcggtacgtaatttaccttcgataagctttaaaataaattaacgatgaaaaaattattattgatccttgcattaattctgattggagctgcatcacaatatttgcaagctcaggtcatcgtcgatggtgtttatacaaagcggacaaccattgatcgcaaaccggctccgctcccattggtgcgggagtcagatgccgtatggtcaagaaccgtctggcggaccatcgatttacgcgaaaaagcaaaccagcatttttattatccaacccgtgtaatacaagggcgctataacctgtttaatgtccttttaaaaggaattgaagcgaagataattaccgcattcgatccggacgttgctgagagtgaattctttaaaccaatcgattacaatcaggttaagcaacagtttggagactctgttaagaagatacaggtcatcgatatagataccaatgctgcacgtgattcaattgttgctgctgaaatcccagtacaggaagtcaagcaattggaaataaaagaggtctggtatttcgacaaacaaaagtcgacgcttcaggttcggattctcggaatctgtccgatcagggtctacaaaaaagaaccaaccgatacggcttatgtccgcaaaaaacttttctgggtttattatcctgaaattcgtccccttcttgcaaaaaacgaatcacttaacggatttaacggggcgcgtagcttaagttttgacgacttattccttacccggaaatttgatggttatattgtgaaagaagaaaacacctataacaaccgggcgatttcggactatgcgaagggcgaatatgccgccaaagaatccgaaagaatcaaaaactccatctttaattacgagcaggatctctgggaatattaaacaaaacaatacgacattgcgccgcatcccgtaccaacggaatgcggcgctacgtttttatgatgtttggtaagcatgcacaaaacagatagctaatattgccaaaagcacctccttctttgttttctattctcaccataaactttttaagtcgaccaacatatattttccactatttatttggcaaataacaaatatattttacaactttagagtgcctttacacgcaacttgaattttgccattaattgcctaaccaataccacatcacgaccatgaataccacaaataatgattgtttaaaatgcaagaccaactgtttttcaaatgatgatcttatgtcgtacggcttggagttgggcgttttttgcaggacatggcaaaaaaatacccccgtattgtaagacgagggtggcttaaatgttttcacaacggaataatccttattgtgatttgcttcaaattgtacggctaaattagtaattattatcgaaacacaaaatagcatgaaaaaaattttaggacttgacttaggaaccaacagtatcggatgggccttaaccgaacaagactttaaggaaaagtccggaaaaatacttggtataggatcaaggataattcctatggatcaaaccagtattggcgattttgaaaaaggaaatcctgtttcacagacggcagatagaacaaatttcagagggattcggagattaagagaacgttttttattacgaagggaaagattgaacagagtcctttacaaattgggatttctaccagaacattactcagaccagattgactttgattgtcatttcggacagtttttgaatcatgccgagcctaaaatagcctatcaacttaatgcagagaccgggaaatacgaattcctattcaaagactcattcgatgaaatgattgaggactttaaaaaaatacaaccccagttatttgaaaacaataaaaagataccttacgactggacaatttattttctccgcaaaaaagcgttgacatatcccattgcaaaagcagaattagcatggttgctacttcattttaaccaaaaacgcggttactatcaactccgcggtgaagatgaagacgatagcaagaataaacttgttgaatttcatacgctaaaggtcgttgaagttttagatagcggtgacaggaaaagtaaggaagaaatctggtataatgttgttttggaaaatggatggatttacagacgcacaagccggacaccgcttgattgggttggaaagattaaagaattcattgtcactacggatctcaacgatgacggaagtatcaaaacagataaagagggaaaagaaaaacgctcattcaggtcaccaggtgctgatgactggacattggttaaaaagaaaactgaagcagaaattgagcggactaatcatacggtaggaacctatatctatgatactttgctccaatctccgggtcaaaaaattaaagggaagctcgttcgtaccatcgaacggagattctatcgcgaagagttgaagctcattctcgataaacaacaaacctttcactccgaattacaagacaagaaaaattatacggcttgtcttgaagaactttaccgaaacaatcaggatcatcggaatacatatagccagaaagactttacccatctctttattaatgacattattttttatcagcgtcctttaaaaagcaagaaatcggaaatcagcgagtgccgctacgaatcgcggtcgtaccttgataaggaagggatattgcaaaatgatgcattaaaatgtattgcaaggtcgcacccattatttcaggaatttcggctttggcaattcctgcaaaacctgacaatctatcagcgtgaaaaatacatcgatggtcggcttaataccgatatcaatgttacctctgaatttctaaaatcagaggaagattgggttgccttattcgattttctaaatgaccgcaaagaaatagatcagaaagctttcctgaaatatcctgcgtttaatttgaagaagaatgtagaactctaccggtggaattatgtagaagataaaacttatccggcgaacgaaacaaggtcacagatgcttacaaaattaaaaacatcggatatcgcaccagagtttttaactaaggatatcgaagagcaactttggcatattctaagctcgatagatgataagatagagatagaaaaagcactgacaacttttgccggtaagcgcagcctgccaaaggaatttatagagaacttcaaaaaatttaccccgtttaagaaggagtacggcgcctattccgcaaaagcaattaaaaagttattgccgctgatgcgcagaggaaaatattggtcggatgaagccatttcaattgatactaaaaaacgcatttcagcaatcgtagagcgtctcgattcgattgattatgaaaaaaatagaattgccaacatcgctgatgatgatattccaaagcaagtattaaaaagctttatcgattgccgtaatccattaaccgccctaaatacttatcaggcatgttatgctgtgtatggcagacactccgaagagggtgaagttgttaaatgggaggtaccaatcgatattgaacactacttaaacgatacatttaagcaacattctcttcgaaatcctattgtagaacaagtcgtaacagaaacacttagggttgttaccgatatctggaaacaatttggcaacggagaaaaagatttcttcgatgaaattcatattgagttagggcgcgaaatgaaaaatactgccgatcaacggaaacgactcacatctgttgtaacagaaaatgaaaacacgaacctgcggattaaggcattgctcgcagaattaaagaacgataacaccgttcaaaatgtccgtccatattcgccaagtcagcaagaaattctaaaattatatgaagagggtgttttaagtgctgttgccgatatccctgacgaaatactaaaaatcagtaaaaatgctcaaccgacttcatcagaattaacaaggtataagctttggctcgaccaacaataccgttcaccctataccggagaaattatcccacttgggaaactctttacttcaagttatgagattgagcacattataccacaatcacgctatttcgacgattcgttaagcaataaagtcatctgcgagtcggtagtgaacaaggataaagacaacaaaaccgcttacgcttatatcaaagaacaacatggtaagatcatcgaattagattttggtaaaaaggtaacgcttttcaccctcgacgcttacgaagattttgtaaaaaaccgttttgcaaaaaacagaagcaaaatgaagaaattactcatggaagatattcccgatgatttcatcaaccgacaattgaacgatacaaagtatatcagcaaactgatcaaaaatctcttgtcaaacattgtccgcgaagagggcgaagttgaaaccacatcgaaaaatattgcagcctgcaacggaagtatcacctcaacattaaagcaagattggggactaaacgatgtttggaatgagctaattacccctcgttttgaaagattaaacgatctcaccaaaagcaataattttggacattggacaaacaaagatgggaaaagagtttttcaaacggagataccacttgaactgcaaaagggatttactaaaaaacggatcgaccaccgccatcatgcaatggatgcattggttatagcgtgtgcctccagaagtcatatcaattatttgaataatgagtcggctaaatcaacttcaaaagaatcccgttacgatttaaagcaaaaactatgttttaaaacgaaaccagatgaaaatggaaattataaatggtcgttttataaaccatgggatacgtttacgcaggatgcacgtcacaccctttcaacgactatcgtcagttttaaacaaaatatccgagttattaataagaccagcaactggtatcagagatgggaaacgcaggacgatggaagtttgaaaaaagtattcacaaagcagaaaactggtgaccattgggcgatccgtaaaccgatgcacaaagagacggttgctgggttggtgcaattacgtttcaaaaaaacagtgcaactctctgcggcactcgaccaatgggaaatgatggtcgataaatcattgaaaaatcaaataaagacacttgtaaaacaaggctttgataagacaaagctccggaaatttttcaaagaattagaagacaaatgggatggaaatagtatctcaaaagttgaaatatactatttcgaaaaagagatggtcgcttccaggtcttcaataaacgaagcgtataataccaattttatcaaaagcattaccgatacggccagccaaaaaatcatgcttaatcatctcgagaaatacaatgaaactaaagatgggaaggttattgagcatccagaactggccttctcacccgatggactagacgaaatgaataagaatatcgtccagcttaatgatggtaaattccaccaacccatctataaagtccggacttttgaacctaaaggaaataaattcaatgtaggcacaaccggtaataaaggccaaaaatacgtggaggcggcaaagggaactaatctgttctttgcaatctatcaaaacagcgaaggaaagcgtagctacgaaagcatccctttaaatattgtgatcgaacgccaaaaacaaggacttaaaccagtaccagaaacgaatgataaaggtgaacaattagctttttacctttcgcctaatgacttggtttacattcatccaaaggacgatacgaactccaaatttcacattgattttgcaaatctgtcattagatcaagtaaaccgagtttataaaatagtaagtttcactggcagtcggttatatgcaattcccaataacatttcttcatcaattgttgacaagtttgaatttagtcagttaaataagctcgaaggaatagaaggggtatccattaaagaaacttgcgaaaaactccaggtaaaccgtataggccaaataacatccataaataataaacctattctaaataaaactttaaaagttgaagaatcacttacctaagtacaattttaagtggagccccggcttctgcttcccgaaagcctccggttattggctggacgttttcgggtgcatccgatgatagactgccattggcagatctgcttccattttttccggaaagctccgcgctgacggcaggaaggattccggaacgccggaaagctccgcgccaagggcaggaacgtttccggaacatcggcaagctccgcgccaagggcaggaacgtttccggaacaccggaagataaaatataaaaagaaatgacccggttacgtcttaaggaaccaaaccgacgcgttgtagttttcctcatttaatgagtgcagtcacctggtcattaaaaaaaattattccacattaaaaaaaatttaacatgataaatgcaattgatctaagaacattacgaaatgtagagtttttgagattcggagccgatttttatggtttggtaaatgcaaacgatccggttgttttgaatatcgaaccgcaacacgttgcctttaaaatcaaattagacgaaacgtcacagctcttcaaactggaacagtcaagtccgcttacgcaggagttggtattggacgacgaacgccgcgacaaggctattaatgggataagtggtatgatcgaaagttattgctaccactttgacagtgctactgttaaggctgccaaccttctgctagcgagtttaaatctttatggcaaaggggttgccaaaatgaatctgccatctgaatcgggaacaatcgatgccatcgtcaaagattgggaaactaaacctgagctgacagctgccattacattgcttggacttactgcatgggttgccgaattaaaagctgcaaaccagctattcgaacagaaatatctcgaacggacagaggagtacggcgctgcaaatcccgacacgctgaagtcaaaacgtgaagagactgtgctcgcctattacgagttgcggaaattcatcgatgctaattcggtactaaatccaagtgcagcttatgaaaaattgatcaatgcactaaacgcgctgatcgatcagtatatcacactgctgaacacacgggctgccgaaccggagacagaaacagaaaaggcgactgttattaaataaaattccggctagtgagggttttacgcagtgtgaaaccctctcttacaatgcgtttcacgaagaaacattttaaccccggatggaaaggaaaaaaccttattccatttttaaaccttaataggttgggttcaggataataaggtattcatcccctcctgatttaaaaaccgttttctttgtgcaacctttgtgttccttgtgttaaaaaattcaccacaaagttcgcaaggatcggtatcagattcacaaagaaccatttcaatcatcgaagtgcaaaatgtgaactgatgcaaaatattccgtccctgtccggggcggacccttgcataataaccgatgttctacccacatttgatcccttactggatcagaagaccaaattaaacagattcttaaatttccccgagggaaattattgggtttatgccaaattaaaaactaacatccatgatcaaacgcacccttttctttggaaacccggcttatctccgttttaaggatgagcagttggtgatcaacctgccggaaacttccgctttacccgaaaaagatcgtacaatcaccattccgattgaggacattggttttgtggtgctcgaaaacccgcaaatcaccatcacccaccaactgatgagtgccctggtggaaaataatgtcgcagtactcacctgcgaccaccgtcatatgcccacaggattgctactgcctttggaagggaacaccacgcaatgtgaaaggtttacgcatcagattaacgcttcagaaccattgcgcaaacagttgtggcagcaaacagtccgacagaaaattttgaatcaggcagcggtactaaaccaggaagggcgaaaaactgaaaatatgaaatactgggccgatcaggtgaagagtggtgataccgagaaccatgagggtcgggcagcggcatactactggggtgaactcttcgatacatcgctcgatttcaggcgcgaccccgacggtttcgccccgaacaacctactcaactacggctatgcaattttacgtgcaactgttgcgcgatcacttgttgcttcgggaatgttaccaacacttgggattcaccaccacaaccggtacaatgcctattgccttgccgatgatgtcatggaaccttaccgtccctatgttgaccggttggttcttgaaattctcgatggccccgaaatgccagaagagttaaccaaagaacataaagccaaactattgcagataccagtattggatgtgacaatcaatgaccggcgaagcccgctgatgctggccgctcaacagacaactgcgtcacttgccaaatgcttcctgggcgaattgcgaaagattgaataccctgagatgaattaaacgctcacctaaaaatctgataatgtggaaagactcagtgaataccgtattatgtgggtaatggtactgttcgatcttccgaccgagacgaaaaaggagcggaagatttatagcgatttccggaagaaattactgaaagatggtttcacgatgttccaattcagtatttacctgcgccattgtccgagtaaagacaatgccgaagttcatatcaaacgggtaaaactcgaacttccgccacaagggcatattggaatactgtgcattaccgacaaacaatttggcgatatggaactattctacggcaaaaagccaactgaaaagaaggggcaagtgcagcagctggaacttttttgatagtcactcgacagcataaaaaaaccggatcatcgtccggtttttttatgctgaaaacactccattttttaatcctgatttcgtctttaacagacacaccac

SEQ ID NO: 1311 - DNA, 17479 bp, synthetic construct
  source 1..17479: mol_type = other DNA
  misc_feature 1..17479: note = Synthetic
ttcttgcagcccatacattttttggagatggtttccattgtgcaatacatacgtaagaataccaatgattgaaggcatgacttccggttgatttttgttgaaaacctatatcaaagcctgctgtaataccccattgttgtgttagctgaaatataccatacaaattatgaaaataacgcattgcacgaatgctgtcaggaagtatattgcctataaatgaactactgttgagggtaatatttgatgtgggtttaaatgtaatttgatggccaaaagcaggtgtattattgccattgattctgcttatattttgccagccgttcaacaataatagagccatataccatttttggttgggtgtagtatatgctacccttacaccactttcataatagggtgtattctccgccaaaatacttctggagagtgtccaacaatcttttccaatagcactttcaaaaccgatatgtgaagcaaaaataccggcatctgcccaaatatcctttttgcgggatagctttatgcctatattagcttcaaaaatatttttaaatactccattttctgttgaaagattggcattcatataagttcctgtagcaaaagcaagatttgcccttaccttattttcagtaatagcagcttttaaaaatccaagattcaaatttacctcattgtgttggttgtagctatataaaaaagcaggtctgttatggttaggcggatttacaaaatcataagcataatatacatccaaatagccactaagttgtagcttttgattcaatgaatcgttttgggcatgggcataacctgtaattatataaacggatagaaacataattttcttcatgtaccagttcattttacattcttgcatgcatagctgatgtatctctttaatggtttgtcaaggaatctaaagcaatgttaagcgccaatacattcacagattcgggtccaaaaattcctaacaagggtttatcggtatgctgccgcaccaatgattcaataatagttttaggaatatgtcttatttgggcaattctgtttacctgtatcatagcagattgcacagcaatatgaggatctaagccgctaccacttgcggtaaccaaatcagacggtatagccgatgctggaacaccgggatgatggacttggaatgaatcaacatgttgttgtaccgaaagcaaataatccggattattgggccctttattacttgcacctgctgctgctgctgcattataattaacagcagaaggtcttgaccaaaaatatttatcatctgaaaatttttgtccgatattccggtacattttttttccatgcaccatccatactgcagcctctcctttatcaggcgtaatctgagcaacgcaccatactaatgcagtatacattacagaaaaaagcagcaagcaaaccaatgttaaacgaatggcaggtaataaatagtatttcataaaatgtttatataaaatttgcaacaacaatatcaatgattttaatgcccacaaaaggaacaataattccccccagtccgtatatcagtaaattacgccgcagcagtgcgctagcaccaataggtttataggctacaccgcgcaatgccagtggaatgagcagcggtataataatggcattaaaaataactgcagaaagaatagcgctctgcgggctatgcaaatgcatgatattcattccctgtagggcaggtatataggtaatgaacaatgcgggcacaattgcaaagtattttgcaacgtcgtttgcaatactaaaggttgttaaagtgccgcgtgtcattaataattgttttccaatttcaactacttcaatcaattttgtagggtcattatcgagatctaccatattaccggcttctttggctgcctgtgttccactgttcatagctacccctacatctgcctgagccaatgccggtgcatcgttggtgccatctcccatcattgcaaccagccttcctgaagcctgttctatttttatataattcattttatcttccggctttgcttcagcaataaaatcatccacacctgctttttcagctataaacctggctgttaacggattatcgccggtaaccataactgttttaatacccatcttccgtaaacgctcaaacctttctttaatacctgttttaataatatcctgcaattctataacccccattactttctcattttcagcaaccaccaatggtgtaccacctttacttgaaatggattgaacagttgcatgtacatattcaggaaatgtatttcctgcattttcacaaatttttcggatagcatctgctgcaccttttctgatacgcatatcatctatatcaatacccgaacatctggtttctgcagtaaatggaatgaaacgtgggttgttgagttgcatcatcgcagtatctaatgcggctaattcaataatcgattttccttcgggcgtttgatcggaaaccgaactcattacaaccagtttcttaaaataatcggggtcaacatttgtggccggataaaattgagttgcttttctgtttcctatggtaatggttcctgttttatctaatagcagcacatctatatcacctgctgtttctaccgctttcccgcttttggtaattacattggctttcaatgcacgattcatccctgcaattcctattgctgataacaacccaccaatggtagtaggtatcaggcaaacaaataaggcaataaaagcggcaatggtaataggtgtatgcgcataatctgcaaacgattttaaggtaactgtaacaatgataaaaaccagtgtaaaacctgccaataaaatggttaatgcaatttcgttgggtgttttttgtcgtgaggcaccttccactaaagcaatcattttatctaaaaaactttctcctggttcactggttacctttactttaattgtatcgctaagcacttttgttccgcctgtaacgctgcttttatcgccacctgcttctctaattacaggtgcactttcaccggtaatagcactttcatcaatggttgccaggccttccacaatttccccatcggcaggaataatatcatctgtttcacatataaaaatatctcctttttttaatttggaagccgcaacaacaatcatttcattcacatacatttcgcctaccggcaatattaatttggcaggtgtgtcttcccttgttttccgcaaactgttggcttgtgctttaccccttgcctcggcaatggcttctgcaaaattagcaaacagcaatgtaatgaacagtattaaagtgattaccaaattgtaagttaaacttccctgaccatttgctccgccggcaatccagatacagactcctcccattactaccgttcctacccaaacggtaaacatgaccggatttaaaatcatggtagcaggatttaatttcaggaatgactgctttaatgcaccggccactaatgctttatttaaaaattgtttagatgcaatatgattcatttgaatatatttttaatgaaaggaaaaatattcagcaacaggccctaaagccaaagatgggaaaaatgataaagctgcaacaattataataacggccattaccattaagccgaaggtaaccgtatcggtttttaacgtaccggcactttcaggaataaattttttttgagccagtaaaccggcaatggccaccggcccaataatgggcaaataccttgataacagcattacaatgccatccgcaatattccaccagggcgtattggcaccaagtcccgcaaattcgctaccgttattggcactggcagaagtaaattcatataacatttcgctaaaaccgtggaaacccggattagaaagccagcccgaatattcagcaggatgatgcgcatataaataagcagcaatggcagtacccgataatattaaaaatggatgaatcaaagcaatgatcatcgctattttcatttcttttgcttcaatttttttacccatcagttcgggtgttctgcctaccattaatccactgataaatacagccagaatcatgaaaatataaaagtttaaaaagcctacgccaatacccccataaaaagcatttaccatcattcccaacatggtacacatgccggcaagcggcataaaactatcatgcatcgcatttacagaaccattactggttactgtggtaacaattccccaatatgctgacgcagcagctcccaaacgcacttctttgccttccatattgcccgaggtttgttctattcccatttttgcaatggcaggattccctgcagtttccatcataatggtgggtgctaataataaaaagaaccccaccgtcattaccccaacaattaaccaggctaatttttttcgtttcaacatatagcccatggtaaatattaatgcaatgggtaataaagcaatggctattgtttcaatcatgttagtgaaatagttaggattttcaaatggatgagccgagttaggcccgaagaaacctcctccatttgttcccaactgtttaatggcaacaaatgccgctaccggccctctgcttacctgaactgtatcgccctgtaatgtagtaatggtatctttacccttaaacgtcatgggcataccgttcaataaaaacagaactgccattataaaagcaaagggtaataaaatccgggtgcaacttcttacaaaaagaaagtaaaagttgctcaaagaatggtttgcaccctctttcatagccttaaaaactacaatacatattgccattccgcagcctgcactgataaattgaaataacattaaaactaactgacccagataagacatgcccgtttcaccggaataatgctgcagattggtgtttgaaataaaacttacagcagtattaaaagccagatcggccgacatggagggattgtgatcagggtttagtggtaaatgcgccatattggttaaaaccaacatggccaaaacaaaccagataaaattaatggtgagtaatatttttaaatgttgcttccaattcatttctatttttggatcaacgcctgatattcgataaatcagttcatcaattggattgaaaatgggatctaaccatgtagtttctcccgaaaacaattttcccatatacctgcccaacggaatggctaacaataccgttatcataaacatggctatgatgccatacatttcagtattcatttgcattgtttaatttagtttagaatatcaatatgttcactgtaaaatgcagcaccacggtggttgaacagcttaactttcgttacccaaaattgactgcacatctgctctattaaaatttttcaggatgaattaaaacatagcacatatatacaaatactgctatcgctacaaaaaataataaaagcataagtttaaattttttcgaaccatttaattattacattaaacaacataaacgctaacagaccggtaattagtaatagtaaaaacagcatgttagtattttttatgtttaaaataatttaagcagattaagtggatgatacatcattccattttttttactgtgccaaaacatttgcaaaacaagtgccagctaaaataaaatacatgaaaatccttactggaaatgaattataaagaaaatatagtatatatatacaagaataaacccttttattttgaaagggttcacactatcattttaaaagggcataaccttatgcgcaacaccaaaataaaaataaaactattattcaactgaactcgttattttatactcttcaatttttctgtacaaagtagttagggcaatattcagtaagcgtgcagtttctgttttattacccccggtatattgcagtactttttgtatatgtgctttttcaacatcagccagtgctaatgaaggtgcagacacattacccatttgtaaatcgggtacctgataaaaatcaaccggtagggaggcaggttctaaaatattattttcagttaaaataacactacgttcaataatatttttcagttcacggatatttcctttccatgtatgtttttgtaacaattgtatgtatgccggagcaatgccggttatttttttatttgttttttccgaaaaatattgtaaaaaatgattggctaataatgtaatatcgtcaatacgttcccgtaatgaaggcagttgtatttgaaatactgaaatacggtaaaacaaatcttcccgaaagcggccggcatttacttccttttttaagtcgcgattagttgccgcaattaatctaacatttaccctggtaacattgttattgcccactttcagaaattcgccggtttctattacacgcagtagttttgcctgcaaatcgagtggcatttcacctatttcatctaaaaaaatggtaccctcattggcttcttcaaaaatacctttagtatcttttatggcaccggtaaatgcaccggctttatggccaaataattcattttccaataattctttactgaaggcggaacaattcactgcaataaaattaccgttctttctttttcctgcctggtgtatggcctgtgcaaaaacttctttaccggttcctgtttcgccggttaataaaacagtggcatctgtttgtgctacttttcgggcggcttcaatggctaattgaatactttttgaacaaccaagtatactgtttaatgcatatttatgatctaactgcttttctaattgttgtaccctttttgccagtttcactttttcaagtgctctgtaaagcaatggaataattttataattatcatctccctttgttatataatcaaatgccccattttttatagcttgtacactatccggaatattgccataggctgtcatcaaaataatttcaagcgcaggatacttttgtttgatacttttggccagttcaacaccatgctcatcgggtaatttaacatcgcaaagtacaatatctatattttgttgttctaattttttaagcccggtttttccgtcgccggcctgtaatacatcaaatccttccaaactcaacatttttgccagcagcgttctgagttttacctcatcatctaaaattaaaatagtatttgccattttttttgaatgtaaaaggtaaatgaatagaacaaacttgcattaaatacaacaacaaatgtactacaagtaagcataaagaaaaatgcgcattttttagtgtatgcatttaaaaaaataaacagaacactattcatataatgtatccggttagtttagtgcacatacatataataattataagaatgtattaacgtatatgtgctattgtccattaagggctattcattaataagcccagcaataagcagggctttttagttatttaatgcagcaaaccttccggtataggtttcttaattaaatatttgtaaatgaacttcgttttcagattttgaaaatcatcccatttggctggcaaataaggccaaccatgcctgccaccgggatacaacatcatttcaaaaggcttcctggcatcttccaaagcactaattaattgtatgctgttttgcatgtgtacattatcgtccatagtaccatgtacaatttgtaacatgcctttgtatcgatcaatataactcaacacactgctttttttgtatccttccggattgctttccggtgtacccatgtaacgttcggtataatgagtatcatacaaacaccagtctaccacactgccaccggccataccatgagtaaatacatcagctttatacgtcaatgcgtaacacgtcatataccccccataactaaatccggtaataccaattcgtttgggatctgcgccggcattattgataaaccatttggccatggtactataatcttccatttcccaataacccaaattgtggtataaatagtttacacctgctttgccaaattgaccactggcacggtggtcaaacgctacttgtattaacccctcttgtgccaatagttcgcggctggggctccagttccacctgtcccatacggtaccggcattgggcccaccataaatactaatgagcatgggatatttattcgatttatcgtaatgtgccggccaggtaaccaaagcgggcagttcaaataaaccatcagcacttttaatgcgtataatttcagttttagcaatagcatacgcatccatgtcagggcctttggcattacccagttctttaactattttaccatttacatctaccaatgccatacgtgctggcgtttgtgtattactgtaggtggtaataaaatatttaccaccgggtgaaaaattaatggaatgactataattaccaaatgttaaacgttggggttgtccgccatcaaagctaattttatacaaatcggtacgggttgagttttcaataccacgtgctgtaaaataaatggtgccattggcttcatcaatatattcaatacctgtaatggtatatgtaccttttgtaatggcacgttgcaatgtaccatccatattgtagaggtacagcatattccaaccacttttatcgctctgggcaatataaccgctgccatctttcaaaaaattaattctgcctcctaccctgtcttccaaatcaatccaggttttttgtgtttcggtatataccggtttacggttacccgtttgtgtattgacctcataaataatcaggctgtcttgtttacggttcatccagggtatccataaactattgttgctgctgcgccaaatgggccagccaaaatactggtcttctttcgcattaaaattggcccaggtggtattgcctccatccggactaacaaatcccattttcacttccggatttttatcgcctgcttcgggataacgggtatattccaaataaccatgttgcccctcgctactgtaaataggaaacataggcaccatactttcatcaaaacgggcataagcaatggttttgctatcggggctccaccaaaaagcccggtaatgggttgggcggccataaatttcttccaaatatacccaactggcatagccgtttaatgtagtagtgctaccatcaaacgttaactgtgtttctttttttgtagcaatgttgtagctatataaattattgtttttggtataggctatataattgctatcgggcgaaaaagtggggttatgttcctgcgccgtatcgttggtaatacgggtaggtgtaccattcatgaacaaatacaaatcgtggttcatttcagcaaccgttttacccaattgtaattgtgcaggtacggtatatgatagcattttacccgaaggaatatcgtataaaaaggttttggcatcatcatgttgctcgccccgctgcaacaacaatacctggttattgttcagccattctattacagaaggcagcggtttgtaaaaaccgttgggcgcttttccggtaaccaattgcgccatacttatttctttttgctgggcagaagtaaacaatgcagtgaagcaacagcatgtaataatgccaaaaattttcctcatgtgcttgaattttgcatgaagataaatatcctcctccttttttacgataccattcaaaaaaaaatgataaaggcccgtattttcgggcatttttcgaaaattgttcgacagatgttcgaatccggcacatacaaatgcagcattgataagggttgtatcgaaccattgtcgaacatgtaacgaatctgtcttgaacaaggtagggagaaagtgggaattaatgtgggttgtaaaggagtagtgtttggataaacgggtaaaggggaaaatattttaaaaaatagataatgttttttttatgaatacataaaaatttgtagtttagggggaaaaaaaaagtagccccaccttttaaagtggggcgacttaaatgttttcacaacggaataatccttattgtgatttgctttcaaattagatttcaaaaataaagaaataattgcaacatgaaaaaaacaattttaggacttgatttaggcaccaattcaatagggtgggcgttgatagaacaggattttgaaaacaaacaaggaaacatattgggaatgggcagtagaataattcctatgagtcaggatatgatgaatgactttggcaagggtaattctatctctcaaactgcagtaagaacgcattatagaggtataaggcgcttacgtgagcgccatttattaagaagagagcgcctgcacagagtactaaatattttaggttttttacctgaacattatagcaaacaaattgactttgaaaaaagattaggacaattttataaagcaaccgaaccgaaaatagcatacaataataaagacttcattttcaaaaaatcattcgaagaaatgttggaagattttcgcatgaaccaacctgaacttttaaatagaaaaaataaaaaaggtgaggatgctaagataccctatgactggaccatttattacttacgtaaaaaaggattaacacaaaaattacaaaaagaagagttggcttggcttttgttaaatttcaatcaaaaacgaggatattaccaattaagaggcgaagatgatgaagcgtcttcaaacattaaagaatatgtagaaatactaaaagttgtaaagattgagaagggaaatgctgataagaaaaaggataaaaaattttggtataaaataactttggaaaatggctggattcatgaatcaacattttcaattgaacctcaatggctgggcaaggaaaaagaatttttgattagtgaaaaatttgatgataacggtaacatcaaaattataaaagatagaaaaaaagacaaagaagggaaggaagaccgaaaaatttctcctttacccacatttgaggaaattgatctgatgagtaaaaaggatcaagataaaatatataaaaaaataaaagtaaaaactgagttaatgattagcaagagcggaaagactgttggatcatacatctacgacacattgcttcaaaatccgaatcaaaaaataagaggcaaattaatcaggactattgaacgaaaattttataaagaagaattaatagcgattcttaaaaaacaaattgaattactgcctgaattatttagcagagatttatacaatgactgtatccgagaattgtaccgaaataatgaatcacatcaatttactttaagcaaaagaaattttgttcatttattcgttgaagatattttattctatcagcgaccactcaaaagtcaaaaatccagcattagcagctgtaatttagagtttcgcccaatgaaagataaaaatggtgctttattgaaagatactaatggcaaccaagttgtaaagccattgaaagtaatttcaaaatcacatccgctataccaggaatttagagtatggcaatggctttataatttgaaaatttataaaaaagaagacaatactgacattacaccagaatttattaagagtattgatgatgtagaaaatctgtttgcgtttttgatgacaaaaaaagaagtaaatcacaaagatattttagattacttcataacaccaataataaaggaaaaatttccaaatgccaaaccaaaagcattaaaagatgaaatagcaaaagaaatcggaaaataccgttggaattatgtatttgatgattctcaagaaaaagaagaggataaatctaagaaatatcctatgaatgaaaccggttatgaaataagaaaaagattgggagaagtttcaaatgttcccaataattttttaacaccagaaattgagcaaaggctttggcatattatctattcagtaacagataaaaaacaatatgaagccgttatagaaaatttcgtaaaacgatataataaaaaacaaaacaccaagattgaagaaaaaaagttcaaggaggcgtttataaaattcccaccattcaaaaatgaatatggagcttattcagaaaaagcaataaaaaaactattgccgctaatgcgtttggggaaatactggaaatgggaagctattgacaataaaacaaaaaacagaattgataaaatcattacaggagaatatgaccatgaaataaaaaatcgggttcgtgaaaaagcaattcacctaacagaaaaaaatcaatttcagggattgcaattatggctggcgcaatacattgtttatgaccgccattcggaagctgcattaacaggtaaatggaaattagtttccgatttggaagaatatattcacaactttaggcaacattcattgcgcaacccaatagttgagcaagttgtaaccgaaacattgcgtgtggtaaaagacatttggaagaagtacggacatggaatggaaaattattttgatgagatccatattgagttgggtagagaaatgaaaaacacttccgaagaaagaaagaaaataaccaaccaatttaccgaaaatgaaaacactaatcatcgcatcaagcaacttataatagaattgaaagataattctgatggcaaattacccgtagaaaatgttcggccctactctccaatgcaacaggaagcattgaaaatttacgaagatggtgttttaaattcggatattgagattcccgatgatattataaaaattagcaaaactgcacagccaacaaaagcggaaataatacgttacaaactttggctggaacagaaataccgttcaccatatacaggagaaattattcctttaagcaaattgtttaccgaagcttatcaaattgaacatatcattccacaaagccgctattttgatgacagcctcagcaataaagtaatttgtgaaacagccattaatcaattaaaagataatcaacttggattagagtttatcaaaagtcatcatggagaaattgtagaaacaagcaatcagaataaagtaaaagtgttcagtgagcaagaatataaagattttataaaacaacattatagcaagaacaatggtaaacgtaataaactgttgctagaagaaattccagataaaatgattgaacgtcaactcaacgatacacgttatatcagcaagtttatttcaaatatgttgtcaaacattgtacgtgccgacaaagatgacgatggtttaaactcaaagaacctcattccagggaatgggaaaatcacatctattctcaaacaagattggggattaaatgatgtatggaatgaactgattttaccacgctttgaacgcatgaatgaattaacaaatagtaaggattttacaacatggaatgaaagccatcagaaatttttgccaacagttccatttgaactttcaagagggtttcagaaaaaacgaattgaccatcgccaccatgctttagatgctttagtaattgcatgtgccacgagagaccatattaatttactcaataacatatatgcaaagtcaaaagagcgtttcgacttaaatagaaaattaagaaggtttgagaaagtacaatataccgataaaataacaaacaaattaattgaaaaggaagtaccgaagaattttctgaaaccatggaacactattacagaagatacacgagaaatgttagaaaaaattatagtaagttttaaacaaaatctgcgtgtaattaacaaaacaaccaataagcatgagaagttagttttgcaaaatggaaaaaaaataaaaaaacttattcctcagaaaaaaggtgatagctgggcaatacgcaaacctttgcacaaagacactgtttatggtaaagtggaattacaaggaataaaagtgtcaagaggtaaaatattaacagcaactcgacaaggcaatgatttgttatcaatctttaaagatgtacaaaccaaagagaaagcagaagaaattatcttgaaaataacagatactggaatacaaaaaattttaaagaactatttagcaagcaaaaacaacaatcctgaactagcattttcgcctgaagcgatagaagaaatgaacaaaaaaatttcccagtataataatggaaaaccgcatcagccaatttataaagttagaatattcaaagaaacgggtgagcagtttccattaggtcagttaggaaataagaaaaataaatatgtaaccacagccaaaggcacaaacctgttttttgcagtttatgcagatcgtgatggtaggagaatctttgataccattccattggataaagttattgaacgccaaaaacaaggcttaacttctgttcccgaaactaaagaaggagacaacaagctattgtttcatttatcgcccaatgatatagtttacgttccaaccgaagatgaaaaagaaaacataaatggaattgattttacaaatttaaataagcagcaagtgaaaagagtttttgttgtaaatgacttttctagtacttgctactttactccaaatcatttagcaaataatatagctcctaaagaagttgatctaagttttgacacgaaaaagaataaagtatcaggttcctttgacacaaaaacagcaagttttgaaggagttcaaataaaagaagtttgcattaaactgaaagtagatcgtttaggtaatgtatataaagtttaaatcattatgcttaaacgaatcatctgcattgaaaatccttgccctgtaaaatgcaacagtgtacaatagtgcttaactatgcccatttaaaagttgaaaaattggaagaaaaaaaatcgtgaattttaaacattatttagtttcatgtacataataatttaaaataaaatatccattttcaaatgaaattgaaaggagcagtttaccatctaaaaatcaattgatgatattatgaaaaaaaagaagtttgtatgaatcttacagttgaccgccttggtaatataaaatccgtaccaatcagttagcaatattcaataaccactttatcatgccaccacttcttcccggacaatattatcatatatacaaccacgctaatggtgatgataaacttttccgggaagatgaaaattatcgtttcttcctgcagcaataccatcaacatatagatgttgtagccgataccttagcctggtgcctgatgccgaatcattttcatctgctggttaaaataaaaaacgaagaagcgctgctgcaaacttttccaaagtttgaaactttggaaaagttgctgtcgaagaaattctctaacctcttcagcagctatacgcaggcttttaataaagtttaccaacgcaggggttcgctttttattaaaaactttaaaagaaaggaaattacctctgcgcaatatttacaaaccctcgttttatacattcatctcaaccctgttaaacacggttttacaaaagaaataaccgattggccctggagctcttaccattatgttcatgctcattttgaagaacatcccttcttccgggaagtcttcgaaaataaaaatagtttcctcgcacaacatagtcttaaacttgaacgttttgttgaatatatcgcattagaggaatcgctcacccggtaaatcatatcagcatgcacaaacgcaccctttacatagaaaacccctgacatttaaaatgcagcaatgagcaattgatgtaagttaagcataataaagaaatgaagtacgattaccgtgaaaaatcatgaatgcactaacaatttttcacggtgtagaaaattttattcaaacacactcaattacttagcttgatgttttttatcgtttaattcaatacttttttaaccaaatatatcacacatatctaatgcttaaacgcaccctctgcatagaaaacccctgccacttaaaatgcagcaatgaacaattggtaattagctatgcccatcttaaagggttggaagaccggcaggataaaaccgtacccattgaagatattggcgtattggtattagagcatccgcaaattaccattacccactttttgttagataagctaatagcccataatattgccgtaattacctgcaacagtacgcaccaccccagcggcatgctgctgagtttagagagccatactttacagagtgagcgctttaaggaacagttagcagccagtgaaccgctgaaaaaacaattgtggcagcaaaccgtaaaagcaaagattaataaccaggcggctgttttaaaaaaatggaacataccccatggctatttaaacaatgcccggcaaaatgtaaaaagtggcgatgccgataatgccgaagccaaggcagcggcctattattgggcgcatttgtttccggatgcctggcagtttttcagaaaacgggaggggccgccccccaataatttattgaattatgggtatgccattattcgggctgccatggcccgtgccatagccggagcgggtttattacctacactgggcatttttcaccgcaaccgctacaatgcctattgtttggccgatgatatgatggagccctaccgcccatttatagatgccattgtacgcaacattatttacgaaacatcggcagtagaagtattaacacaacccttaaaagtgcaactgctgaatgtgttaacccatgatacacggatagaagaacaaaccagtcccttatgggtagccatgcaaaaaacagctttttctttaagcaaatgttatagcggcgagcaacgtaaattggattttcctgaattaccattaacataagcccatacaaataaatattactttttatttgttacccataataatataatgccttactacgttttaacgatggcaaataaacatttgccggttattgatgacagactgttccctttatgcccaggcacaataacacatccgaacgtttcaatgcctaccgtattatgtggataatggtatttttcgatttacctaccgaaaccaaaacagagcgaaaaacggcacaagaattcaggaagaaaattatggccgatggctttgtaatgtttcaattttccatatacctgcggcattgccccagcatggaaaatgcggccgtgcatataaagcgggttaaaaaaatattacctgaaaaagggcatgtgggcattatgaccattaccgacaaacaatttgggatgatggagctatttcagggtaaaaaagaagcaccggcacaacccataccccagcaattagagttattttaatgcaatataacaaaaatagaaaagtaaaaaggctgccctgccaactgcaggcacagccttttcaatcatttttttctttctattttctttgaaaatccttacaggcattgcattacagcatttactgttgttatcaaagatctgataaaaagaatttgaaagcaaatcacaacaattgttgataacgattatcaaagcctgtggttgttatcaaagatctgataaaaagaatttgaaagcaaatcacaacacatcgatatcaattatttcaagattaccagttgttatcaaagatctgataaaaagaatttgaaagcaaatcacaacaattgttg

SEQ ID NO: 1312 - DNA, 17444 bp, synthetic construct
  source 1..17444: mol_type = other DNA
  variation 569..576: note = n is a, c, g, or t
  misc_feature 1..17444: note = Synthetic
ctcgtatacggatttaaaggtatcatctaattgctgtatataccttggtagagataagcattactatacggtaccatgccagcacatcgcaaagacagcgcatgttgcatatacccgtactttggtgaaaatctacatcgaaggagagcttgttgccacacatagaagagactatagacagggcaaatatactatcgtagaggagcatctggagagtcattcaaaggcatatcgccagataagtgcaggcaagtatatagagcgtgctagtcacgttctaaaggagcttggtgatgtagtacaccacattttttacaactcgaatatgccacctgaagtacattacagagcatgtgaaggattgctgcaactgcaacgcagcagtgatccgactatctttcgaatagcctgtcagacagctttgaagtacggacgatgcaactatggcttcatacgctcactcgtagaaagcaagtgcgccggggtatccgcctcacagcccgaccttttctctcctggcgaacatgagaacatacgcggaaaagagcagtttaaataataagctgcannnnnnnncggggtatccgcctcacagcccgaccttttctctcctggcgaacatgagaacatacgcggaaaagagcagtttaaataataagctgcacattataatccaaattattattaacccactaaaacaattatcattatggatgaaattacaaatgcgctaaaaagtcttagaatgcccggaatggcgcattactggactactatgcaggaaacacgtcaagctgacgcactctctcttaaggatggtctgcagctgcttatacaggccgagttggataaccgtacacagagtcgtaactcgcggcttgttaaaaatgcccgcttccgttatcaggcttctatcagtcaagtcatttacgacagcaaaagaggagtagaaaaacagaaggtactcaacctggccacatgcgactatgtaagaaaaggagtagcggtactcattacaggagcggcaggtacaggcaagagttggataggaacagcattgggctatcaagcctgtatgaatggactacgggttgcatactacaatgtgtatcgactctttgaggaaattacactagctcgcatatccagcacattacatcggttcttcgcaaaacttgcgcaaatggatctactcatcttggatgactttggcatcagggtattagacggacaacagctacttgattttatggaaatcatagaagaaaggcatggacagaaagctacgattattatctcccaactaccagtggcaaactggtatgatgtgatgaagggaaatacgactgcagcggatgccatattagaccgcttggtgcataccagtgtgcgattcgaactcaaaggagccagtatgagacaaaaaaataatactaaaaagactgagatagaagaaaaagactaattttacatcgccatcagtataagacaggaaagtgaacgggtatcaccgttttttgtgggtggatatcaaccgttttcgccatatgaataaaaccaatacaatacctacctataattaggtataaaatgcatttgtctatccaccaaaaccacaactacctgattatcaacaaataacaactttacaaatctgatcatttgtctatgtctgattcttggaacaaatagtaattattgataaatttgtgtgaagtgatatttaaaacaataatactatggattttaaagatgaaattagacaactatccgagagagttgaaaaactgaaaagcaacctcttcactgaagaagcaactaaaaatgctcttattcttccccttcttaaatcattaggatatgatgtattcaatccactcgaagtgatgcctgagtttatatgtgatattggaactaagaaaggagaaaagatagactatgccatcatgagcgataatgaacctatcttattgatagaatgtaaacattggaatcaagagttaactcttcatgataatcagcttcttcgttactttcatgtatcaaaagctaaattcggattactaaccaatggtatcgtttatagattctatactgatttagaaacgcctaataaaatggatgagaaaccctttttggaaattaatctccaagatctaaaatctcaccatattgatgaacttaaaaaattccataaagcttactttaatgtggacagtatattaagttcggctagtgaattgaaatatacaagtcagctaaaagcaatactctctaaagaatttgccaatccctctcctgagtttgttaagttgttatccaaacaggtttatgatgggatgattaccccaaaacttctggaacaatttacagcattagttagaagatcaatcagtagcttaatcagtgatactatatctgaaaggttaaaatcggctttaaaatcggaagctgctcaagaagaaaaagaaaaaagaactgatctgcaagaagaaaacccagagaatgataatggaatagttaccacagccgaagagttggaagggtatatgattgtcagagctatcttacgagaggtggttgatatatccagagtagtttacagggatgctcaaacttattttgcaattctgtttgatgacaataataggaaaccgatttgccggttatattttaatggaaataagaagtatatagcaacatttgataaagataaaaaagaaacaaagaatcatattgagtcattggatgatatttatgggtatggagatttgctaagggaaactgtgaggaattatatggggtgagtaaaaaaagaaggcgagtcgccccgccttaaatgttttcacaacggaataatccttattgtgactagcttcaaatgtttacacaaacataatacttttttttctaatttcaaaatttgattaaagaaaaactattcttatatttcgaatcaaaaaaagaaaaacttcaaaatatgaaaaatatcttaggattagatttaggtacaaactcaatagggtgggcattggttcaatcagatgaaaaatccaatacaggaaaaatcatagctgccaacagcagaataatccctatggatcaaggaattataggtgacttcgacagaggtaattccatatcacaaacagcagatcgtacccaatacagaggaaccagacgaataagagaaagaagtttacttcgccgtgaacgtttacatcgagtactacatgttctatattttcttcctatccactatgctaatgaaattgatttcgaaaaaaagttaggtcaatttaaaaattatgctgagcctaaaataaactacatacaagaacaaggaaaaaacatttttctttttagatcttcttttgaagagatgttgaatgattttgcaaaaaacaattcattactcattgcagataataaaaaaataccctacgactggactatttattatttaaggaacaaagctcttactcacaaaatagaaaaagaagaattagcctggattattttaaacttcaaccaaaaacgtggatattatcaacttagaggagaagatgatgaaaatgagaaagaaggacaaactgaggagtttttctctttaaaagttgtagatgtaatagatagtggagacagaaacaaagacaacatttggtatgatgttatattggaaaatgattgggtatatcgtcgacaaagtaaggttttcttagattggaaaggaaagacaaaagactttattgttaccacacactatgacaaagaaggaaacataaagaaaagaagctttcgtgcaccttctgagaatgactggactttactaaaaaagaaaacagaaaaagatattgagaacagccagcaaactgtaggtacttacatttatcactcattacttaataatccggaagttaaaatcaaagggaatttggttagaactattgaaagaaaattctacagagaagaattaaaacaaatattagacaaacaaaaagaatttcatgaggaattaaaaaatcgttcattatatagtgcttgtatcgaagaattgtatcctcgtaacgaaaaccataaagaaagtattaaagaaaaagactttacttacttatttgttgatgacatcctcttttatcaacgtcctttaaaaagcaaaaaatcgtccattgcaacttgtgccctagaataccggatttataaagataaagagggaaaatatcaaaaagtgccaattaaatgtattccaaaatcacatcctctttttcaagaatttaggctatggcaatttattcagtatctgaaaatttatcaaagagaaggtgaaatagatggtaaacttactactgatatagatgttacttcccaattattacccacagaaaaagattggcaggatttatacgattggctatgcgaaaaagcggagatcaaacaagacatattacttaaatatcctaagttcggactaaaaaacaaagtaaatcaatatcggtggaattatgtagaagaaaaaatatatccttgcaatgaatttcatagcactgttcattcacgtttacaaaaagccggaatacccaattttaataaagaagatgagctggctttatggcatattttgtactcaatagatgaccgcatagacctaacaaaagccctaattagctttgccaaaaagaaacatttgccagacacatttgtggaaatattcaagaaatttccaccattaaaaaaagaatatggtgcttattctgagcacgctatcaaaaaattactttcactaatgcgtttgggagagtattggtcggccaataacattgacaaaaaaaccatgctacgaataaacaaaattatagatggggaatatgatgaaaatattcgaaaccgagtacgagaaaaagccattaacctaaatactgtagaagattttaaagggctccccctttggttggcttcctatattatatatgacagacattcggaagctggagagatattaaaatggaacactcctgatgatattgaaagttatctacagcactataaacaacactctttaagaaatccaatcgtagagcaagttattacagagacccttcgagtagtaaaagatatttggacttactatggaaaagggcaggaaaacttctttcatgaaattcacatagaattaggtcgtgaaatgaaaaacactgctgaaaaaagaaaaaaaatagcagacagaaatgcaaccaacgaaaataccaatctacggataaaaacattactggctgaatttaaagaaagcggagatatagagaatgtacgcccctactctcctaatcagctggaaatatttaagatttttgaagaggatatcttgaactccggtatagaaatacccgatgatattcaaaaaatagcccgatcggctcaaccttccaaaagcgaaatcataaaatataaattatggctggaacagaaatactgttctccttatacaggaatagttattccattaagcaggttatttacctcagattatgagatagaacatgtgatcccccaatcacgctattttgatgattcattaagtaacaaagtaatctgcgaagcagccgttaacaaagacaaagctaataaactaggatatgaatacattaaagagaacaagggaagaattattgatataggttttggtcgaacagcaaagatcttttctccaactgaatatgaagaatttataaaaaacagatttagccataataaagctaaaatgaaaaaaatgcttttagaagatattcctgaatcatttattgcccgacagttaaatgacagtcgttacataagcaaagcagttcaggggctattatctgctatcgttcgtgaaaaagaagaacaagaacttatatccaaaaacattgtatcctgcaatggaagtataacttctaggttaaaacaagattggggtataaatgatgtttggaatagcattattactctcagatttgaaagattaaaccagcttacaaatagcaatcaatatggagaatggaaaaataaggatggaaaaagagtctttcaaatacaagttccattactccaacagaaaggatttaataaaaaaagaatcgatcacaggcatcatatcgcggattctatcattatagcttgtgccactcggaatcatgtaaatttcctgaataatcaatatgcaaaaagtgataaaaaacgatatgacttaaaaaactcactatgcgaaaagggtaagtttaaaaagccatggttgtctttcacacaagaaaccaaagaaacaatactatcttccattgtaagcttcaaacaaaatctccgtattattaataaaacagttaaccactattataaatgggagaaagatgaaaacggagtttacaagaaaacactccaacggcaaataaaaggagattcctgggctatacgcaagcccatgcataaagaaactttgtatggaagaatcacattgcgtaataaaaaggaagtgaacttatcagttgctttagatgattggaaatcgttggtagataaaatattaaagaccgagattaaaagactcatcgcagcctatgggaaattcgacaagaaaacaatactcaagtattttaaggatagagagaataaactgaatggaaaagatatttccaaagtaaagatatatatcttcaattctgaaaacgctgtatcaagaacctccttaaatactgattttaattcaaagaaaatagaatctgtagttaatgagggaatccaaaagattctatcaaaacacctctctacttataatgaaataaaaaatggaaaaacgatagagcatcctgaacttgcgttctctccagatggtatagatgaattaaatagaaatattcttgaattaaataatgggaaacatcacaaacctattcataaagtccgtacatacgaacctattggaaataaatttagagtaggttataatggaaacaagaaaaataattatgtagaagcagctaaagggactaatctcttctttgctatttatcaaaatgaaaatggcaaacgaagttatgaaaccattcctctcaatcttgtaattgaaagacaaaaacaagggttaacttctgtacctgaacgaaatgagaaaggagccacactattattttcattatctcctaatgatttagtttatgtacctacagtagaagaagtagaagttggacaaattgattgggcagataaaaagaaagtggcggaaagggtttataagatggttagttgtactcaaggagagttccattgtataccttatcacatagcaactcctattattaaaaatatcgaattaggctccaacaataaatctgaaagagcatggagcggagaaatgatcaagcaaaactgtattcccattttaatcgatagattaggcaacataaaacaaaaattatgataaagaaaacgctctattttggaaatccaacctacttatctctaacaaatgagcaacttataataaaattgccagaagtagagaaaaataatacagtccccgaatcattcaaaaaagaaatgataaaaacaattcctattgaagatattggagttattatcttggatcataagcaaattactatcactcaaggcttattagagaaacttctggataataattgtgctgtaataacttgcagcagcaatagaatgcctattggtctcctattaccattatgtggaaataatactcaaaatgaaagatttacagatcaaataaacgcttctctccccataaaaaaacaattatggcaacaaactattaaacaaaaaatagaaaaccaagccgtcgttcttcataaaaacagaaaaataacgattaaaaacatgctggtttgggctaaagatgtaaaaagtggagacccagataattacgaagcacgtgctgctgcttattactggaaaacaatattccctaatatacctgaattcacaagagaccgagaaggaatacctcccaacaatttgctaaattatggttatgctatccttcgtgcagtagtagctcgttctcttgtttcaagtggtttgttgccaactttaggtattcatcatcacaacaaatataatgcttactgcttggctgatgatataatggaaccttatcgtccgtttgtagatcaacttgttattgatatcataaacaacacaccagattatcaagtattaaccacagatgtgaaaagcaaattattaagcatccctgtgcttgatgttaagattaatggcaaacgaagccctttaatgattgcagtaggtcagactacagcatcactatataagtgtttttctggagagattaggaaaataatctatcctactatgacttagagttttatggaacgttttagtgaatatcgtgttatgtgggtacttgtattttttgacttaccaacagagactaaaaaagaacgaaaaatctattcagactttcgcaagaaaataatggctgacggcttcactatgttccaattttccatttacgtaaggcactgtgctagcagagagaatgcagatgttcatataaaacgagtaaagaaattattaccagaaaaaggtcatataggaattttatgtattacagataagcaatttggagacattgaattattctatgggaaaaaggaggaaaaggtaagtaccccttatcaacaacttgaactattctaacaaaaatagaattgttaattttacataaacgtctatttgggtttaaagttttaaattcaacatgacacatacaaagcttctatataaaaagaaatctgatctaaaagatcagatttacattaaagaacagcctcattttataattgtaaaacccttcataaaaacctgaataacaagcgattaatcaacttgtgctgttcctaatggaacaaagataaacatttgaaagctatacacaacactcagagcgtgtggcgtcctgccgcttcagctgttcctaatggaacaaagataaacatttgaaagctatacacaacctgcattcacaccacgtgaattgatgcaaggctgttcctaatggaacaaagataaacatttgaaagctatacacaacatgaacaacaaaaagaaattaatcaaaaaagctgttcctaatggaacaaagataaacatttgaaagctatacacaactgcagcctccattactatttcgcgagtaatgctgttcctaatggaacaaagataaacatttgaaagctatacacaacatgctgctgtagtccaagtgttagctggaggctgttcctaatggaacaaagataaacatttgaaagctatacacaactatagcgatagtctctacttgcgaggtactgctgttcctaatggaacaaagataaacatttgaaagctatacacaactttcaagaacaccactatccacccattcagctgttcctaatggaacaaagataaacatttgaaagctatacacaacgttcgatcaatgtatactatataagacattgctgttcctaatggaacaaagataaacatttgaaagctatacacaacttgatctgtttgcggatatggctcctattagctgttcctaatggaacaaagataaacatttgaaagctatacacaacattctccccgttgtagttctgaactcgttgctgttcctaatggaacaaagataaacatttgaaagctatacacaacattttgccgaccgcaggctatctatagtcgctgttcctaatggaacaaagataaacatttgaaagctatacacaacaacaaattatatggaacaaaaagatgatgggctgttcctaatggaacaaagataaacatttgaaagctatacacaactacgcgcgctgtaacagtgtgcgatatgcgctgttcctaatggaacaaagataaacatttgaaagctatacacaacagtttacttaacacatagccacgtttaactgctgttcctaatggaacaaagataaacatttgaaagctatacacaacgttgtggaagaataataattgatttttttgctgttcctaatggaacaaagataaacatttgaaagctatacacaaccgagattatgtgtacttctctcgtatgcccgctgttcctaatggaacaaagataaacatttgaaagctatacacaacgatcaaccctattcactatcagaatcaggagctgttcctaatggaacaaagataaacattttgttctcatttagataaaataacaacccatcaaaaacatttcctcccctccccttgtttattaccaataacatcaaaaccataccatgtcaatacacgattttatatacactttcgtatcagcttttgtagccctgtttcctgtaaccaaccctataagcagtggttttattattaatggctttatttctgacctaaacgatgatcagcgcaaaattgtcatcaagaaaattattattaattgtttagttataggtataggcagtttgctgataggccgactcatcctcttaatatttaaccttgctataccagttgtacagcttgctgggggaatattaatttgtaaaacaggtttggaatggctatcagacacttcatcatcgaaagatgataccaaagaagatgctatcaataaaattaatctggaagaaatagaaaagaaaatattttatcccatctccttccctattagcttgggacctggaagtatatctgttatcctcactctcatagcttcttctactgtaaaagataacttattggcaacaagtattaattatgtattaatagccttagttattgttgcactatgtgttattctttacctattccttacgggaggacaacgcatgatgaaaaagattggaaagtctggaaatttggttattaataagatggtagccttctttacattttgcattggtttgcaaatcatggtaacaggtatatctaaaatttttcatttaaatattttgtaaaacactatcactcaatcaactacaaccacaacatgcaacaaaatcaaatttacacacattctaatatttaataaaattaattaacttgttattcattgcactttctgtaactttgtaaaccctaaaaacgaagacaagcaagaaagaacctatatttatgactattttatatccgcaggagcatttttcctgctacaattatgaaaaagggcagaatgccgcacttgaaattttgaaacgagaagctggttataccattgtaagagacttggtagacactgaaattgtttttattattgatggacactttaaattatcatactctaaatttgtaaacttagatatcaccaaaggaaagattttgtttttccccccaggaagtcatgtaaaagcagaagtgacagaagatgcacatcttattatatgtagagtaaggggaattctccaactgtgtgaatgtttgccattggaacatcttcataaagaatatgaagaaaagaaaaacaatgagttctacatgttggatataaacaaacgcatctatagttttatagaaaattttgttgactatgtaaatgatggtctacgttgtaatcacttctttgctactaaaatgaaagagttatttttccttttaagagcctattaccaaaaagaagagcttgcagcattctttgcaccattaatgagtcgcgatgccaaatttatgaatctaatgtataagaactatcgcaatgtaaaaagcgtacaagagcttgcagatattgccatgtacagttcatccggatttaaaaaacaattcaaccgagtattcggaacatctgcatcagaatggcttagtgatcaaaaagcggcattagtatttcaagacctaaacaattctgatttgcatatcaaagagttggctgataagcacggattctcttcggtatcctcgttcactaatttctgccagaataaattcggtatttcgcccgggcgaataagaaaaccagctgatagaaagccgtaaaatcaaaaagtagctatctgctataaaaaagtaaccctcagcataaaaaactgggggttatctgtttctacctttgcatggctaaagaaagaaatacaaccaatgaaacttctatccccccaagaacatttttcttgttacaattacgataaaggacaaaatgcggcacttgaaattttaatgcaacccacagaatccaccatcgaaagagacttagtcgacacagagattgtgtttgttgttgatggacattttaaactatcgttctccaagtttgtagacttggatattcctaaaggaaaaatattattcttccctccgggaagtcatataaaagcagatttcacagatgaaacacatctaattatttgccgaaccagaggaatatttcaattatgtgagtgcctacccatagaatatctttataacacatacggaaacaagaaaagcaatcgttttcaaatgcttgatattaatgaaaggatttatcgttatatagacgactttgtacaatgtgtaaacgacggtttgtactgcacctactattttagcactaagataaaggaacttttctttcttttaagagcctactacagtaaagaagacttagctgcctttttcgaacctcttatgagtcccaactctcgatttatggatttaatgtataaaaaccatcgaaaggtgaaaaatgtacaagaacttgctcagatatccatgtatagctcatcaggatttaagaaacaatttagcaaagtatttggaacatctgcttcagaatggttaagagaacaaaaagccgcgctaatttttcaggatctaaataactcttcattaaacataaaagagctggccgataaatatcaattttcatccgtatcttctttcagcactttttgccaaggaaaatttggcatttcacccggcaaaataagaaaaaagcagtctaaaaaagaatagcaaaaaaagcatccccagttaattctataattcattcgttgcatggttgtaacacataatatatgatgcttcttatgcctggtttttccacggccgcagcaaagttttgtcacggccgtggaaaactcttgttgcggccgcagcagaatcttgttacggccttggcaaaatctcgttacggccgtagcaaaatcttgctaaagcaattaaaaatatgccgcaggggaaaattattcaacgaagattgggtaaaatcagttagttgatgttatctttgcataactttttttttaatcagaactgaacaagcattcaaaaagatatgataactaagattaaacaacttctcgaagaagtagaagcactaaaagcttctagtgctgaagagcttgaagctctgcgcattaagtaccttagtaaaaagggagccattaatgacttgatggccgattttcgaaatgtagctgccgatcaaaagaaagaagtcggtatgaggttgaacgagctgaagaccaaagcacaggagagaatcaacgtattaaaagaacaattcgaaagcaacgacagcggaaaagacgaattggatttaacccgttcggcctatcccgttaaattaggaacgcgccatccgattacaatcgtcagaaacgaagcaatcgatatattcaaccgtttaggattcagcatagccgaaggtcctgaaattgaagatgactggcatgtgttctctgctttgaactttgccgaagatcatccggcacgtgatatgcaggatacattctttatcgaagcacatccggatattgtattgcgtactcatacttcttccgtacaagttcgcgtgatggacaagatggaacctcctatccgtattatctgtccgggacgtgtatatcgtaacgaagctatcagctaccgtgcacactgtttctttcatcagatcgaagctttgtatatagataaagatgtatcattcaccgatttaaaacaagttcttttgttgtttgccaaagaaatgttcggaagcgaaacgcaaatacgcttgcgcccttcttattttcctttcacagagccaagtgccgaaatggatatcagctgtaacatctgtggtggaaaaggttgtccattctgtaagcacacaggctgggttgagattctgggttgtggtatggttgaccctaatgtattggaagcatcaggtatcgacagtaaagtatataccggttatgcacttggcatgggtattgagcgtattaccaatctgaaatatcaggtaaaagaccttcgaatgttctcggaaaatgatattcgtttcctaaaagagttcgaaagcgcatactaaatagttgagagttaagagttgagagttgagagttatcttatggataattctttgctctcaattttcgtatttcaatatcttaaacaataattcagcaatcatggaaacccctgaaaatgaaataaacagcaacccaaacaactctcaactctcaactctcaactctcaacttctaaccccgggatattgttttatattagcagccaatttccttctgttctttgccttctatctgatactacccattctcccgttctatctcacagaagtctttgaaacaggacatgccttggttggagttattttatcctcctatacagtggcagcactgtgtattcgcccattttccgggtatttactggatacattttcgcgtaagccgctttatctgattgcttactttatcttcacttccatatttgccggatacatgctggccggagtattaaccttattcatcatgtttcgggtagtgcacggattggcttttggaatggttactgtggcaggtaatacaattgttattgatatcaccccctcttcccgtcggggcgaagcaattggctattatggattaatgaataacatggccatgagctttggaccgatggtagggctttttatgcatgatatttattcatttcaaacgattttcctttgttcgttaatatcgggtacccttggctttgttatggcttgcctggtaaagactccggaaaaagtacccgtaccgcgagaacctatttcgttagatcgttttattctattaaaaggaattccggccggagtttccttattattgctatctgtaccatacggaatgacttctacgtatgtagccatgtatgccaaagaaattggaatatccatcagcagtggacttttctttacctgtatggcggtgggcatggcggtatctcgtatgttttccggtcgacaagtagataaagggcggattacccaggtaatcaaactgggactttatttagtttgtatttgctatttcttacttgcagcttgtggctcacttatggcagtcaacgaacaaattaccactgtactgtttttcctgatagctttattacttggaattggtttcggtacgatgtttcctgcatttaattctttattcgttaatctggctccaaacagcaaacgcggaacagctacctctacttacctaacctcttgggatgtgggaataggtatcggactaaccgccggaggttacctggctcaatatacttcttttgatatgacttatttcttcggagcttgcctgacggtagtttctgctattttcttcaacctgaaagtggctcctcactttcataaaaataagttgagataattatgacaaagaaagaacgttaccaaaaagtgattgcttggtttcagaccaatatgcctgtagccaaaacagaacttcactaccacaatccttatgaattattggtagctgtaattctctctgcccaatgcacagacaagcgagtaaatatgattactcccccacttcttaaagattaccctactgcggaagcaatggcagcggctacccctgaagttatttatgaatatattaaaagcatatcttatcctaataacaaatcgaaacacctggtaggaatggcatgtatgctggtaaacgacttcaatggcgaagtaccggacacactggaagaattaataaaactaccgggagtaggtagaaaaacagccaacgttattcaatccgtggtatttaataaagcagcaatggcggtagatactcacgtttttcgcgtatcaaaccgtataggacttaccaccaactccaaaactccgctggctaccgaaaaggaattaataaaatacattccaaccgaattggtgtccattgcgcatcactggctgattctgcatggaagatatatctgtcaggcaagaactccaaaatgtgacaagtgtggtttgcaaatgatgtgtaaatattactgtgacacttataaagtacataaagagaagccaaaagctgcgaagaaaataataaattcatagcaaaaaatagaaataaacattaactttgcggactgttaatcaaaatggaattacatttttaaataaacaatagagtattatgcagacaattgacaattacaactttgcaggcaaaaaggcattcgtcagagttgacttcaatgtacctttggacgaaaatttcaacattacggatgacacccgtatccgtgctgctcttcctactttaaagaaaatcttaaaagatggcggtagcataatcatcggttcacacttaggtcgtcctaaaggacctactgataaattctccttgaaacatattaccggtcatgtatccgaattgttgggagtagatgttcagtttgccaatgactgcatgagtgaagaagctgctgttaaagctgctgctcttcaaccgggcgaagtattagtgctcgaaaatcttcgtttctatgcggaagaagaaggcaaaccaagaggacttgccgacgacgctacagacgaagaaaaagctgctgctaagaaagctgtaaaagaaagccaaaaagaattcactaagaaattggcttcttatgccgactgttatgtaaatgatgcattcggaactgcacaccgtgcacatgcttctacagctcttatcgcacaatacttcgatgtcaacaacaaaatgtttggttatttgatggagaaagaagtgacagctgtaaacaaagtattgaacgacatcaaacgtccgtttactgctatcatgggaggttctaaagtatcttctaagattgaaatcattgaaaacctgatggacaaggtggataacctaattattaccggcgggatgactttcaccttcgagaaagccatgggcggacaaattggtctttcactttgcgaagaagacaaattagatctggcacttgacctcatgaaaaaagccaaagaaaaaggtgtaaaccttgtattggctaccgatgccagaattgccgataaattctctaatgacgcgaatgtgaaattagcagaatctaatgaaattcctgatggatggcaaggtcttgacatcggccctaaatcagaagtattatttgccaaagtaattaatgaatcaaaaacaatt

SEQ ID NO: 1313 - DNA, 17364 bp, synthetic construct
  misc_feature 1..17364: note = Synthetic
  source 1..17364: mol_type = other DNA
gataagttcattttcatcaacattgattccattgtcttgatagtacttcgcgagttttttgcgataggacatattacccgccgaatgactgtaatcaatcagtttgagcgtgttgttacgaacagctgcgagcgcaccttctggagcttcgacgtcgggctgaccgatattcagatggtaaatgtgaataccgcgttttttcgcatcttctgcgtacggaaccagtttcctaatcggagaaaccggcatttgaatagctttttgtgagattgttggcatatttttttgtttattattattactggattgttcttgggttgactctacctgtaatgcgtagcgtaacacgatgtgtatcgttaacagaatttgaatgtacgacggctgctctaccgatgtgtccgatacgattagtatcgtagtgaacagttatcgaaccaaattcgccgggcatcaccggttcgcgagaccaagttggtcttgcacaaccgcatccggtttgtacatgtgtcaaaatcaacggttccgatccaacgtttcggaacgtaaatacggcatcaccgttggcgccttgctcgatttcaccgtaatcgtgtacaagtctttcaaattcgattttcggtccttccgcaataggaacaaatgcgggagtctcttgaactgcttccgcttgacgagcggctcttctttgagcatctgcggaatataccacaaatgctatcaatgctagggtgcaaagaatttttttcatatcttaaaatcttaaaattatctggaaactacatttccgttgacacgaagtataacacgatcgcttcttgcgctcgagagaattgtaatagtgctactccttgggccaacaagatttgtgttgtagcgaagggctatcacgccttcttgtccgggcataatgggttcgcgagtccaacttcgtatggttacacatgctgaacaagactgtcgaacatcaaacaaaaccaggggttccgaaccaatgtttttaaacctgaaatcaatatcgccgttcgcatttagagcgatatcgccaaagtcgtgagtcatttgttcaaactgaatctgagcaccttgtacagtcggtacaaactcagagttagcaggatcagcaactaaattgacttgttgctgttgggcatttgccgaaactgccgtaaaagctgctaatgcaagaatgcaaagaatttttttcatagttgtgtatttgctctttataggttagacattttttgttgaaaaaggtttagtcatccaaatcaaaacttccaactctgcaaagatacaactttttttttgaaataacaaaaaaaaccggtagcgccgatgcagtttcaacatccaaatgcaactttaattctgcaaagatagaaaaaatgcgtatctttgtttcgtgattaaacatgtttttcattgcaacggtaaaatgcctatgaacaaaaaactaatttcttccttgctgatggttgtctgtatgcttggctctaaggcacagccaaattttgaacttttttatgttacagattttcgaactaatttcgggagaaattacaactggacgaatttgttgcaactaactgccgaaattccaaccgaaacaataagtaatcgttggaaaaacggaaaatttataatccaacccataaccgtatatagcctttttgaagatcctgtgattgacgatttattaggctattccaatatctttgcggataatttgccattgaatttccttgtatttggatatgagcatcattggggaagattttcgttgtttgccggtgttcgaaatatcaccgcagactatttttacaaagactatatgtcgctttttacacgtggggctaacggaatggcgccaacgttgtcgtccaattttccaatggctgactatccattttctgcaatgagtttgcacgccgaattttttatgaatgacaactggttttttcagacgagtttgcacaacggtgttgcccataatccggcgagaaatccactaagagccttcaccgtaaatccacgcaacgacggcatttttagtatttcacaaataagttattcgcaaaacaaaatcggtcggggcagttattctttggggtttgcaatgcacagtttcggaagtatgagaccttcatttttcggaaaatttgaacaaacgctgttagaaaatgaacaacacgaaataggaataactttacaaggcggatattcggcaataccaacacggtcgggatttgattaccacttgaatggcgagcccagatgcaagttttatttcggcataggtggctatttcagaggttttctgagcagaagcaaacgtgatgcttttggtatccattttacttcggcgaattttgaaaacatcaacgaacgtgctttggaaatcacgtggaagtatcaactatttaaccaactttccattcagccgacatttcaccttgttcagacaggaggcaccactagaagcgttggaatgcttagatttgtacttcaaatttgagcaagattttttgctttttgtttccatcaaaaaaaaaagcgacacttacgtgccactttgagtgttttcacaacggaataatccttattgtgaattgcttaaaaatttgtactgcaaagttacgaaaatatttttgaatttgcaacttttttttgtttctattgtttagtatctttgcaaagacattgagcaacaaacaaaaagacgtatgaaaaagatactcgggctggatttaggaactaacagtattggctgggcgttgatagaaagtgattttgacgctaaacaaggaaaaatacttgggcttggaagtcggattattccgatggatgcaagcattatgggcgattttggtaaaggcaattccgtttcgcaaactgccgatagaacaaaatatagaggtgcgagaagattgtatgagcgtgataatcttcgcagagagcgtttgcaccgcgtgttgaatgttttaggttttatgcctgaacattacgcaaatgatattgattttgaaaagcgattagggcaatttcttgatgaaaaagaaccgaaaattgcatggaaaaaagtgtggaatgaacaaaaaaacaaaaaagagtttgtctttgttttccaaaattcgttcaacgaaatggttgatgatttcaaagcaagaggtcttgacataaaaatcccttatgattggacaatttactatttgcgtaaaaaagcacttactcaaaaaatcgaaaaagaagagttggcgtggctattgctgaattttaatcaaaaacgtggttattaccaattgcgtggcgaagaggaagaagaaaatccaaacaaattggtagaatttcactcgttgaaaatagtcgatgtagtggcagatgaaatgcctaacagcaaaggcgatatttggtattcgctacatttggaaaatggctggatatatcggcgatcgagcaaaacacctttatttgattggaaagacaaggtgcgagatttcattgtaacaagtgatttgaatgatgatggaacggttaaaaccgacaaagaaggtgctgaaaaacgctcgtttcgagcaccgagcgaggacgattggactttgcttaaaaagaaaacagaggcagatatagataaatctcaaaaaactgtcggcacatacatttacgaagcattgttgcaaaaaccaacacaaaagattcgcggaaaattagtgcgaacgattgagcgaaaattttacaaagatgagttgattgccattttgaaaaagcagatagagttgcaaccagaaattttcacagaggatttatacaacgattgtgttcgtgaattgtatcgcaacaaccaagcacaccaaacttcgttgagtaaacagaattgctttgtgcatttgtttgttaatgatattattttctatcaacgacctttgaagagccaaaaatcgtcaatcagtaattgtaccttggagtatcgcaaatataaaagtaaagatgggaataagattaaagaatacctaaaagccattccaaagtccaatcctttgtatcaagaatttcgcttgtggcaatggttgtacaatctgaaaatatatctaaaagacgatgataccgatgtgacagagcaatttattgcaagtgtttctgataaagaaaatttgtttgattttttgaacaaacagaaaaaaatcgaacaaaaatcacttctgaaatacttttttggacaaaaagggtttaaaggaaagcaacttaatgcagagattgaaaaatatcgttggaattatgtagaggacaaagaatacccttgcaacgaaacgggttctgaggtcataaaacaattgaataaagtcgaagatgttccagccgattttctgatacccgaaattgagcaaaaactttggcacattatttactctgttacggacaaaaatgaatttgagaaagcattaaaaacatttgccaacaagcacaatttagacgaaaaatcttttgttgaaaatttcaagaagtttccaccattcaaaagtgaatacggctcgttttcagagaaagcgattaaaaaattattgccgttaatgcgattgggaaaatactggaacagggaagtaattgacgaaaaaaccaaagacagaataaacaaaattcttacaggcgaatatgatgaaaccataaaaaaccgtgttcgagaaaaagcaattgatttaacttctgaaaatgattttcaaggtttgcagttatggctggctcaatatattgtttacgaccgtcattcggaagcaggcaatacggataaatggaaaactgttgctgatttggaaaagtatttggaaaaattcaaacaacattctttgcgaaatccaattgtggagcaggtaattactgaaactttgcgagtagtgcgcgatatttggaaaaagtacggtggcgatttttcggaaatacacatagaacttggtcgcgaaatgaaaaacacggcagaagaacgtaaacgattgactaacattgttactgaaaatgaaaataccaacctccgcataaaggcgttgataatggaattgaaagaaagtgccgatgtagaaaatgttcgtccgtattcgcccattcaacaagaggctttgaaaatctacgaagaatatgctttacaaaatgaagaggagtatgatggacaagatgaggaaacaggaaaagataagtttatttccgcagtaatacccgaagatattttaaaaataagcaaaacagcacagccttcaaagtcagaattgcaacgttacaaactgtggctcgaacaaaaatatcgttcaccttacacaggacaaatgattccgctcggaaaattatttacagaggaatatcaaatagaacacattattccaaaatcccgctattttgacgatagtttgagcaataaagtaatttgtgaatcggcagtaaatcaattaaaagacaagcaacttggatttgaatttattaaaaatcatcgtggcgaaatagttgaatgtggaatgggcaaaaaggttgaaatcttttcagaagatgcctatcaaacttttgtcaaagaacattattccaaaaactataaaaaacgcaataatcttttgttggaagatattcccgaaaaaatgattgaacggcaaatgaatgatacacgttatatcagcaaatttgtttcgcaacttttgtcgaatatcgtgcgtgaagaaaccaacgatgacgatgtaaattctaaaaatgtactacccggaaatggtaaaattacctcaaccctaaaacaagattggggtttgaatgatgtttggaatgatttgattttgccacgttttgagcgaatgaatacgctaacaaactcaaatgcgtttacggcgtggaatgagcaacatcaaaagttcctgccaacagttccgttggacttatcaaaaggttttcaaaaaaaacgtattgaccaccgccaccacgcagtggatgctttgataattgcttgtgcaactcgagaccacataaatctgttgaataaccaatctgcaaaatcgcaaactacaagatatgatttgcaaaacaaacttcgtaatgttgaaaaatggattgataaggacggaaaagaaagagacaaattcgtagaatttaaaaagccctgggataattttacagttgatgctcgaaatgagttagaaaaaatcgtaatcagttttaaacaaaatttgcgagtaatcaacaaagcaacgaataaataccagaaaattaaagatgacaaaaagatcaaagttaaacaagaaggtataaattgggctattcgcaagccattacacaaagacactatttatggcaaagtgtacttgctcaacgaaacaaaggaaatgactttgaaaaaagcactggaaaaagttgaacaatcgaaagatgtaaatattattgtagataaaaatattagagaaagagttaaagtccattttgcaaataataacattgacatctcatcagccttaaaggatagtgaattaaaagatatttcaaaaataaaagtatttgaacaaaatgtagcaacaaggtatcttaacgatttggtatctattttcaatggtgttacaacagtagataaggctaaaggagtaattgaaaaaataacagacacagggatacagaaaattttgctcaatcatttgattgccaaagacaataagccagagattgctttctcgcttgaaggcattgaaggtatgaataaaaatattatcgctctaaataatggaaaatttcatcagccaatttataaagtcagagtacaccaagcacttggaaataaatttcaaattggctccacaggcaataagaaagataaatatgtagttgcagaggctgggacaaatctcttttttattgtttatgaagaaaatggcaagcgaaattacgaaactgttcctctgaatgaagtaatagaataccaaaaatggcgaggtacattaacaaaagaagagcaaaaaactacacctattgttccaataaaagaagacagagggcactatctatttcacttgtcgccgaacgatttggtctatgtgccaacagaagatgaaaaagaaaatagtcgtgcaatagattggaaaaatttggataaagagcaattgaagaggatctataaatttacagattcaagcgatacaactgcgaattttgtaccagcgaatgttgctaatctaatttttaatatgaataagactgaacagcaaaaacgagggttaaatttcaatattcaaaatgaatttggcgtaggaagtccacagtccaaaaaccaaagagcaataacaggggaaatggtcaaagatgtatgtatcaaactaaatacagaccgtttaggaaatataaagccattataatttatgccaagttcaaaaataaaaattcaatcatcagaacaagttttgttcaacgacctttctaaactcattgaacaaagcaagcaatttgttgttattcaagcaaacagcgtaatgactatgctgttttggaatgttggcaaacgaataaatgaagacgttttgcaaaataagcgagcagattatggtaagcgaattgtgccgacactgtcggcacaattaatggaaaaatacggcaaaaattttgaagacaaaaatttgcgtagaatgatgcagtttgctgataggtttcctgatttagagattgtcgttccactggcacgacaattgtcatggtctcatcttcaaatccttatacctcttaaagacgaaaaagcacgacagttttacgctaaagaagcaacagaaagacactggggcaagcgcgaacttcgccaatctattgaacgaaaagaatttgagcgcacagaaatcgccaatgtgcaattaacggagcaatcgcccattccgtttaatgtgttcaaagatccttattttttagattttctaaacctgccaaaggattttctcgaaaatgatttggaagatgctattcttaaagaagtagagcgatttattctcgaaatgggaaagggttttgcctttgtagaacggcaaaaacgaatgattatcgatgatgaagattttcatttagacttgcttttttatcatcgaacgctaaaacgtttggttgctattgaattgaaactcggaaagtttcaagcaaagcacaaagggcaaatggaattgtatttgaaatggctcaatcgccacgaacggcaagaaggagaaaacgaacctgtcggactgatattgtgtgcagaaggaaaccgtgaacaaatcgaacttttagaaatgcacaaagacggaattatgattgcagagtactggacagaactaccgcctaaaaaaatgttagagcaaaaagtccgtgaaatagttgctgaaactcgcgaacttttcgaaagaaataaacaattgaatcaatgataaaacgtaccctatattttgagaaccccgcctatctaagtttaaaagataaacagttggttgttaaactgcccgaagtggaaaagaatgactctttgccggattcgttcaaggcggaaagcattaggacgattcctattgaggatatcggcgttgtgattttagacaacaagcaaatcactctgacacacggattgatagaggctttgcttgaaaacaactgtgcattgattacttgcgatagtcgccgaatgcctgtcggattgcttttgccgttggaaggaaacaccgtccaacaagaacgttttacggcacaaattgaggcatcgctaccgctgaaaaaacagttgtggcaacaaaccatccaagcaaaaatagagaatcaagcctacgttttgaagaaatgccgtaatacggaagtgcgaaatatgcaaaaatgggcgagcgatgtgcgaagcggagatagtgataatttggaaggaaggtctgctgtttattactggaaaaatcttttcccgatgattgagggttttactcgcgatcgtgacggcgtgcctccgaataatttgttgaattatggttatgccattttgcgagcagttgtggcacgggcgttggtgtccagtggcttgttgcctacgtttggcattcatcaccacaaccgctacaatgcctattgtttggcggatgatgttatggagccctatcgtccgtttgtggataagttggtggtggaaattgttgatgcgtacaatgtagagatgcaacgcattgcatctctaccaaccgatttaaccaaagacgtcaaaataaaattgttacagattcctgttttggatgtaatgattaacgggcaacgcagtccgctgatggttgcggttactcaaactacggcatctttggcaaaatgttttttaggggaaaatcgtaagattgtttatccggattttgaataaatcgttatactcacaaatgaacggtaaagcaaataacaagcagatgtctcgcttcgctcgacatgacgatggactgggtaagggagaggagatggaaaggattttgggcgaagcccaaaatcctttccatctcccaagctctccacagaatgccgtcattccgagcgtagcacacgtagtgtgcgaagtcgaggaatccccttgctatgggcgaagcaactcataactataaaatgaaaattatggcaacagaattaacaaaagaacaatttattgagattttacttgatgaaaaaatcacaaagccagaaaatatatttgactttcaaaccatttattcgtttgataatcatcaagcccctgccaatcgtgttgttaggaaacaatggaagcattctgaacgactattagttgataaagaaggtcctcgtcctgtgggtcctatcaattcccgaatagggtggcttggaaaaagaatagcaaaaaagtacccaatcacacttagcaagagagaaaatggtacgtatcgatattgggatttatttttcaacggttggaatgaagggaatctttttatatggcaattgaagtctaatttaatcaaggcactcgaagaaacaggcttggtcgaaaaaaaaaatgcccacaaaactattgaccaaatcaataaagaatttgaagaaaaagtaaaattttcaaaaaacgatagcgagcaagaacggcaagagcgattaaagttagcaaacaaaaggccaatcagcacttcggcacaggtaaacgtatttttgcgtaatcccgatgtgaaagttgaaattttgcgtagagccaacgaacattgtgagtattgtcaaagccctgcaccattcaaaaaagacggtgatggggaaggttttttggaagtgcatcacattattcctttggctgaagatggcgacgatacagttgaaaatgctgttgcactctgccctaattgccatagacacgcacattatggcaagaatagttttgatgttgaaaggctaaaagcaatttgaaaattttgtggaacgtttcagcgaatatcgaattatgtgggtattagtattttttgatttgccaacggaaacaaaaaaagagcgaaaagcacacgcattgtttcgcaaaaatttgatgaaagacggtttcacaatgtttcagttttcgatttatttacgtcattgtgccagtcgcgaaaatgcagatgttcacatcaaacgtgtgaaaaaactattgcccgaaaaagggcatgttgggattatgtgtattaccgacaaacaattcggaaatatggaattgttttactgcaagaaacaaacggaggttgatacgccttgtcagcagttggagttgttttgaaaatagcgatagtaaaacctaaaagtaaaatctcgccgaaatcagcgagattttacttttttgcaaacattttttgttttctaattatctttgtaagtcgttgtttttcattttgcagtgcgtaatgtgttgtttgcgactacaaagatacaaattttttaagcaattcacaacggtgaggagcgttgagtggagtgcgatatggttgtttgcgactacaaagatacaaattttttaagcaattcacaactaagaagcgaattaagtgaatgcatcggcagttgtttgcgactacaaagatacaaattttttaagcaattcacaactggcgataaacttaaatctttttacgaagggttgtttgcgactacaaagatacaaattttttaagcaattcacaactaaatgttttacctgcttcatacacaggaagttgtttgcgactacaaagatacaaattttttaagcaattcacaacaccaaaagaccgatccacattcgcccgacgttgtttgcgactacaaagatacaaattttttaagcaattcacaacacgagaagtttagatataaaatttacatagttgtttgcgactacaaagatacaaattttttaagcaattcacaaccgccttgcgttctttcctttccaaatgtgagttgtttgcgactacaaagatacaaattttttaagcaattcacaactaatttttagttgttttacttaaagtttttgttgtttgcgactacaaagatacaaattttttaagcaattcacaactattcatttcatcacctcctccacggagcagttgtttgcgactacaaagatacaaattttttaagcaattcacaacgtctgtgcattcttcgcacatctcgtgttcgttgtttgcgactacaaagatacaaattttttaagcaattcacaacggtaaaacgctttctaaaaaactaaccgtgttgtttgcgactacaaagatacaaattttttaagcaattcacaactccataaagttttatgctccataaaataaagttgtttgcgactacaaagatacaaattttttaagcaattcacaacaaaggttggtcttagcgattcttcaaattgttgtttgcgactacaaagatacaaattttttaagcaattcacaacttttccctacgctttatacttttttcgatacgcaaagtaaaaaacctgcggaagcacagcaaatgtaagcaccatcgcaataatcatcccacctacaaccataatggctatgggcttttggatttctgaccccaaacctgtcgaaagtgcggcggggagtaatcccaccgaacctaacaaggcaatcattaagataggtcttgcacggtctctgacacctgctgtgatggcacttgtgaggtttcttgttgtgcgaagtttttccttgatgttttcgacaagcaaaagactgtcggtaacggtaacaccgaataaaatcgtaaagcctacacctgccgatattccaaacaccgttccggttgccaaaagcgacagataacctccgataaaagcaaacggaaaggctgtacctgcggtaatcaacgtatctcttacattgccaaaattcatataaagcaaaaacaaaatcagcaacaaagccattggaacaaccactgacagtcgtctcatcgcacgttccatattttcgaattcgcctgcccatacaatacgattttccggcgatatttcaacgacttctctaactcgtgcttgtgcttccgcaatagcaccacccatatctcgacctcgaacgctgaaacctactgctacaaaacgactgttgccttcacgataaataaacgcaggaccggtaacaaattcaatatcggcaatttctctcaaaggtacttgtacaccttcttctaacgttggaacaaggatatttccaatcgctatttcatcgctacgatgctcttctgcaaagcgtaagcgaacatcaaacatacgctcatcttcaaagaatgttgttgccgtagtgcctccgattgccatttctatcaccgcttgtgcatcttccatcaaaacgccatgacgtgccatacgtgtttgatttagacgaatttgcaattcgggcaaaccgacactgcggaaaacattaacatcttcaatgccacggatatcacgaatagcgtaggctatttcatcggcaacgctttccatttggaaaaggtctcttccaaaaacattcactaccaacgaactttttacaccggaaacatattcttcgacattatcctgaatgggctgactgaatccgaaatagatacccggataggcttcaagcacttgttgcatctcggcaacgaggtcgtcttgcctcacacgacgtgtccattcgcttctgggtttcaactcgatatgaaattcgatattgaaaaatcctgtgggatctgttccgtcattcgggcgtccggtttgtgaaaggataaaatctacctcttcaaattcacgcaatttcgatttcatttctcgggtcaaacgtacagattcttcaaggctgacgctgtttggaagcgtggcacgaacataaattgcaccttcgttgattcgtggaataaattccgtgccgtggttcataaatcctatcacacaggcaaccaacacagccgaagaagccacaataaccgcacgcttgcgacgtgcacagacttcgtatatccaaataaccgattgaatgagtgatctcgaaaccacgttatctctttcacggatgggctttgtcaaaaggactttacacatcacgggaacgaaagtcaacgccaatatcaacgagcctaaaattgcataacccaacgtaaatgccaatggcgaaaacatcttaccttcaacctgttggaaggcaaaaataggtatcaacgccactactgttgtgagttgtgcgaaaaagattgccggtgccacatttgatgcactgcttctaatcgttcctgttttaatgacattgctgaaacgttcttcgttgaaaccaagtgatttatttttcttgccgagcatcacgaaaactcgttcgacgatgactaatgtgccttcgagaagtagtccgaaattgagagcacccatcgaaataagatttgccggaagcccctgaatgcgcaacataatgaccgtaaaaaggaaggcaattgggattactaacacagtgataagtgtaacacgccaattgaaaaggaataaaaacaaaacacacgttacaagaaaaataccttcgagcatatttcgtgctacggttctaatggtcgtttcgaccaatatcgtgcgatcaataaatggctcaacccttacatccggtgggagaataaagttgttgagttcataaatttttgcgtgtattcgcctaataacttcgcttggattttctccgcgaagcataacaataataccttgcacaacatcataatcatcgttgagacctacctgtcccaagcgtggcattgaagacacaacgacttctgcaacgtgccctacacgcaccggaactccacctcgcacatcaatcagtatatgttctatatcctcaatgctttgaagcaagccgatgccacgcacagcaaaagcctgactgcctttctgtatcatatcgccacccacgttgacgttgctactttccactgcctccaaaacgtctaatgccgaaataccgtaactgttcaacaatacaggatttaggcgaatttcgtagattttttcttctccgccaaaactcacaacatcggcaacaccgggtacagacaacagttcacgttgtataacccattcatcaatggcggtaatttcacgaatatgtcggtcgcttcgtatgacatagcgaaaaatttcgcctgttgcccctgatggaggctctatttcagattcggcatcttccggtaattcgagccccattatacgcatagcggcgaatgtttgggcataaaaatcatcaacaccttcttcaaaaagaaccgttaccactgacaatccgaacaacgatgtggaacgaactttggtttttcgcggtatcgtgttcaattcacgcatcaccggaagggtgatgaatttttcaacctcttcggcactgcgaccgggccattgtgtgatcacacgtacacgtgtactggtaacatccggataagcctcaataggtgtgttgaatgttgctataataccggctacgaccaacaaaaacgtcataaacagtacgaaaatgtggtttcgtaatgaaaaagcgactatatttttaacgaacttgtgcataattatcttgctctaaaatgaggagtaaatcaatagttatcttgctctgagtgaggaatgtatcagtagttgatttcttacaacaaccgcttcattttccgatagtccgtcagtgatgtatgcaacatcgctgaaacgtccttgcacggtaacttctctgctttcaaaggtttcgttgcctgtttgaacaacgacaaagtgacgattgctgtcgaaaatcaaagcatccgatggaattgtaacggcaagttgtcctgtttcgtttgttaactgtacatcgacaaacattccgggaatgagcatcaaatcagggttttgcataacaactcgtgctctcaaaacgtggtattccggatcaaacatatgggtcatcgcatcaattgtgccgtgaaaaacttcgccgggatgagataccgtagttacagcggtattcataccaactctaacgaatcgaagaatgctcgggttcacatttacagttacccacaccgaactcaaatccgaaattatgaacaacggctcgtcagcctcgtcagagatattgctacctgttgccaagggttctgcggtcaacacgtgccccgatataggggctcttataaagaacaaacctgtttggctgtccacaccgtagatagaaagtgtgttggtcaagtgattaatttcggcttgggcttgtatcatttcggcttccacctccaatagttctctttcggaaagcatattgtcttcaaacaatgctcttgccgtttgatattcacgctgtgcaaccctcaactcggcttgggcagaaattttttcggcataaagttcgctcaaatccgcactgcgaaaacttatcaggttttgcccttgtcgaactctatcaccaagtgaaaagaacacacgatctactgtacccggtacgagcggaataaaattgacggtttgtctgggattggtctcaacctgtcctgtgagcatcaacacttctgttcgataactcaacgtagcgagttcggtttttactgaactaaaaaaacttgcagttctgtatgcttcctgctcttgggaacttcgattacatcctacgctgaccgttagtagcaaggttgagagtattaaaattagagttgtttgctttttcatcgttttgtatgtatgtgttatcattagttagtgattaatggtggtcgtcattgcgggcttgacccgcaatccccttgctattttgtcccgctgtggttaggggattcccgcctacgcgggaatgacggactagcgggaatgacggtattatcgtcattctcaattttaaaattccgttgttcccacagcgtactgtaaggtttgaaacgccgtaatcaaattttttcgtgccgtcaaaacggtttccctattgcttttgtatgtttcgataaaatctaaaaattctaaaatcccgatgtttcgaagcatcaaatttctgagcgaaacatctaacattgcatccaattccgatgccaaattttctctactgcttattctttcgtaaagtctgtgagccattaaaaagttctgataggcttctgctacttcgtgacgaacagtgttttcctgttgttgacttaaaaaatttgcttgatctatgctgagccttgcaactctgatgttgccttgattgcgatcccaaatggggatatccatactcacgccaaaaccgaaaaaattctccaaaggaccatcgtgacgatcaaaaaaagcactcaacgtcaaatccggaattcgatgtgatctttcgtaatccaattccctttcgtgaaatacggtttgcaggttgtatgctctaagatcaggtctgttttcgatggcaagttccataaggttcaagagcgaaatatcaagcggatttctaaccgtttcgttttcgggaactacggtcagatgaacagttggcgggatatttagcagtattttcaatgtagtttgcagggcattcatctccataaaatgttcaaaaatctcgctttccacttcttgcaactctgattcgaaacgcaacaattccattcgtgagatattgccgagttctgcttgtcttctgtgagattcgacaacttgtgtcaacaaatccaattcacgattaagtacattcataaaagcctgcatgaatatcaactcgttcacagattcttgcaaatccaatctaaggcttctcaacaggtcttcaaattctgcgacagcgatatctcttgacgtttcttccatgcggattgctctacgtcgtgtgccacccatgtggatcatttggctcaattctacactaaactgcgggtctcttcgaaagttgtcgccgtcatcgcttgttgaccagaaattaatgtcgccgatgctcagttccggattttcccagc

SEQ ID NO: 1314 - DNA, 17326 bp, synthetic construct
  variation 16719..16720: note = n is a, c, g, or t
  variation 16342..16343: note = n is a, c, g, or t
  source 1..17326: mol_type = other DNA
  misc_feature 1..17326: note = Synthetic
aaacaaagattaattttaataatggaaatacccaacatacccaatttaatacattatgctattcctttttttgccattaccttattgatagaaattattgttgatgcacgcgaaaaagccaatagttatgaaactaaagatgccataacgtcaataactatgggtttaggcaatgtatttatcggtttgttaagtaaagtattggtatttgctgcttttatttttatatataatactattaggatattcaccttaccatttgcttggtgggtttgggtcttgatattatttgctgaagatttttcttattattggtctcatagaattagtcataccactcgttttttttgggcatcgcacatagtacatcattcctctcaacgctataatttaagtacagctttacgtcaaacatggacaggcagttttatgacctttattttctggttatggttgccattactgggatttcatccaattatgattctcgctcaaatgtcaattagcttgatctatcaatattggatacatactgagctgatcaaaaaaatgccaaattggtttgaagctatttttaataccccgtcccatcatagagtacaccatgctacgaatccgcaatacttagatagaaatcatgccggaatttttattttttgggataaatggtttggctcttttgaacccgaaatagaaaaacctgtgtatggacttactaaaaatattcattcttttaacccgttatatgtagcttttcatgagtggattgcattgtttaaagatgtgtttacctcaaaaacatctgtggggaaccgattaaaatatttggttaaaccaccaggatggaggcatgatcataaaggtgttgtttcgagtgatttgagaagagaatgggaagagtctaattctaaaacctaagatataaaataatagttaatgcacaaaaaactaattctcgttcttattatactttcttttaattgccacgtatctgttggacaaagcaacgaaaaacaacaaacgctcattattaaaatcaatgatattctacaaggtgaaattactcaatctaacattccaggtgccgtaattttaataaaacaaggtaataaagagctttataaaaatacctttggttatgcctcgttaaacaatttcaacaatcaaaggttgaaaaacccagaaaaaacatctgttaatcatctgtacgatattgcttcactaaccaaagtaattggtacaacaaccgctatcatgttattggtagataaaggacttttaaaagtggatgatccggtatccaattatattaaagcatttgatacccctgctaaaaacaacattaccatcaaacatttgctaacccatactgcgggacttcataagtggtatccgctctattattatgctgaaaaccagcatgagacttacaaaattattggtgggcttcctttaaagtatcctgttggaagtggcagacattatagtgatttaggatttatgctcttaggtgagattattgaaaaggtgtcaaaacttccgctagatgaatttatggagcaatctatttttaagccactcaacatgaaacacaccctatacaatccgcttaacgatacatcaattgataagattactactacatcacatggtaatccttttgaaaaaagaatggtaaccgatgccacgcttgggtttaaaatagatagcattaacccgaaccaatggaatggctggcgacaatacacgctaaaaggtgaagtgaatgacggaaacgcatggtatgccaataaaggtatttctggccatgcaggattattttctaccgttgaagatttacaaaaagtaattgatgttttaaaaaataaaggaaaaactgagcaaggacaatttatatctaaaaacactataaaactatttttaactcaagataaatttaaaaatggattaggctgggtgatgaacaataatagtgcctatataaaagatgcccctaaaggcagttttggccataccggatttacaggaaccagtattgcagtaatcccagaatatgatatctctattatcttattgattaatcgccaaaatatggggctgttaaaaacgcgaaaatattataatttaaaccctattagagagaaagtgtttacggcggtgatggagtattgcagtaatgtgaaagactaatgctgaaaattaggttaaaacttggggttttttttgaaatttattatctcttttaggaaattagtgttgattctgcctctatttaaaagattattcttgattcctaagatgttatttaataactatccataaccccatttaactaaatcgatctaaaatcagcaatggactgaaagctttttttaattttttgtatacagataatttttggagagactatgacaaaatgttagcaagaggcgtcaacttcaggaaacctccaaaaatagaagcctatggaattgtcgccgtttttgaagatttgtatggtaatttatgggagccaacatttgaaccatgagaattccaataaaaatacctaaattatattaacctacagaattaccgctaatattttttaacactgatggtatggttgtgctactggcataacccagtttaggatatgctattattctatctagttcgccaattaaatgtgtattaaaatctatcccttttttttcatttataagtagatcaatatcataggaagacacaggtggcagattaattagatgcatatcaggaaagtgtttttttgccgttagaaacactcttaattgacgtgtaggtgttgccactaaaatgatgttattgataacttctaataaaccggcttctttaagcaattttatactgaatgccaagttttcgcctgtattggttgattctttttctattaaaatatgagcattcgaaaattttggatattcacgtttaatataattataaaactcaaccgcatctggatttttaaaatctgcactacccgctcccacaccacctgtaaatagtattctaggagccaatcctttattcaaaagagagaggcattgctctggtattctcaggtcaaaatgcccaaaaccaatgattaaatctgccttatcctgtttgtctgaagggcttaaaaagttatagagtatcttagaaatttctttattcatatcaatttttaatagcgatttttatagcttcaaaagtaaaataaaacaacctcttatgaacctactattttgtcataaatgctattatttttatacaatatattaatttcttttttattattaatgatagtcgtattattgttgtagatattaaatttaattattggaatacaacactatgaaaagagtagtcacttttggagaaatcatgttacgtttatctccgcctggttttttaagattttcacaatcaaattcctttgatgtggtgtacggtggtggagaaagcaacgttgccgtttcattggcaaattataaaattccggtagattttgttacccgtttaccaaataatgatattggccaatgtgctatgatggaaatgcgtaaaagaggtgttggtgttgataaaattgtttatggtggcgaccgattagggatttattttttagagaccggtgccgtttccagaggaagtaaagtagtatatgatagggctcattctgccattgcagaaattaaaccgggaatgattgattggaaatctgtttttaaagatgccaattggtttcattggacaggcattacacctgccatatctcaaggagctgcagatacttgcttggaagccgtaaaagtagctagtgaaatgggaatcaccatttcaaccgacttaaactatagagcgaaactttggaaatacggagttgctcctgaagtcattatgacagaactgacctcttattgcgatattattttaggaaatgaggaagatgctgaaaaacattttggaataaaacctgatggtttagatatcacaacccaaggacacgatgtaaaggcagaggcatttttatctgtgtgtcagcaaatgatgaaaaaatttcctaaagcaaaaaaggtaattaccacgcttcgtgggtctatctctgcttctcataatacctgggccggagtgctatatgatggaaaaactatgtttacttctacccaatatcaaattacagatattgtggatagagttggcggtggcgatagttttatgggtggattaatttatgggttgttaacatctaaagatgatgaccaaaaagcattggattttgctgtggcagcatcttgtttaaaacataccattaaaggtgatgccaatttagtaaccgtagctgaagttgaaaaattaatgggcggagatgcttcgggaagggtagcaagatgatgatcagtttaaggcttaatcaaaatagatttgtatgaaaatgaaaaacatttttataattattatattcattgggtttatttcttgtcaaaataaagataagactgcaatagatccagtggtggctctattttcaaatacaacaatttcagcagaaagaacctatagaaatattgataatatcaacttaaaacttgatgtctattcgccctcaaagaggcttggtgaacctccttgggtaaaatatacagatgataaaaaaccggtattactctattttcatggtggcggatggagaggtggtgaaaaagaaagtagggtcttagaaattttaccctatgtagctaaaggttgggttgtagtaactgcaaattaccgcctattaaatcgagcatcacttcctgagattgtaggcgattgtaaaacggctttagattgggtttatgacaatgctgatcactttaaaatagataccactaaaattgttatttctggaaattctgcaggcggccatttggcattaatgactgctttggcaaaagaggataccatttacaaatgcaattatccgttaaagaaaaggcataaagtggcagcggtaatcaattggtatggaatatcagatgttgctatgtttgtaggagactggacagataaacatattctcattaaagatcaaaaacaattagaagaggtttacaaaaagacatcacctttacattatattgataaaaactcaatgccggtgttaactgtccatggagctattgataagatagtaccgtttatccatgcagaaaagttacataaaaaattggaagaaaatggtgttaaaaacaagcttattaaaatcaataacagaaagcatggtgattttaatgctgaagagatgactaatacctatagagaaatttggaattttttagacgaaataggaataaacaacatataaaatggcaagattttcaagaatagaagtagcaacagtaatggaaaatacaggtttagtccctttattttttcatagagatgttgcattaggtaaaaaagtattagaagcctgttataaaggaggtgcaagaattatggagttcaccagtagaggcgattttgcccatgaagtatttggtgaactcaataaattttgtgaagaaaacctgcctgaaatgattatgggtgttggttccataacagatgctgcagccgcttccttatatatgcagttaggagcaaattttatagtaactcctgtgctaagagaagatattgcattggtctgtaataggagaaaagttttgtggtctccgggttgtggttctttaacagaaattgcccgagcagaagaactaggttgcgaaatagtaaaactttttccaggagatatttatggagctaattttgttaaagccattaaaggaccatgcccttggacaaaaattatgcccaccggaggtgtttctacagataaagataatttagaaaaatggtttaaggccggagttacctgtgtgggtatgggttctaaattaatttcaaaagaaatattagcaaaaaaggactttgatctattgacaaaaaatgtaaaaaatacactggatttaattcaaatattaaaacagaaataagcattgtaaacaaggttaattacaatactaacctcaattaattatcaacgccattaaaaatatagtgcgattgtctattggtgctcctttatttgtaatgtacgtcattctgaacttgtttcagaatttcataacgctgtaaatcaacatgataacagaatacactaaaataaacccgcctgccacttgtccgtctttggtggtgcgaagcaggttcagcgtgacgtgattaaaatatgaccacaaacggatatacttaaaatatacacatatttaaaaaagaactacctttatatgtaattaacatataaataacacgtcaacatatttatatatattataattgtgcaacatttgctcataaatattaaaacatgaaaaaaataattctaattggtttattcttaagtaccattatgtcattacaggctcaagaatggcttacagattttgaagaggccaaaaatatagcatcccaaaacaatcgtaatattgtgttggtctttcaaggatcagattggtgtgctccatgcataaagttagagaaagagattttaaattctgacgaatttgtcagctattctaaagcacattttgtaatgttaaaggctgatttccctagaaagaaaaaaaataaattagacaaagaacaacaggaaaaaaatagcaagttggctgaaatatataataccaaaggcttctttcctcttgttgtagttttaaataatgaaggtaaagttttaggaaagtcaggttataaaaatatcaaacccactgcatacatcaatttattagcttctttttaaagtttattaaatgaaaaaattgatcttactagcttttttcatgctattcagttcagccatctcttcacaacagatgtataggcgaacgctaaaattaatggggacgcgttttgatatttctgtagtcgaaaaagattcagttaacggaaatttttatattgatctagccataaatgaaatatcaagaatagaaaaattaatatcatcttgggataaagattctcaaacctcagcaataaacagcaatgcaggaattgctcctgtaaaagttgatgaagaactgtttggtttaataaaacgttccttggctatttctaaattaactgatggagcttttgatataagctatgcatcaatggataaaatatggaaatttgatggtagcatgaaagcaatgcctagcgataaagaaataaaagcgtccgttgaaaaagtcggttatcaaaacatcatccttaatgaagaaaataaaacggtatttttaaaattaaaaggaatgaaaataggttttggtgctattggtaaaggttatgcggcggataaggccaaacaattattaatttcaaaaggggtaactgcaggcataatgaatgcttccggtgacatgaatacctggggaaaacaaccaaatggtgatttttggaaagtagcgattaccaatccgttaaacaaaaagaattcttttgggcttttaccaattaaaagtggtgcggttgtcacctccggcaattatgaaaagtatcaggtatttaatggcaaacgatattcacatattattgaccctagaaccggatatccggcaagtggaattattagtgttactgttttcgctccaaaggcagaattggcagacgcattagctacttctatttttgtaatgggcattgaagtaggtctcaatagaatcaatcaattaccaaaaatagattgtattgttattgatgaaaatgggaatatccataaatctgagcatattaaaattgaaaaaatataaaatagatgaaaaaagtattgtatttattttttgtagtaagtttcttaacgtcttgcgttgcagttaaagaatatgaaaaggtcaatattaatgaccctgatatggtattagcggcaaaaaaatcgaataagtttgaaaccagctttcaagtatatagagagtctgcttcaggagcaaatggcggaaaatcaggtggaggatgtggttgtaattgataattaatcctttgacagtcatataattaaaaatttagcataaaaagaaccattagatgaatttatcaaacaaaaattactacctgtccacgctttttactataagattcgggaatcacattgcaaagaaaaaatcaaatttgagtaaaatagtcccattaatcgcatcgctattttttttcactatcactttttctcaggaacaagataacgatgataccaaagattataaaaaacgtgtattagaaaatatagagatagattttctaacgagctattatactcaggatggagataatgctgcggtaacgggtggcattggaacagaagaattaacagatctggcttcagaaattgtaatctctatacccatgaatgacgacgacgtgcttagtataagtgcagaaatttccacctatacctctgcatcttccagtaatttagatccttttgacagctctggagcatcaggaggtgacgatgatgacgatgatgatgatgatgacgacggtaattcttcaggtgttacgggtagtccatggattgagtcgtcaggagattcaagaaaagacacttggataaatgctaatgttggttatagtcactcttcagatgataggaataaaatttggagtgcaaatttgaattttgcgaatgaatacgactatacatctataggttttggcggtagtcattcctggctttttaatgaaaaaaattctgaatttggtatcagtggtaatgcttattttgacacttggaatcctaaatatcctacagagttagattcttatcttgaagcaaatcagaatttatttaatggtttttttaatgctattgaaattttagatcaaaacggaaatattattgacaaaagtggagcaaatgtatggcgtccgttaaacactacattggtagatgatacatcaagaaatacatattcagtatctcttagtttttcgcaaatattaaataaaaatgcacaaatttctttctttatagatttggtacaacaagaaggctggttatctagtcctttacaacgtgtctattttaaagatagagataatttttatgtgggcaatgcttcaagtatatccaattacacatcacctaataatagagatgtttttcaattggcagatgatattgaacgattgcctagcagtagatttaaaattcctattggtacacgtcttagttattacatcaatgagatctttgtactaagaacctattatcgttattatactgatgattggggtattagtgcccatacggcagagttcgaaattcctataaaaattacggataagtttactttatatccttcctatagatattatacgcaaaccgctgccgattattttgcaccttatgaagagaatttatcgactcaagaattttatacttcagattatgatctatcagattttaatgcaaatcaatatggttttggtataaagtatactgatatttttaccaagatccaattctggaaattcaaactaaaaagtgccgaattaaagtatagccattatgatagaagcacgggtcttactgcagatattatttctttaggttttaattatatttttgaataaaactgtctgtttacatttttgaattcaattatccccttgtgggtaatgaaagagatgtgtactgctaaatataaaaaagtaaaaattgaattaacaaatgatgctttaaattggttttaactaatatcttgagtgtctattattggaacttatgaaacatttaaattaaaaaaagcgacacttgaattatcaagtgccactttaaatgttttcacaacggaataatccttattgtgaattgatttcaaattgtaagtcaaagttaggtattttcttattttaattaatgacttttatcagtttttataaaataatttatgtgtaattttaagggttaaacatttacaacccaaattacatgaaacgaattcttggactagacctaggcaccaactccattggttgggcattaacacaacaaaattttggcaaaaaaaaaggggaaatcaatggattaggaagtagaattataccaatgtctcaagacatacttggtaaatttgatgccggacaatcgcattctcaaacttcagaacgaactggatatagaggtgtccggagattaattcaaagaaatttattgagacgagaaagacttcatagagtattaaacattcttgattttttacctcaacactataaaaattccattgattttgaaaaacactttgggcaatttaaagaaaatactgaggaaaaattaaattattgtaaaaatgagtatggtaaatacgattttatttttatggatagttttaatgaaatggttgaagaatttgaaataaacaaccaaagtacaaaaatcccactagattggacaatttattatctacgaaaaaaagcattgtccaaaaaaatcactaaggaagaactagcttggataatcctcaattttaaccaaaaaagaggatactatcaattaagaggtgaagatgaagaaaccgataataacaaattagaagaattttataatttaaaaattaaggacgttcaagccactgaagataagaataataaagacgtttggtataatgtggttttagaaaatgattggatatataaaagacaaagtaaagaaccattagataattggattggtaaaaacaaagagtttatcataacaacaactataaacaaagatgggatcaaaaaaagaagttttagggcaccaaaagaagatgactggaatttattaaaaaagaaaaccgaacaaagtattgaaaattctaaaaaaactgttgggcaatatatttatgaaactttactagaaaatccaatacaaaaaataagaggaaaactggttaaaaccattgagcgtaagttttaccaggaagaacttactgctattttaaaagaacaaaaaaagcaccatttagaattacaaaacaaggatttattcaaaaaatgtattgaagaattatatcctagaaacgaagcacatcaaaataatattaaagacaagggtttttcacatttatttattactgacattattttttaccaacgacctctaaaaagtaaaaagtcaactatttctaattgtagttatgaaactagaacttataaaaagaaatctgaggttattgagaatggaaatgaaataacgaaagaaattttggtaagtgaaccattaaaaagtatttctaaatcaaatccgatatatcaggaatttagattatggcaatttttaaaaaacgttaaaatataccagaaagaaaatatacaaaatgacaaaaccgaattagatgttgatgttacaaaagaatttttaaaaacagaagaagattatgtaaatctgtttgagtttttaaattccagaaaagaagtagaacaaaaaaatataatacagtatttcatatccaataaacttatagcaaaagtagacaaagataattataggtggaattatgttgaagataaaaaatacccttgcaatgagacaaaagcacaatttttatcaagattaagtatggtagaagatataaacccaacttctttcttaacagctgaaattgagcaaaaactttggcatatcatttattcggtaaaagataaaaaagagtttgaacaagctctaagaacttttgcaaaaaaacataatttaaacatcaattctttttctgatagctttaaaaaatttcctccgtttaaaaatgaatatggagcgtattcagaaaaagctattaaaaaattattacctgttatgcgaagaggtaagtactgggaagaaaatgcaataccaattgaggtaaaagagagagttgctcaaattattgaaagattagaatttatagatttcgacaaagtcaaaatagatgaaaatgttacggatgatgacattccaaaacaattactaaaaagttttattgaattcaaagataaaaatccattgcaaggtttaaacacctatcaggcatgttatgcagtttacaatagacattcagaaacaagcaatattacctattggaaaacacctaaagatattactgaatttttagaagattttaagcaacatagcttgagaaaccctattgttgaacaagtagtgacagaaaccttaagggttgttaaagatatttgggaatattatggtcaaggtgctcagaatttctttgatgaaatacatgttgaactaggtagagaaatgaaaaatccggcagacaggagaaaagccatgtctgatagaataagagttaatcaaaacacaaatgaaaggataaaatttcttttacaagaactaaaagatgaaggtataaaagatataaaacctttttcgcccagccatcaagaaatattaaaactttatgaggaaggtgtttatcaaaattcaattgaaattgtagaagaaattgaaaaaataagaaaaaacacctctccaactaaagctgaaatgacaaaatacagactttggttaggtcaaggatatatatctccttatactggacagccaattccattaagtaaactatttacaaccgattatcaaattgaacatattattccccaatctcgatactttgacgactctttgagtaacaaaataatttgcgaaagtgaagttaatcaattaaaagacaatcaaacagcctatgaatttataaaaaacaattcggaaacaattgtcgatttagggcatggtaaaaaagttaagctgtttaaactagaagattatgaaaatcattgcaacggctattttaaaaataatagaggtaaattaaaaaaattgttaagtgaagaaattcctgatggttttataaatagacaactcaatgacagtcgatttattagtaaattaataaaaggcttattaagtaatattgttagagaagaaaatgaacaagaagcaacttcaaagaatcttattcctgttacgggatcaatcacctcaaaattaaaaaatgactggggattaaatgataaatggaatgagctcattgctcctcgttttgaaaggttaaatgaaatgaccaattcaaataattttggtttttgggataacaaaattgatgcttttagaactcaggttcctgatgaaatatcaaaaggatttagtaaaaagcgtatagatcacagacatcatgccttagatgctttggttgttgcttgtacacaaagaaaacatacccaatatctgaattctttaaatagtgaaaagaaaaattttggcttgcgtgatgctctactaattaaaaattaagaaggtcactataccaaaaacttcttaaaaccttggcaaaattttcaaaatgattccaaaattaatttagaaaaaacagtagttagttttaaacagaatttgcgcgtaattaacaaaacaaataacaaaacttggcaatggattaataaagatggtcatcttaaaaaacaattgataaaacaaactcaaggtaataattgggcaataagaaaacctatgcacaaggaaaccgtttatggtaaagtgctggtaaaacaaaaacgtaaaaatttggtttctttaaataatgttttagaaaagtgggaattaattatagataaaaaaattaaatctattattaaagaaaaatcaaaattttacaaatccgacttaaagcttttaaaaaagtattttaaagagaaccccattgaattagacaataataaaattgacaaaatagaaatatatgaaactgtagaggcaacagcaagcagaatagccttatctgaaaaatttacacgtaaacatttagagagtataacagattcaggtattcaatcaattttagaaaatcatattgaaaattacctcgatgataaagggaaagaaagatttgacttagcttttaattcggatggcatagatgaactcaacaaaaatattgtaagcttaaatgacggaaaacaacatcagccaatttacaaagtaagaatttatgaagtaggcaaccgatttaatgttggtgaaacaggaaataaaaaatacaaatttgttgaagcggccaaaggcactaatttattttttgctatttattggaactctgaaaaacaaaaaagagtctatgaaactgtgccattaaatgaagtaatagaacatcaaaagtggagagcatctttacctaaagaagaaatgaaaaatactccattaatccccgtaaaagaagaaaatgggcaatttttattttcactttctcctaacgatttagtttatattccaaatgatgaagaaattgaaaaccctagtttggtaaattttgaaaatttgactaacaaacaagtaagtaatatctataaaatggaaaaagcatctggtgttgaatgctattttattagaaatgacatttcagtattaataaaacaatatgatgctaaaacaaaatttggagaattaggaagtcaaaataaatatcaaactacgatgtgtatagataattttaaaattattgaaagatgttggaaattaaaaacaaatcgtttgggtaaaataaccaatgttataaactaattataatgattaaaagaaccatttatatcggcaatcctacttatctaaaaatcaagcaaaaccaaatggttattcaagagccacaaggagatataaaaggaactatacctatagaagatatggcaatattaatgcttgaccattatcagataactatcagcaatcaactcattacccgtttacaaggtaataatgtagtcatcataaattgtgacgcacaacatttaccctttgggatgatgttaccgctttatggccatacagaacattctgaaagaattaaatatcaattggaagctactgaaccgctaaaaaaacaattgtggagacaaactgttgaacataaaataaaaaatcaacagaccttattagaaataaataagaaaccatatgaacacatggacacttattggcagactattaaaagtggggacactacaaattgcgaaggcaaagctgctcaatattattggaaacatttatttgaagattttacccgagaaagatttggaactgaacctaataatttattaaattttggctatgccgtgttacgcagtatagtggcaagagcattagtaagtagtggcttattacctgttttgggtatttttcaccgcaataaatacaatccttattgtttggcagatgatattatggaaccgtatagaccttttgttgacaaaatggtctataattatgtttgcaccaatagccatacagaagaattaacaaaagaaataaaggcctatttattaaacatagccacgcttgatgtatctattgacggtatagtaagaccattaatggtagccgtaactactacctcagcgagtttgtataaatgctattatggcgagttacgccaaataaaataccctgtattagattgatataattttaaaaaaatgaatttaatatgttacaagaatcgaatcgctttaatgcctataagattatgtgggtattagttttttttgatttaccgaccgaaaccaaaagagatagaaaagctgctaatttgtttcggaagaaactcattgatgatgggttttccatgtttcaattttccatttatttacgtcactgtccgagtagagaaaattctaaagtacataccaaacgtgtaaaattgagtttacctaaacatggcaaaatttgtatccttgaaataaccgataaacaatttggtgatatggaattatttaatggcgttaaagaagtagacatgcctcaacctgtacagcaactacaattattttaaaataggtatctctttttaattcaatttttttctctttagaatcaaataaacaactagttctaccaatataatattaaatatcaattcatttttttaatgctaaaaaaaatcccaaactattgatattactcaatttttcgggattgaccttgtgattgctcacacaaaaatacaatttgaaatcaattcacaactacttccttctgttggtaaatctgctaatgcttgtgattgctcacacaaaaatacaatttgaaatcaattcacaacagctaattgcttcttttcattcagccttttcttgtgattgctcacacaaaaatacaatttgaaatcaattcacaacaatagtttagtgatatcatttgctcccaaacttgtgattgctcacacaaaaatacaatttgaaatcaattcacaaccaatgtatgttgaaggtaaattaccgatagcttgtgattgctcacacaaaaatnnaatttgaaatcaattcacaaccaaaactctctatttcaataaaagaagtaacttgtgattgctcacacaaaaatacaatttgaaatcaattcacaactaattactggtagtatcatgtttgtgttttcttgtgattgctcacacaaaaatacaatttgaaatcaattcacaacataattgaccagcgatttcatctgttaaatcttgtgattgctcacacaaaaatacaatttgaaatcaattcacaaccaatctacagtattcggatttgaccattttcttgtgattgctcacacaaaaatacaatttgaaatcaattcacaactaattactggtagtatcatgtttgtgttttcttgtgattgctcacacaaanncaatttgaaatcaattcacaacaaatacagttcttaaagttagtgaaagtagcttgtgattgctcacacaaaaatacaatttgaaatcaattcacaacacaatacatttttctaaaataacatttatacttgtgattgctcacacaaaaatacaatttgaaatcaattcacaacataaatggaagtatcagtctataaaaaaaacttgtgattgctcacacaaaaatacaatttgaaatcaattcacaaccgataactagttggtaagttttgtacgattcttgtgattgctcacacaaaaatacaatttgaaatcaattcacaactcagtgcttctttgagtttatctttcatatcttgtgattgctcacacaaaaatacaatttgaaatcaattcacaacatgtttggttagaagatacaaataaggaatcttgtgattgctcacacaaaaatacaatttgaaatcaattcacaacactctttttgttgattattaaaaatatcttcttgtgattgctcacacaaaaatacaatttgaaatcaattcacaacaatatcactacctttaatattatctttccacttgtgattgctcacacaaaaa

SEQ ID NO: 1315 - DNA, 17275 bp, synthetic construct
  source 1..17275: mol_type = other DNA
  misc_feature 1..17275: note = Synthetic
ctccagcggaaattccggattgatgatctccttattcttccttgccattatggctccgggtttcttcctggggcatatcgtgaagtggatggggaaacacacaaagttttacagccttttgtccattgcagcgggtttgcttttgatatggatttcgcctaaagaatggctgataataccgggatgtatgttggttggtttgggatatggtgtcattcaaccgctgatttatgacgagacagtagatacggctataccggaaaaaacaactttggcactggcctttgtaatggtaatgaattatctggcgattctattgtccccgttcattacagacttctttcagaccttgttccacactaattccaaggaatttccgtttattttcaacctctgcatcacactgctcgctatgtggtgggagtatgcgaggaagaaggattctttgttgggggggagttatgagtgatgagtgatttgttggtaattgtgctgcgctaccatgctgaaaggaaaataccaacaaatcactcatcacttataacttataactcaatcgcctcatatttcagcccgaagacgtcggctacagctttgtatgttactttgccttccactacgttcaatccttgcgccagagccgggtcgtccttgcaggcttgtctccagcctttgcatgccagggcaacggtgtagggcagggtggcatttgtcagtgccatggtggaggtgaagggtacggcgccggggatattggcaacggcgtagtgcacaattccatccacaatgtaggtaggatcgctgtgcgtagtgggatgggaggtctcgaaacaaccgccctggtcgatggctacgtccacgagtacggtgccgggtttcatcatcttcagcatttcgcgggtgatgagatgcggggccttgtcaccggggatgaggacggaacctactaccatgtcgatgttcggcaattccatcttgatgttatgggtggaagaatagagtgtctttacgtttttcggcatcacttcgctcaggtaacgcaggcgagggaggttgatgtctgcaatcagcacctcggcacccattccggcagctatctgtgcggcattggtgcccacgataccgcctccgaggacaagtacgcgtgcgggacgtacgcctgtcacgccacccatcagttttcccttgccgccttgtggcttttcaaggaagcgggctcctacttgggtagccatacgtcctgccacctcgctcatgggggtaagcagcggaagtgaacggtcttctttttccacggtttcgtaggcgatgcagacggcaccgctttcaatcatggcttcggtcagtaatttatcggctgcaaagtggaaataggtgaataccacttgtccctttttaatcagtttgtactccggtgtaataggttcctttaccttgacaatcatgtcggctgcggcatacgtgtcttcaatggtcggtaaagtctttgcacctacggcgatgtagtcatcgtcggagaaaccgctgtttgcgcctgccgtggcctgcacatacaccgtatgacctttttttaccaactcggctactccggcaggggtcatgcccacgcggttctcgttgttcttgatttctttaggtactccgataatcataaccttaaagttttaattggggggttaaacatggcgcaatatagcgatttcccggcttgggtgttatcggtgtatctatgttcttcaacagaatttttatgcatgttttaatcaatgataattgcacctttctgtaggtagagagaactattctttttatatttgcatgcatttaaaataatattgactgtacaaaatatgaaatatcctatatttttctctcttttgttctttattggtagtgtgcaaagcggctatgcccaagaaaccgatacagacaagacctccttcaccccgccttttgatttccccatcaccttctccggtaacttcggcgagatacgtgccaaccattttcatggcggactggatttcaagaccggtggaaccataggcaagccggtacgcgctctggccgacggatatatttcgcgtatccgcgttacccacggttcgggctatgtgctcgatgtggcttatgacaatggttattcgacgataaaccgccatttgagtgcctttgtgggcgatgtggcccgccgggttgaagacttgcagtacgagaaagaaagttgggaggtggaaattactcccgaacccgacgaatatcccgtgaaggccggtcagataatagctttgagcggaaacaccggatactctttcggtccgcacctgcatctggatatgatagagacggctacggacgaatatatagacccgctgcctttcttcatggacaaggtgaaggacaagactgccccgcgtgccgaaggtatcatgctgtttcctcagccgggaaaaggagtggtggaaggcaagcagacgcgacgggcttttccggcacatcctacgaaacccattatcgcctggggactgattggtgctggcatccgtgcctacgattatatggacggagtgcagaataaatatggcgtgaaggcggtgattctcgaagtggacggcgaggaagtcttccgcagtacggtagaccgctttgcctatgaggagaaccgctatatcaattcgtggacacacggtcagtacatgaagtctttcatagagccgggcaaccgccttcgcatgctgcaggcatccaacggcaatcgcggactggtggacatcaacgaagaacgcccttaccggtttgtctatacgctgagagatgcgctgggaaatatctccaaggtccgcttcacagtgcagggacagaagacgataattgctccggtggaacatcgtgagaaatacgccctcaaatgggacaaggtgaactatctgcaggagccggggctggagttggttatcccgaaaggaatgctctacgatgacgtcttgctgaactactccgtgcgggctgatagtggcgacatcgctttcacctatcaattgaacgatacccgtattcctatgcacggtacctgcgatttgcgtatcggcttgcgccggcgtccggtggaggatatggccaaatattatgtggcgggcgtaacggcacgcggtggaaaatatcgtattggcggtaagtatgaggatggtgtcatgaaagtgcgtatacgggatttggggacttataccgtggcggtggatacggttccgccggtgataactcccctaaaccaagcccaatggggacgtacgggaaaaatcatcttcaaggccaaggacaaggaaaccggcatcaatacctatcggggtacgattgacgggaagtatgccttgtttggaaagcccaattccatcagtggtaacctggtgtgcgagctcgacccgaaacatgtggagaaaggcggcaagcatgtggtggagatgacggtgacggatggctgtggcaaccgtaccaccggacagtttgaatttgtatggtaaagactgaaatatttagtaacattataatttagaagtatgaaaagtaaaagactgactcttttcgtcttgtttgttgtggcagccgtggcgaatgcgctggcctgcaccaatcttatcgtgggcaagaacgcttctgcggacggttctaccattgtttcctattctgccgattcttatggtttgttcggcgagttatatcattatcctgccggtatgcacaagaaaggtacgctgattgacatacacgagtgggacaccggcaaatacctcgggcagatagagcaggcccgccagacgtacaatgtcatcggcaatatgaatgagttccagctcactatcggtgagacgacattcggcggacgtcccgagctggtggataccaccggcatcatcgactatggcagcctgatttacctcggtctgcaacgctcacgcaccgcccgcgaggccattaaggtgatgacggagttggtgcaggaatacggctattacagcagtggcgagtcttttaccattgccgaccccaacgaaatatggattatggagatgattggcaagggacccggtgtgcgcggtgccgtatgggtggctgtccgcgtgcccgatgattgtatctctgctcatgccaaccagagccgcattcatcagttcaacatgaacgacaaggagaactgtatgtactccgccgacgtcatctcctttgcacgcgagaagggctattttgacggtgtgaacaaggatttcagctttgccgatgcctacgctccgctcgatttcggtgcccgtcgctattgcgaggcccgtgtatggagctatttcaatatgtttaccgaccgtggcaacgagttcctgccttatatattaggtgagacgaacactccgatgcctctgtttgtgaagcccaaccgcaaggtttccgtgcaggatgtgaagaacgccatgcgcgaccattatgaaggtactcctctcgacatcagcaaagatttcggcgcaggcccgtatcataccccgtaccgcctttccccgctttctttcaaggtgggtgaccaggaatacttcaatgaacgtcccatctccacccagcagagcggtttcgtattcgtggcacagatgcgctccgagttgcccgatcctatcggtggagtattgtggttcggcacagatgatgccaacatgacggtatttacgcccgtatactgctgtacggacaaggttcccgtatgctacacccgtgtggacggcgccgattacatcactttctcctggaactccgctttctggattttcaactgggtggccaatatggtttatccccgttatgacttgatgatgggcgacgtgcgtgccactcagacagagttggagacaaccttcaacgaagcgcaggaaggcgttgaggctgctgctgccaaactactggaaaaagaccctgccaaagcaaaggcattccttaccaactatacgaacatgactgcccaaagcactttcgatacttggaaacgtcttggcgagtttcttgtcgtaaagtataatgacggcgttgtcaaacgtatgaaaaacggtcaattcgaacgtaattccatcggccagccggcaggcgtaatccgcccgggatacccgaaggagttccttgaagagtatgttaagcagacgggagacagatataaaatgcctgaataaaattaggatatttgaacttattcttctacatttgtgtcttacaaaaaagtttatattaacccttaaaacaataacagtcttatggaaaatcaggaactgattaagcaggtgactgagaaagccgaaaaatggcttaccccggcatatgatgccgaaactcaggcagaagtgaaacgcatgttggaaaatccagataaaaccgaattgatagacagtttttacaaagacctggagtttggaacgggtggtctgcgtggcatcatgggtgccggtacaaaccgcatgaacatctacaccgtaggtgccgcaacacagggcttgtccaactatctgaacaaatgttttgccggaaagaaggatatttccgttgttgtggggcacgactgccgcaacaatagcgacaagttcgcaaagatttctgccgacatcttctctgcaaacggcatcaaggtatatctttttgatgaccttcgtcctacgcccgaagtttcatttgccattcgccacttcggctgccagagcggtatcaacattacagccagccacaaccccagagaatacaacggctacaaggcttattgggatgacggtgcgcaggtgctcgctccgcacgatacagccatcatagacgaggtaaataaggtgacggtggccgacatcaagttcaacggcaacaaggacttgattcagattatcggcaaggaagtggataaggtttatctggacatggttcactccatctccatcgaccccgaagtcatccgtcgccagaaagacctcagcattgtgtatactccgcttcatggcgcaggccgcgtgctcattccggactcattgaaggagtggggatttgagaatatcaactgcgtgcccgaacagatggtgaaggacggcaatttcccgacggtggtttctccgaatcccgaaaatgccgaagccctttccatggccattgcgctggccaagaagattgacgctgacatcgtgatggcaagtgacccggatgccgaccgtgtcggtatggcctgcaaggacgataagggcgagtgggtgcttattaatggtaaccagacttgtctcattttcttgtactacatcatcaagaaccgtattgcaatgggcaagatgcagccaaacgacttcatcgtgaagaccatcgtgaccactgaactcatcaaggctgtggcagacaagaacaagattgaaatgcgcgactgctacaccggcttcaagtggattgctcgcgaaatccgtctgagcgaaggcaagcagcagtatatcggtggtggtgaagaaagctatggcttcctggccgaagactttgtccgtgataaagatgcggtttctgcctgctccttgctggccgaaatctgtgcttgggccaaagaccagggtaagacgctctatgacgtattgatggaaatctatgtagaatatggattctcaaaggaaaccaccgtgaatgtggtgaaaccgggtaagagcggtgccgaggaaatcaaggcgatgatggataacttccgtgccaatcctccgaaggaaatcggcggttcggctgtcagtctgattaaggattacaagacgctggaacttactgatgcccagggcaacgtaagcaagctggatatgcccgagacttccaatgtacttcaatatttcactgtagacggcacgaagatttctgtccgtccttccggtacggaaccgaagattaagttctatatcgaggtgaagggcgagatgggttgtccgaaatgctataccagcgccgatgccgaagctgagaagaaagtggaggcagtgcgcaagtcactcggcatttgataggaaagaggaaaaaatgtgtatatagtgttcggagaggcgtaacccgtgagggctgcgcctcttccttttgcttctgtgttgaaagaaaacttaaataaagacttaaacccgatggttgatgaacaaaacgtttgcagggaagttaagtataggcagattgcggttacacaccgattggttgatgtgaatgagagtcgtttcattcgtagttgttcgtttgtgagtgtgtgttttccgcaatctgctttttaaaatttcttccccccctctttttaattctttaatttttaattgttctccatccaccagtctatcagccttcttgcgatactcagttttcgtggaatttcgggcaggttgtctttggaatagaaggcggcagcggtcagctcatcttcctgcagttttatctccccgctttcgtagtcggcaatgaaacccaccatcaatccgctggggtagggccagggctggttgctgaagtaggtgatgttctttaccttcagccccgtttcctcaaaaacttcccgttccacacattcttccagtgtctcgccggcttcgaggaagcctgccaccagtccgtagaaggttcctcggaagttccgggcatgcaccagcaggatttcgtctcctttgcgtatcagtacgatgatggcggtggaaacgggagggtacatctcattgccgcagttgggacacttcttcatgatgggggtctggtgctccatggcggtgccacacacggggcagaagtggctgtgctcgtcccaatagagtatctggaaggcctttcctgcagaacggtactcgtccggcgagatgtagtcgtacgatgcgcgcaggcctatcatgacccattcgtcggtttcggccacgggctgttccaaggcgaatgcacgtacttgcttgccgttgggggggaacacttcgtgtatattacttccggcttccggtgtcagaggaggctctatactgacgggtacgctgtattttatttctcctttgtctgtatatccttttttcagcagcagttggtctttgaagaagacgaaccactgcgtggagggttggggttctgttgatttttccattgtttgttgttttattatttgggggggatgaacacgaaaatacaaaggcatagagattcttttcaaagagataaagcattaatttctatgtctttgtatctctgtgttcgcctcccccctaaatttcgtttgctgtgtctttttcttgtcgtacatagaccgttgaccttcccattccgcggcggcgcaggaacccttgccggatgaagttgtttagttcgtctatggcggcatgtctggttagtccgcttagctggatgtattcgttcttgttgatacatacattctgcttgaggaacagttccagttcggtttttcttgtttcttcggtggtctctactacttttttcgatttcttggtagtggagtgtacacgttccaacgtcattttcttcttgatgttgttgcggaacgtgctgctgatgcgcaggtgtacgttttggaattggacggattcggagcggattttctttttctcgtcgtcggtctcgcgcaagcatttcagtgaagtgctgaagaatccgagttctcccagctccacgatgtttccgttggcaaggaggtcgcacaactcgtcaatgcaggcatccaatgctgcccctatcacattcttgggcagatgttggaaagttgcaatatgttccacaaactccttttgggtataagtccttttcgggcagatacgtgcatggagtgatttcttgtcttctttcccgtcgggcgaaggcgtttcgtaaaggtcgtaatacgcgctcataagatatttatttttgtttatagcgataaacagttctcgtcgcttcggggaattatttttgtcgctaagcagattaattttcttcttcctaaaaactaatcgtccgacaactgttgcattatcgtccaacagttgtttaattatcgtccgacagctgtcggacgaaacagaaatgggtatgggacgattaattcttagtgaacaaaggtataaaatatagtgatacgaagagtagtgtttggggaagaaagttttagttttcggcaaaagagggatattgggaatgataattagtttttggaaataaaaaatcccccgttaaggacgagggaacctaatgttttcacaacggaataatccttattgtgacttgcttcattttagtatgacaaatgtataaaataaatatggaaatacaatgcttatattgaaaaaaaaaatacctttgaagaaaatattcaaaatataatactatgagaacgatacttggattggatttgggaaccaatagtataggatgggctgtaataaactctgtaattaaagaacagaccgagagaatttggatagaaatggctggcagtagaataattccgatggatgctgctatcttgggagactttgacaaagggaattctatatcacagacagctgaaagaacccgttttagaggggtgcgtcgattgagagagcgacaattactacgccgtgaacggttgcataaagttttgaagattcttggcttcctgccggaacactatttaaaaggaatagattttgaaaagcatacgggtaaattcttgtcaggcagcgaaccgaaattgccatgggtaaaggatagatggggaaaatactcttttttatttcagacagcgtttaatgaaatgttggcggattttgcaaaacaccaaccttcattggtttttgatggtaaaaaaatcccttatgactggacagtttattatctccgtaagaaagctttgacagaaatgataagtaaagaagaactggcatggattcttttgaactttaatcagaaacgtggttattattagcttagaggagaagaggaggaagacaatgcaggaaaatctgttgaattttatgcattgaaagtcttgtcggtggaagcgactgatgaaaagaaaggccgggatatatggtataatgtacatctggagaatggatgggtatatcgtagaagcagtaatgtcccattggactgggaaggacgggtaaaagagtttattgtcactactgacttaaatccggacggtactccaaagcttgataagtatggtgaggtgaagcgttctttcagagcgcctaaagaggatgattggatgttaataaagaaaaggaccgaagctgacattaccggtactcataaaacgattgggagttatatatatgatgctttgttgcaggagccacaacaaaagataataggaaaattggtgaaaacagtagaacgaaagttttacaaggaggaactgaactttattttgcagaagcaatgtgcttttcatgcagaattgcaggatagagatttatacatgaggtgtattgaagcgttgtatccgggtaatgaagtgcaacggagaaatatagctaaccgggactttatctatttgttaatagatgatgtcttgttttatcaaaggccgttgaaaaccaaaaagtcattgatagctaattgcccttatgaggaaaatgaatatgtaaaccgcaaaacaggtgaaatcaaaacagctccgttaaagtgtatagccaagtcacatcctctttttcaggaattccgtttatggtatttcctttccaatattcgggtatatcaaaaggaaagggaagtaaatggaactttacatttggatgtggatgtgacaacggagtttttgaaaacagaagatgattatgtggctctatttgattggctgaactctcgaaaggaaatagatcagaaagcttttctgagatatcctgcgtttggactgaaaaaggaaataaataattatcgttggaattatgtcgaggataagttctacccatgtaatgagacgagacatgcgattctttcccgtttggaaaaggccggtattggtattgactttttatctgatgaaaaagaaacagccttgtggcatatcttatattctgtaagtgacaagcaggaaatagagaaagcattggcgacttttgcggttaagaacggattgaatgaatcctttgtggaagtgttcaagaagtttcctcctttcaagtctgaatatggcgcttattctgccaaggcgataaagaagttgttgcctttgatgaggtgcggaaagtattgggatatgtcgttgattgatggtacaaccaaggaaagaatagaaaggataatagcaggtgagtgtgatgagagtataggtgccaaggttagagaaaaggcgatgaacttgtcggatatatcttgttttaagaggcttccgttgtggttggcttgttatgtagtgtataatcgtcattccgaagataaagaaataaccaaatgggaaacccctgctgatattgatgcttatctggctgcttttaagcaacattcactacgaaatcctatcgtagaacaagtgataaccgagacattgagagttgtcagggatatttggaaacaggttgggaaaattgatgaaatccatattgagttagggcgcgagatgaaaaatcctgcggacaagcgaaaaagaatgactactcagattctggagaatgaaaatgccaatttacgtataaaggcattgcttgctgaatttgtgaatccggaatatggggtagagaatgtccgtccctattcaccaagtcaacaagaaatattgcggatttatgaggatgcagttttaaagggggaagaacagattccggaagatatagatgtgatattgaaaaaattcaataccagtaaattaccgacgaaatcagaattcttgcgttataaattatggctggaacagaaatatcgttcaccttataccggtgagctgatacctttggctaaattatttactgctgcgtatgagatagaacatgttatacctcaatcccgctattttgatgattcattctctaacaaagtgatatgtgaatctgctgtgaacaagttgaaagataatcaactgggatatgagtttatcaagaatcatcatggacagaaagtggaagtgggttttggaaagacagtagaaatcttttctgtggatagttacgaacgttttgtaaaagaacaatatgcaaaatcgggcataaaaatgaagaaattgttgatggatgatattcccgagcaatttattgaacgccaattaaacgatagtcggtatatcagtaaggttgtcaaaggacttttgtcgaatatcgttcgtgaaaagaatgatagcggtgaatatgaaccggaggctgtttcaaaaaacatattagtttgtacaggaagcgtgacggacaggctgaaaaaggattggggcatgaatgacgtctggaatagtattgtaagtcctcgttttgaacgtttaaatgctttgaccgaaacccagtgttttggacattgggagaataaagacggaaaaaaagtttttcaaacagcagtgccccttgaatatcagaaaggattcagtaagaagcgtatagaccatcggcatcatgctatggatgcaatagtaatagcttgtgctacacggaatcatgtaaactatctgaataatgagtctgcaagccggaatgcgaaaatttcccgttatgatttgcagagactgttgtgtgataagagtaggggggatggtaatggtaattatagatggattataaagaaaccatggactacttttacgcaagatgcaagggaagcgttgagtgggataatagttagcttgaaacagaatttgcgtataataaataaaacaaccaatatctatcaacattttgatgcaaatgggactcgtgtttatgagaaacagaaaatcggtgatagttgggctatccgtaaaccgatgcacaaagatacggtttttggagcggtaaatttaagaaaggtaaaggtggtacgcctatctgtcgctttggatactccttctatgattgttgacaaaagagtaaaaaataaggttcttgaattgttatcatataagtatgataagaagaaaattgaaaaatatttcaaagagaatgctttcttgtggaaagagctggatatagccaaagtcgctgtttattattttacggaaaatactactgaacctttagttgcagtacgtaaatcattggactcaactttcaatgagaagaagatagcatcggtgacggatactggcatacagaaaatactcctgaatcatctgaaatcaaaagaaggaaaggcggagttggctttttctgcagaaggtatagaagaaatgaaccgtaatcttttacaactgaatgatggtaaaggacatcagcctatatataaggtgagggtgtatgaaccgcgtggaaataaatttaaagtcggtgtacttggcaataaaggtgccaaatgggtggaagctgctaaaggtactaacttgttctttgctatttacataacagaagatggaaacagaacgtatgagactattcctttaaattgggttatagagcgtgagaaacaagggcttgttcctgtaccggacagaaatgaaaagggagataaattattgttttggctgtctcctaatgatttggtatatctgccaaccgaagaagagcgggattttggtaggataaatgaaccgatagatagggggaggatttataagatggtttcatcttctggtaatcaatgcttttttatacctcaaagtatatcaaatgctattatttccactaaagaattaggttctaataataaagcagaaaaatcatgggatggtgaaatgataaagaatatttgtattccagtaaaagttgataggttaggccgtattatagaagttaagtatagagtaaatgaataatataaagttgtttcaagagaaaaagatccgttccgtatggaacgaggaagaacagcaatggtatttctctgttgtagatgtagttggtgtattgactgatagtgtgaatcctacggattatctgaagaagatgcgaaaacgggatgaagaactggctacttacctggggacaacttgtccccaggtagaaatggtgacagatacaggaaaaaaacgaaaaacgttggcggcaaatgtgcaggctttattccgcatcattcaatctattccttctcctaaagctgaacctttcaagctttggttagcacaagtaggttatgagcgtgtacaggaaatagaaaatccggaattggctcaagagcgcatgaaagaactatatgagcaaaaaggttatccaaaagattggattgacaaacgtttgagaggaatcgccattcgtcagaatttgacggatgaatggaaagaaaggggaatcacggaaaaaagtgattatgccattcttacggcagaaatatctagagcaacgtttggattgactccttcggattataaaatatataaggggctgacgaagaaaaatcagaatcttcgtgaccacatgtctgatttggagttgatatttacaatgcttggagaacgtgtcacaacggaaatttctcagaaagaaaaaccagatacatttactaaaagtaagcaagtagcacaacgtggaggaaatgtagccggagtagcacgtgaacaagctgaaaaagagttgggtagaagtgttgtttctcctgaaaattttctgttggattctgataaacagaatgatactttagagcttccttttcttgaaaatgatgaatgaataacttgtaaagtctatatgctatgattaagaaaacactttattttgggaatccggtctatttgtctttaaaaaatgcccagttggtgattaaattgccggaggtggtgaagaacagtgctttacccgaagggttcaaacgaatgtccgaagtgactaagccaatagaagatattggagtagtggtgttggacaataagcagataaccattacttcgggagtattggaagctttgcttgagaataattgtgcagtcataacctgcgattctaaaagtatgccggttggtttaatgcttcctttgtatgggaatactacacaaaatgaaaggtttcgtcatcaacttggtgcgtctctaccattgatgaaacaactttggcagcaaacaataaaagccaaaatagagaatcagacggtagtattgcatgaatgtgctggagaagaaataaagtgtatgaaggtgtgggctgcagatgtaaagagtggagattctgataatttggaggctcgtgcagctgcttattattggaagaatttgtttaagatagagggctttacaagagatagagaaggtattcctcctaataatttgttaaattatgggtatgctattttgagggcagttgttgctcgtgctttggtgacaagtgggcttctacctactttgggaatacatcatcataatcgttataatgcttattgtctggcagatgatataatggaaccttatcgcccttatgtggataggttggtatatgatatattcaaggaagcagaaccgaattgtgttgaattgacgagagaattgaaagcgaggttactgacaattcctacattagagactgttatttcgggaaaacgtagtccgttgatggtagctgttgggcagactacggcttctctgtataaatgtttcagtggtgagttgcgtaaaatatcctatccagagatgtgatggaccggtttagtgaatatcgcattatgtgggtattagtgttgtttgatttgcctaccgaaaccaagaaggataaaaaggcgtatgcggaatttagaaaaaatctgcaaaaggatggatttacgatgttccagttctctatatatgttcgtcattgtgcgagttgtgagaatgcggaggtacatataaaaagagttaaatctttcttaccggactatggaagtgtcggaattatgtgcattacggacaagcaatttggaaatatagcacttttttatgggaaaaagactgtggatgtgaatacgcctggacaacaattagaattattctaaaaaaatcccgcgcaatggcgggatttttttagaagcagcattctttttttatattctaatactatgtgtaatcgtttgaatattagattattacttgtaatcagctgtttccaatggttcaaagatactaaaatgaaagcaaatcacaaccagcgtctaccatcgcatgtaatgttgtcgctgtttccaatggttcaaagatactaaaatgaaagcaaatcacaactaagttttcatattatattatttatttgtgctgtttccaatggttcaaagatgaaagcaaatcacaacattctgataaatgggtagattatggtactagctgtttccaatggttcaaagatactaaaatgaaagcaaatcacaacatattattgttgattcattggaagctgcaagctgtttccaatggttcaaagatactaaaatgaaagcaaatcacaacgggctgaagaaattacacctgaagaaatgggctgtttccaatggttcaaagatactaaaatgaaagcaaatcacaacagcgttgtcagcggagaagactgcacgcgggctgtttccaatggttcaaagatactaaaatgaaagcaaatcacaacgggtctcgccttgcatatctcgtcaatgaagctgtttccaatggttcaaagatactaaaatgaaagcaaatcacaacatatcaacgtgacattcaagatgcctctgagctgtttccaatggttcaaagatactaaaatgaaagcaaatcacaacggtttttgtttgatacgtcgtgctctataggctgtttccaatggttcaaagatactaaaatgaaagcaaatcacaacgtatcggggtctttctgttttgcaatcgtagctgtttccaatggttcaaagatactaaaatgaaagcaaatcacaacgtctgtatttacgtatcaagaagtccacacgctgtttccaatggttcaaagatactaaaatgaaagcaaatcacaacttaaaaatccggaaattacaggctcttgccgctgtttccaatggttcaaagatactaaaatgaaagcaaatcacaacgatacgctgctcggagatttccaaattgaagctgtttccaatggttcaaagatactaaaatgaaagcaaatcacaactactacgcgttcgcgcggtatttgcagatagctgtttccaatggttcaaagatactaaaatgaaagcaaatcacaacctcagcagctcggcttccgtctgatgattgacttccactattc

SEQ ID NO: 1316 - DNA, 17256 bp, synthetic construct
  source 1..17256: mol_type = other DNA
  misc_feature 1..17256: note = Synthetic
gcgaatacaccagcacgcccgccgtgatggcaaaaataggcaatgccacaaacagacggttctttatcggcttctgctcgtaatgcagaaaatcggccacaataaggcgggccgaccgcaacgctgtgtcgcccgacgtcactgccgccgaaatcacgcccagcacacatatcaccgatatcaccttggggaaccacgtgttggctatcacacccaccatcgcgggaccgcccttgcctgccgtgtccaccggactgtcgggaccgaagaaataactggccgccgccgcccacaccagggccacgatgccctcagtaatcatggctccgtaaaacaccggccgcgactgcttctcgttggtcatgcaacgcgccatcaaggggctctgcgtggcgtggaatccgctgatggctccgcaggctatcgatataaacatcatggggaagataggattatgcgccgcgtcgggatgacggttctccagcccgtcccacacctcgggaataggcggctgatacaccacaaacgccaccacaatggccaccgccatcgccagcagcaggaacccgaacaccgggtatatcttaccaatcagcttgtcgataggcagcagtgtggcaacaagatagtatgcaaaaataatacccacccagatgaaaatattccagtcgggagtgaagttattgttcagcagcaccgcgggcgtattcacaaacaccgcacccaccaatatcatcaacagcaccgtgaaatagcgcatcacctgcttcgccccgttgcccagataggcaccgtgtatctcaggcagcgacgccccgtcgcgcctcaaagagataaaacccgctataaagtcgtgcactgcgccggcaaaaatactgccgaacacaatccacaaaaacgacgccgtgccgaactgcgcccccataatggcgccgcatataggccccaccccagcaatattcaaaaactggataaggtacacgcgccaaggcttcatcggcacatagtccaccccgtcgggatgcgccacagcgggagtcgtccgcttggggtcaacctcgaggatgcgttccaccaccttcgaatacaacagatacccaagcagtaacaatacaacagcaatgataaacgataacataatactttacttttttggatttgcaaatttacacaaatttcccgacataaaaacccgtccgcgaaaaaaaagacatacatcgcaaattatcacccccttaccgccaaacgccctcaacagccgctcccgccaaacgcgcttttccctaccgccgccccgcactttttcgtccctcacacccgcctcgccctgccgccgcaacccctcgcccttcctgcattcgcccccgccactaaccaaccttgtgtgaaaaaaaatgcaccccactcccctctgtttacaaaaaattagttatctttgcacctcgaacattaaaaacgtacaatcctatgaagaaatcattattcattgcaattctggcagttatactgtcgtgcaacgtcttcgcgcaagacaccaaaagacaattctccatcaacaccaacgcctggacaaccaactactggaacgacatcatctactccaccgcccgcggattggtgacccatttcgccttcaaaggcaacacgcacgactcaatcatcgtcgagagcatcctcccctactgcggcaccgtcttccccatcggcctggccaaagagggattctacgctcccaacgacatctacggcccctaccaccgcgccttcagcaccccgtttaaacaactcggcgactacggcatcggcatcgacctcgcctggacccccagcgccataggcctctatctgggcggctacttcaaaagccaggaagtctgcttcatgcccaacgacctcaacatgcgtgccaactacttccagccccgcgccggtctcctcatcggaaagaacaccctcggattcgaagtcggcaccttctacgacaaagtagtgggctgcagcggctcctaccgtcctacatccaaagacatgttcctcgacggctggggtctcgacctcgccctctccttcggctccacacgtcgcagctactcacgcaccatcctccgcttctccatgcccttccacaacttcttcaacgaagcctatgccgacggctcactgaatggcatgaaacgccgtgtgggctacatcatgttcagccaccgcatattcttctaatcccctcccgcgaccaacatcgcggcataacaagtggcagcccggccaaccacaccacagccccgctaccatccacccacgggtccctgcccaccaacggcaaggacccgtttcctttcctccgccccaaccgcacccacttcccatccctccaaccccacccatcaataactcgtcccaaccccatccatcaaccacactcctaaacccctgtccagcaaaccacacctccccacaaccccctcccccggccacccacagcatccccgttcctcctcccgtgcaacatcgccccagccccgccacttcaacactattccaacactatttcaacagtacttcaacactatttcaacgcttttaaagcgtcgaaatacagccatagtagcgataaaacactgaaacagaagcgaacccacaccgaacccacaccgcccgcacaacattttaacacccccaacggcaaccaatcatccccatcaagcaccgcccttcgataaaaaaaatcacaatccacaaaaaaatcagaaaaaaaatcttatctttgcattttcaaaaacctctttttcactatggcaaaaataatcggacttgacttgggtaccaacagcattggttgggcagttatcgacaatgaaaagcagataatcgaatctgccggatctcgcataatccccatggatgcagcacgtttgggtgacttcgaaaaaggcaaccccgtttcgtataccagtaaaagaactcaatacaggggaatgaggagactgcgtgaacgctttttattgcggcgcgaaaggttgctgagaatactgaatattttaggtttcttgcccgaacattttgcctcaacagtatcaagatacggcaaaatagtttcggacgatgaaccaaaactggcttggaaagaaggaactgaaggtaagaaaaaattcttgttccaatcgtcgttcaatgaaatggtgtctgacttcgtgagaaacggggtagaccagaagattccttacgactggaccatatactatcttcgccagaaagcgctaactcaacccataagcaaagaagagctggcttggatactgttgcaattcaaccaaaagcgaggttactaccaattgcggggtaaagcggatgaaggtttggattccaccgagaaccaaaaagaggagaagtcataccatgagctacaaatagtaaaagtagaaaacactggtgagaaggataagaaagggggaatatggtacaatatcacacttgaaaatggatggatttacagaagggcattcaagatagcacccgattgggaaggcaagacccggggattcatagccacattcaaattggacaagaatggcaaacacaaaacagacacaccctccatcagttcgcccagtgaagacgattgggggctgagaaaaataaaaacagagaacgatataaagcaatctggttctacagtaggggcatatatttaccaaagtctactgcggcatcccgacagaaaaataataggagatttggtacagaccattgaccgagagctatatgttgatgaattatgccggattttggacaaacagatacaatacattcctgaactgaacgaccaagagctatataaccgttgtatcgctgaactctatccttccaatcattcttaccgtaaaagcatagctcatcgcggcttcaaatatctatttatagacaatatacttttctatcaacgaccgctgaaaagcaaacgggggctgattgacgattgcccatttgaagagagaaacggaaaagcaatcaaatgtattgcaaaatcacatccgctgtatcaagaattccgtatatggcaattcgtgaccaatttgagaatttaccaaaatgacgaagatatcacagccaccctgctgcccgatgctgaggcatacgcaaacctatatcaatacctctcaacgcaaaaggaggttgaccaatcggagatactacattatttcaaaatcggcaaaaaagagctgccttcctaccgctggaattatgtggaagacaggaaatatcctgttggcgaaacccgtgccatcctgttgggcggattacacaaggctggcattgctgaagattttctgacacaagagaaagaactgcagctatggcatatcctctactcggttgatgaccagaagcaatatcgcaaagcattgagaacctatgcccaccgccagagttgggacgcggaaaagacagaagcctttgcccaagcattcgacaaacttactatttataaagaaaaagactatgggtcctattcggcaaaggcaataggccgactgctaccactgatgcggcaaggccggtattggaaagcggacaatattgatatgaaaacccgcaatcgtatagaacacattgtcaccggtgaggaagacgaaaccattaaagcctcgttgcgggaacgcttcaactacattaacaatatcgatcaatgccaaggaatgaacacatggcaagcatgctatttggtatatggcagacactctgaagccatagacgcacaaaaatggaacactcctgaggacataaacaagtatctatcacatttccgccacaactcattgaacaatccggtagttgaacaggtagtaacagagagtcttcgcgttgtgcacgatatttgggaacaaacaggtcatattgacgaaatacacattgagttgggccgtgaattgaagaaaaccaaaaacgagcgagaacatattgctaaagttattgccgagggcgaagccacaaatcagcgtatacgactactgctcaacgagctgataaaccccgaatatgaaatagaaaaagtacgtccattttccccatcgcagcaggaactattaaaaatatacgaggacggggtcttcaatagcaatatagagattcccgacgacattcgggatatccaaaaacgctttactgcgataaaagaccaacccactgcagcagaaataaaaagatataagttatggcttgaccaaaaatacatatctccatatactggaaagccaatcccattagccaaactgttcacccctgcctatgagatagaacacgttataccacaaagtctttggttcgatgattccatgtcgaacaaagttatttgtgaagctgaggtcaacagaatgaaaggaaaagaattagggcatgaattcattgccaatcatcatggcgaaaaagttcatctgacacttggaggagatgtggaaatattatcattggaggcatatgagagacatgtaaagacaacttttgcaagcaagaagaaacgtgaaatactcatgatggatgaaatacctgatgatttcacatccagacagatgaacgacagccgttatataagtcggctgatgatgcatctactgtcaaacattgtgcgtactgaagatgaaaaagggaaccttgaagagagtaccacttccaaaaacgtcattccgtgtaacggatccattaccgacaggctgaaaaaagactggggaataaacgatgtgtggaaccggattgtgctaccccgatttgaacggttgaacacaataaccggcacaagggattacaccacccgaaccgaaaacaacaacaccattccttctgtacctctcagcatgcgtcaaggatttaacaaaaagcgcatagaccaccgacatcatgcaatggatgccatagtcatagcgtgtactacccgcgaccatataaacttgctcaataacgaagcggccaaaagcaaaaaccgttatgacttacaaaacaaactgaggacaatagaataccataatgacaagaacggccaacaacaaccccattttggcgatttcaaaaagccttggcctacattcaccgaagaggtgtaccggacacttgaaaggattattgtcagtttcaagcatcaacaacgcgtcatcaacaaaacttccaacttctataaagtaatacatgaaggaaaacatattgccataaaacaaacgagaggtgacagttgggcaatacgggaaccccttcacaaagaaacagtatttggagaggtaaacctgcaattgaagaaaagaataaggattaaggatgctatcgccaatccaaacagcatagtcaaccgagagttgaaagagaaaataaagaatttcaaatcacttcatcacaccgaaaaacaaatcataaaatactttgacgacaataaggacatctggagtgagactgctgacgggaaggttgaagtgtactattacaccaaggacacaaaagaacggtattacgccacccgcaaggacttgatagatataatgaaagatgacacaaccattgctgctgcccaaaagaccatagacagcattaccgatagtggtatccgttctatattacaggcacatctggcggccgaagggaataatgcagcagaagctttctctgccgacgggattgagaggatgaaccgaaatataatggctttgaacggaggccataaacatcaacccataaaaaaggtcagagtatatgagcaagccaacaaatacagcattggaaacacggggcaaaaagccacaaaatttgttgaggcggctaaaggtactaaccttttctttgtgatatacaagaacaaaaaaggtactcgagggtttgccacaattccacttaatatagtaattgagctacaaaagaaatacgaaaagaaatggaaagagcatctttccgatagattacaacaagacgacctcatgttgatgccgaccgatgctgatattctctacatactatcgcccaacgatttggtgtatgttccgttggaagatgaacgcgtagatatcgaccatattgaccccaaaagaatatataaatgcatttctttcacgggaagacaatgtctctttttgccctattccactgcatccgtaattctacaaaaagtagagtttgaagcactaaacaagatggaacgggccatcactggagagatgattaaagaaatttgcatccctgtgaccgtagaccgtttaggaaatgtaaaacaaataggataaacatgataaaaaagacgctctgtttctccaacccagcctatctgtcgatgaagaacgggcagctggtggtgcgacttgaacggcaaggcgacatgccagaacggcaaaccactattcccatcgaggatatcggcatggtggtgatagactgccaacaaatcacacttacccacggcttgatggccgcactgcttgacaacaatgcttctgtcatcacatgcaatgtacgccacatgcctgtggggttaatgctgcccctggaaggccacacagtgcagagcgagcgttttcaagaccagctatcggcatcgttaccactacgcaaacagctgtggcaacaaacagtgcaacagaagatactgaatcaggctgcagtgctacgggaaatgcgtcatgccgagacaggcaatatgcagcaatgggccacagcggtgaagtcgggcgacagtagcaatcttgaggggcgtgcagctgcctactactggagtcagatgtttccagacaacgaagaaacctttacacgcgaccgggaaggtgtataccccaacagccttttcaattatggctatgcggtgttgcgggcagtgatagcgcgggcgctggtgagcagcgggctgcttccaaccctgggcatacaccaccacaaccgatataacgcctattgcctggccgacgacattatggagccctaccgcccgtatgtggacaagctcgtggtgcaaaccattgaaagatatccaaacaacgacgaaatcactaccgacataaaacgctccctactcacaatacccacactcgaagtgcatatcaatggccagcgaagcccgctcatggtggcggcaagccagaccacagcctcgctggcacgctgctttgccggggaagcgcgcaaaataacgtatccagagatgtgatggaccgctttagcgaataccgaatcatgtggctgcttgtgttcttcgacctgcctaccgacacaaagaaagagcgcaaggcggcatctgatttccggaagcatctgctggccgacggctttactatgttccagttttctatctatgtgagacattgtgcgagcagggagaatgcggacgtgcacctgaaacgtgtgcgaaccatgattccccaatacgggcaagtaggatgcctcaccatcaccgacaagcagtttgccgacatcgaattatataactgtcagaaagaggtagcacctaacgcaccaggacaacaattggagttattttaacacccatagaatagaaaaaacataggacataataaaaaatcccgcccaaaagagcgggatttttttagttcatgacacgttttgaaacattgtattccatatagttactgacatcgtaatgtcaaagaactaatatcgaactaactttttaagcaattcacaactccttggcgacaaaaacttccaagtgccacaatgtcaaagaactaatatcgaactaactttttaagcaattcacaacgctttcaaggttactaattaatgtaagaaaatgtcaaagaactaatatcgaactaactttttaagcaattcacaacacagcccggttttcgcgtttttgcgcccaaaatgtcaaagaactaatatcgaactaactttttaagcaattcacaacatgagttactatttttattcttttaaaaaaatgtcaaagaactaatatcgaactaactttttaagcaattcacaactgtttctgtttctattagtttcataggtttaatgtcaaagaactaatatcgaactaactttttaagcaattcacaaccaattatgtacttcattgtaatgtttatttaatgtcaaagaactaatatcgaactaactttttaagcaattcacaacgtgttttcggttgatattccgtcattgacaaatgtcaaagaactaatatcgaactaactttttaagcaattcacaacccaaccgggttggagtatacaccccggtataatgtcaaagaactaatatcgaactaactttttaagcaattcacaacgaagacaccagcaacaatgtctatgagataatgtcaaagaactaatatcgaactaactttttaagcaattcacaactatttgaccacattatataactttgatttaatgtcaaagaactaatatcgaactaactttttaagcaattcacaacgggaatgtgtgtcaaggcccaacttttgaaatgtcaaagaactaatatcgaactaactttttaagcaattcacaacatcgcaagggtctccattcaccttgttaaaatgtcaaagaactaatatcgaactaactttttaagcaattcacaacaggctctcaatttcaccacgcacacgcactaatgtcaaagaactaatatcgaactaactttttaagcaattcacaacacatgtggctccacatgaactttccccaacaatgtcaaagaactaatatcgaactaactttttaagcaattcacaacctaactgcattacgtatatcgttttcggttaatgtcaaagaactaatatcgaactaactttttaagcaattcacaacggtatcgagttcaaccttgaacccctgcataatgtcaaagaactaatatcgaactaactttttaagcaattcacaacggtacgactgcgacacatacacggcgcgcaaatgtcaaagaactaatatcgaactaactttttaagcaattcacaacccccatcggacaacacaaacctcgccgactaatgtcaaagaactaatatcgaactaactttttaagcaattcacaacaccaacttactgttgctattcactgccattaatgtcaaagaactaatatcgaactaactttttaagcaattcacaacagaggctggtttgtagtttcaagtccgcataatgtcaaagaactaatatcgaactaactttttaagcaattcacaactgctgtcggcggtggggttgtatcggttgaatgtcaaagaactaatatcgaactaactttttaagcaattcacaacagcagtcgatgaacgttcccggctcagcaaatgtcaaagaactaatatcgaactaactttttaagcaattcacaacacacaatggggtctgacttatggctctcaaaatgtcaaagaactaatatcgaactaactttttaagcaattcacaacataaagtcattcacaaagtcggtggtggaaatgtcaaagaactaatatcgaaagcaattcacaacagagaacacattttacgtcagcgaagattgaatgtcaaagaactaatatcgaactaactttttaagcaattcacaaccgtatgagtctggcggttactatgcgtcaaaatgtcaaagaactaatatcgaactaactttttaagcaattcacagcgccggtgctagtgctgccggttccgccataaatgtcaaagaactaatatcgaatgaactttttaagcaattcacagccgccttcggcgtataccttgctgcaccgagatgtcaaagaactaatatcgaatgaactttttaagcaattcacagcacagccagaatggttgttgggtcgagctgaatgtcaaagaactaatatcgaactaactttttaagcaattcacagcctattaagcggaaccgacaccattcattgaatgtcaaagaactaatatcgaatgaactttttagcaattcagagtgctatccaaagccaatagattccggtgcttgttagagtcggttttttatctaaaaaaaggcgacggaagttaatcgctcccgcccccttgatagttttcacaacggaataatccttattgtgaattgcttaaaaagctgttgcaaaaatacaacaaatttttcaattgagcaaataaaaaatgtcactctctgatattcaagtgcgttacagttctacttcttggcggaattcggggatttcgatgttgcgccagccggctttgaggagggtgtcgcggaagttgagctgggtttgctcttcgccgtggaccaggaagagggtcttcactttgcgtttgttttggcagtcgatgtatttcatcatttctttgtagtcgccgtgaccggagagagattcgatgcggcgcagttcggctctgacctcatggggatggccaaagatggacacttccttgtcgccgcgcatgattttggccccaagggttttgggttcgcagtagccgacacagagaatggtggtggaggggtcttcgatgtggttggcgagatggtgtttgactcggccggcctccatcatgcccgaggcggagatgatgacacagggtttgtggcgtaggttgagttccttggaggcctcgacggactgtatgtactgcaggcggtcgaatccgaaggggtcggggtctttcttcatgtagtcgagaatgggctggccgaagcattcggtgtggaggcgcatgatgttggtggcggagatgctgagagggctgtcgacaaagacatcgatgtcgggcaggagttcggcatgctcgaggcggtcgagggcatagatgatttcctgtgcgcggccgacggcgaaggaggggatgatgagtttgcctttcttcttggtgcaggtgtcgagcacggccatgaggagttcctgctcggcatccttgagggtgtcgtggatgcggtcgccataggtggattccatgatgaggtagtcgacctgcgggaagggttcggggtctttgaggatgtgtttgctgtatcggcctatgtcgccggtgtagcccagcttgatgatgcggcggccgtcgcgtattttgaggtacacacagctgctgcccaggatgtggccggcatcgtagaactcgacagtcacttcgccctcgatgttgaagggtttgtggtaggggacactgatgaaacagtgcatacactcctgtgcctctttctcggtgtagatgggttcgacggggtctttatgttgctccttgagttttttgttgaaggtgtggacatcggcctcctgtatgcggcctgcatcggccagcatgatggcgcagaggtcgcgggtggcgggggtgcagaggacggtgccgcggaatcccagcttgtagatgtaggggatgagaccggagtggtcgatatgggcgtgggagaggatgaggtaatcgatttcggtggggtcgaaaccaaggtcgcggttcatggcgtcggtttcgaggcctttgccttgatacattccacagtcgagcaggattttcaagcccttcttggtggtgatgaggtgtttgctgccagtcacttcgcgggcagcacccataaattgcagtttcatatagccaattgcattaattacacattaccacggccaccaacaacggggacaactgtttgcacgacggggcattaaacgtttcaccgtcaacaattgaatgtgcggcaggcggccgacaactgagcagcaaagatacatctttttttccaattggaaagaaaagtatagcgaaaaatgtttgcaaagagagcaaagggcaaaggtctcaggcatttgcgaccggaggcgtaagggaatataggacggttggcggtgcgggaaatggaggcagggagccgcttgcgaggggatgggaaagaggattattgtctctgggagggtgaaagagttttttttgtgatgaatgggaaaatatgagtatatttgcagcgggaatataacaccctacaaaacatttaaccccttggaagataaacaacggacatatatagccatagacttgaagtcgttttacgcctcggtggagtgcgtggagcggggactggacccactgacgaccaacttggtggtggccgacgcgagccggacggagaagacgatatgcctggccgtgtcgccgtcgttgaagcaatatggcatagggggacgggcaaggctgtttgaggtggtgcaacggctgcgtgaggtgaactacagccgccgtatggccttggggatgcgggcatttgaggggaagtcggtttcggacacagagctgaaggcacgtccggaactggaggtggactatattgccgcagtgccgcgaatggcctactatatagagtacagcacacggatatacaagatttatttgaagtacctgtcgccagaggatatacatgtgtattcgatagacgaggtgctgatgaatgtgacggactacctgaccctgtatcacactaccgcccaccaactggctatgaccatgatacgcgacgtgctgcggcagacgggcatcaccgccaccgctggcattgggagtaacctgtatctgtgcaaggtggcaatggacattatggccaagaaacaacccgccgacaaggacggggtgcggatagcggaactggacgagatgagctaccgccgccaactgtgggaccaccgaccgctgaccgacttttggcgcgtggggcgcgggattgccaaccagctggccgcctacggcatagacaccatggggaaggtggcgcgctgctcggtggagaacgaagagctgctgtaccgacttttcggcgtgaacgccgaattgctgatagaccatgcatggggttgggagccttgcaccatagacctgataaaggcctaccgccccgagagcaactcgttcagccatggacaggtgctgagctgcccctacacctgggagaaagcgcgagtggtggtgcaagaaatggccgacacgatggtgctggagctggtggagaaacggctggtgaccgaccaactggtgctgaccataagctacgacgccgagagcctgaccaatcccgccataagcagaaaatacacggggccgcggaccacagactattatggccgctcggtgcccaaggcggcacacggcacagccaagctgaagagtgcggggtcgtcgtcgaaagtgataatagaagccgtgatgcagctgtatgacaatataacgaaccccgatttgctgatacgctacatcaacctgaccaccaaccacattatggacgagcaggtggccaagcaacaagcagagccgcaacagctggacctctttaccgactacgaggcactggaacggcagcggcaggccgaagaggccgagagggacaaggaacgcaagatacaggaagtgcagatacagataaagaaacgctttggcaaaaacgccatactgaaaggattgaactttgaggaaggcgccaccgcgcgtgaccgcaacaaccagataggaggacacaaagcatgacagacgaatatgacgacataatagacctaccgcaccacgtgtcgcaacggcacgcaccaatgccgctcgaggcgcgggccgcccagtttgcaccctttgccgcactgaccggtcacaacaacgccatagaagaaaccgcacgtcaggccgccaaggacaacgaatagcagcacgactcaccacggaacgaggacgaaaccacgcccacccaaccggcacacggcatacggatggccacacagccagccacatgcatgaccggaaatccggatgactgtggaaaacgggaatgagggaaagaaaaaaacctttgtttttcctttcatgtgtcatattttttgtatctttgtatcccctaataaggggagcctacgggatataaccccactattagtcaattatttaaaggagaaataacatggcattgaaaagagttatggtcctcacgggaggcggcgactgtcccggcctgaacgcagtgatacgcggcatagtgaaacgtgcgtcgcaagaaaaagactgggaagtgataggctgcatcgagtcgttcaacggcgtgctacgtgagcccaccgagataatggagctgaccgagaagacagtagaaggtcttcagatacaaggcggaaccatattgggcaccaccaacaagggaggcccatttgcatggcccgtgaaacaacaggacggcacttggaccaccgtggaccgcagcgacgagatgatccgcaaactgcagtatctaggcgtggacgccgtgattaatattggtggtgacggctcgcaacgcatctctttggggctggcccagaagggactgaacattgtgggcgtgcccaagactatagacaacgacctgtcgtcgaccgactacactttcgggttccagaccgccgtgcagatatgcaccgaggccatcgacaagctggtgaccaccgccgccagccacaaccgagtgttcatcatggaagtgatgggacgcgatgccggatggattgccctgcacagcgccatagccggcggggctgatgtatgcatcattcccgaaataccttatgacatcaacaagattaaaaacaagatagagcagcggtacaacaaacggcacggatactgcatcattgtggtggccgaaggggccaaggccaagggtgggtccgctgtaggttcgcaagccaccgaggtgggctatcagcacatccgtttgggcggcatatgccaccagctggcagcagatttgaaagaagccggcgtggagcacgacatccgctgcaccattctggggcacctgcaacgcggtggcacacccatcgccttcgaccgcgtgctggcctcacagtttggcgtgcgcgctatggaagaggtcatcaacggtaactatggcaaaatggtggcctaccgccaccccgacatcgtggccgtgtcgctggaagaggccgtccgtgcacagaacctcgtagaccccaacggcgcactggtccacacagccaaaggcctcggcatagaatttggtgagtaacacggaaaggacttgttgctcacccccagcatataatgcacaataccccacagagctgcaaggcatcccccttgcagctctaatttattaaaacaggttgaccgtggggaaacctttttgtcaaacattatggggcatctcacattcaatgtgcttactggctgaaaacactatggagaaataggcaacacccatgtaatactccaagtgacagaataaacacttacgcatttccgaaagaaaagtctcacaacgaaagagaaaaagccacaagggactgccctgaggtgtttttctttttgtggcatgcggtatgaagaacaaataaaaaagttgactgaataagaaaaatattgtatatttgcattttgcaagtacaaatgcaatatatcgcgcaagtgatgtattgtcagtattttatatggatatatagcatataatatatagtaataatggaactaaaaaaaataaaatcagccctcatctccgtctactacaaggacgggctggaagacatcgtgagagccctcgaccgtcagggggttaccatttattctaccggcggaacatataagtttatcaacgacctcggcatcacccctgtggccgtggagtcgctgacgggctatccatccatcttgggcggcagagtgaaaacacttcaccccaaagtgtttggcggcatactgagccgtcgcgacatgtattcggacggcgagcaactggctcaatatgaaatacccgaaattgacctcgtgatagtggatctctatcccttcgaagccaccgtggccagcaacgctcccgagcaggatatcattgaaaagattgatattggaggcatctcgctgattcgtgcagctgccaagaattacaaagacgtggtgatagtgcccgccgtgaaccactatgctgagtttctcaatatatacaacgagcaagagggcagcaccaccttggagcaacgcagacatttcgctgcctgcgcctttgccgtaagctcccactacgacacggccatcttcaactacttcaaccagcaggaacaaatacccgcattccgacagagctgcaatcatgccaacatattgcgctatggcgagaacccccaccaaaagggatactactatggcgaccttgaagcctgcttcacaaaactcaacggcaaggaaatatcatacaacaatttgggcgacatcgatgccgcctgcgcactgattgacgactacagtgccaccacatttgccattctgaaacacaaca

SEQ ID NO: 1317 - DNA, 17238 bp, synthetic construct
  source 1..17238: mol_type = other DNA
  misc_feature 1..17238: note = Synthetic
aaaatggcgggcctgttactataacccaccctgacattacacgtttttttatgaccatacctgaagcaagccaattagttatagaagctgccagcatgggcagtggcggcgaaatttttgtgtttgatatgggcaaatctgtgaaaattttagatctcgcaaaaaaaatgatttcgttaagtggactaaaagaagggcgcgatattaaaattgaatttacaggattacggccaggggagaaactctatgaagaattattggcagataacgaaaattctttaccaacgcaccactcacaaatattaattggtaaagtaagagaatacgactacaacgatgttaaaaaaattattgaagaattaattgtttcatttaattcacaaaacaacgaaaatattgtgcagcgtatgaaagagttggtgcccgaatttaagagtaacaactcagtatttgaaaggcttgatgggtaactttgattatattaaacaaactacaatcaaagctacttttataaattaaaactaaattttttatgatcatcttgtagactttatctttaataatgttgcagttgaaatttgcataatattattggtgtaagaatcattatttgtatattcgttgaattgcacatgattaaaatataagaagaagagtattcttttgagttaattataaatgaaaatgatacataaaatatcaagtcttattaaacgctttccgcaattcacaattacgtttttaataattgggcaatttatgatttataattatgctcattttttacaagttcctataatgcaacatcattcttggagacaggcagattgcatttcatttgcattaaatttttacaatgacaaagctaatttgctagagcccatggtaaataacctaggtcagaataatgatggtaaagcagcaacagattttccaatagttcaatacataattggaaatatttggaaaattacaggagtaaatataggcatttataaatttacgaatatgttattcttattttttgggctattttatttatttaagctctttattaaaataactgaaaataatattaccctatcaattattttaaccctattgtttaacacatcgccaaatttatcctattttggaatatcaactattagcgacatacaggcgctgagtcttagcttaattgcgctttactttttgtttaattttctttccaatttctcaaataaaaatttaattgtttttatctcagttttttcattagctggcttactaaaggcatccgctgcattttcttattcaatttgtgcatttatggttctattttgtttaataacaaattacaaaacgcttggtgcgaaaaaagtacttttatcactaagctcactcgcacttccattagtggtttggtatttgtggttttcgtatgcaaatagatataatttaaaacatccaaccggattttttctagttggcatattacctatttgggaaattgaatccactaaagaaaaatttaatattttaagaagtttaattgataacaaattggataaaatgtatccactattatttcttgtgccattattaatatcaggagtttacttgattatttcaaagtttaaagcctttttatttgaaagctcagtgatgatagttagcttaatttgctttattgcttatattttgcttttctactttgtgttttctgaacacgattattatttaataaatatgcaatgtgtactactactattttttataatgcagctcaaaatttttctaaaaacaaaagctgatttattgaaggcaaaatctacaataattattttcttatttcttttagtcggaaatacgcaatatagcagttccttaacttggtctaaatggcgctataaacccgatagttttttaaacacttttatttataatgaatttgaaagctctcgggcggagtactttttatggactaatgcttatcgctatagtttgattgaaaatcctgcctttaagttagattatttgggaataaaacaatctgatataattctttgcctaggcgattatactattaaccgatctttggttgcccttaacagagctgggtacacagactacaatgtggcaagcgaaacaatagatttatttataaaagaaaagaaaaaaattggtcttaagtacattgttattattgaaccaaattggttaaataacgaaaaactaaaatcatttttgactcataaaatttatcaaaaagaagctgtttctatttatagtttagattgaatttaagcaaagttacctattagttgaataaaattattgacatattttttgcgccattttttaaaatagcggcatactttaaaactaattttaaaagcactcttgtttttatttttctagtaaattttatatgcaaattatatttgcttgacttgaatgatattagtttagtagagtacactaatttacaagaggcaaaaagttttaattttggcaatgtttcgtttacaaataatgctttattctatttaattactttttcgtttggtaaagcttttggcactgctgtttttcttttgcgtttgccaagtgtagtgtttataagtattgctgctgtatacttttataaactgatttataataatgtcaattatcttgtagctgtttgggcaagtatatttttctttactaataatttaattacttttaatgcgcaactaattcatcacggttctttgctacttctgttttctgtacttagtgcttattatatattcgaattggcaactgagaataaaaacaagttaattataaaatacactgtaatatgtattttaggtttttacacatcaaatagttatttatggtttgtactttttcaatttctttttattgttgttaactttcctaatttaaaaaaacaaattattaaagtaggtttactgtttgtgttgtttactaattattttttatttgcttatatttttgacactaacatatttgctttcttttttaataaaggaatggaagtgttctggataaaatctttttgttacaaccttacctttgattacttcttttttaatttattgttcttgctaacttttgctatagcgctgaatacttactttaaaggattggttaaaaatcattcgcttaaatcttttaagttctttaagttttcgttttatttattcgtattactttttgtttgttactttaaaagtagtataagcaaggaaaatcatttgtataattcaactgcaatatacttgtgtatgtttcttattattcttcttagtgttatttttggacataatacattctctgcaaaaagccaaatattacttaccatgctttatttatttacttttttaccttctattaaactaggtgtaaaccacggttggcatagtaaaggtgttttaaaattaatccaaaatggtagcccaaacaaccactatttttgttctgactctttgccaataaaattttattacacaacaaaaagtgttgatgagcaagcacaaattaaagctcgcagttattattttaactctattaacgagcttactaaacttattcaaaataaaagcaattctaaggatactctttttttaattgctaatgaagaaaaaaacgataccaaaatgatggatgaatttttgaaatttggctatcatgaaacaaaaatgaattattatttcgctaattattacgtaaaaagctatgctaaaaataattaatcgaggcacgttattttatacgcttgaaaatcaattcaagcaaattaaattttacatttatttgttattcgcaataatttttgcgcttatttcgattcctaatctttacaattttcatgctcacgcttatgatttagggatttataataatagcatttatcaatacagccattttataaacaaccctcatccatacggtcatgcaaacgtcacaaactttcttggagatcatttcgctttatacacaattattttttcgcctttatactacgtttttggtttgtatactttgcttattgttcaaatagcagccattttgtttggtggctatggcatttataaacttattaagcttctacatccttcaacaatgttgcctgaagttgcactatttcattttttttctttttatggtttatattctgcgcttggctttggctatcatgataacgtggtagcaactatgcttattccttggtttatctattatttatacttagataatttcaaaaatcttacaattgttaccatttttatttgtattggaaaagaaaacatgcctctaattttggcgtttgttattataggttacattttgatttttaaaaatgatttcaaaaaagtaaaaatactcacagcgctgttactcttttgtgttgtttacatgctaattgtaatcaaattggttatgccaatttttttaaaagataataactctggtaatcatttatcttattatggtattttgggtagcgggccaaaagaaattatcgaaaacttgctattcaaatctaaatattacttaacaactctttttacaaatcatagcggcaaccccaataacgattggtgtaaacaagaaacctatgtttgcctctttgtaagcggcggacttgctttacttataaaacctgaatttttagtaatgataattccaattatatttcaaaagatgtataatatagaccaaggaaaatggggaatagattttcattattcgatagagtttgctcctattattgtaatatcggtttatacttccctattgtatataagttctttacgattgaaacttaggcttgcagcctttgcaggttttctatcatattcaacaagttttttgaacatgtttcagcgtaatggcgagctttattataacttgaatgtaaatatcttaattaagcctcatttcaaaagtgaattcaataggggttcatttgaaaaattgactaaaatgattcctaagaatgcgaggctttctaccaacagttgttttggagcaaatttagcatttcgtaaatggatttttttaattcctgatgtatcagaagcgaattatgtttttgttggggcaacggggaatgattggccgctttcaaaaacccagttagaagagtatatagaagaactaaaaaaatcaagagattggattttagtagcagaggaaagtagtatgtttctatttaagagacgtagttgataattttatactttgaaaatataaatcaattaattttttctaatcgctttttaaactcttctacaacttctttttgtttcttgatttcgtccttcttttttacttgttcctcttcgtttttcttaatgtctttttcagcatccttagtgcgctcgttgtttttttcaattccttcttttaaatcttttttctcattttctaaatctttaagttgcccagccaatttatcataaattttttgcgatgcttttgcctgctcacttaccgcgcctgcacttgcttcaacaacctttttttgaatttctagctcacctttcttttttacaagttcagattcttttacaactaagtttgattcattcttcgaaatttttgacttgtagtcgcttatgtcatttttaagattttcgtttttcttttccaaacttttttgatcgtcttctaggttagccaattttttttcgttatcttttaattgatcggctaacggacctttagtggttttaattgcaaattcttttataaccttttcaaaataagtatatttttctttatcagtgccagaggataaaaatgccccgcccatatccactgccgtaaccatacgtacggttttttcttttttgttttcaaaaaatcgcgagtaaacatctacggtattattgccccactcctttacaagtaggttgtcagcaaacacttcgccctttttatcttttaccgattcgtttttgtaatcttttaatacttttttccaatcatctagcacgtcagccattttattttcataaatggttgttataatacaattttttgagcctactgaaaaattttcattcccctcagaaacattgattgactgggcatttaaaaaatttgctaatccgtttaatccaattattattgatagttttttcatgctttatttttattaattcttcgtttttaattaatcaaggtcccaaacgcttggtcgcttttttttataaaatggtttaaaataatttttatgctctaaaataaaaaccataataaaataggcaattattgggcttccaaatgtaaaaaacgacaaataaatgaaatacattcgtattgttgttgtatctattccaagctttttaccccaccattcgcatacaccaaaggctttatgctcaaaccaatttattatgcttttaatcattctttaaaggtagtaaaatattttttgctaagccaccacaatttctcttaacacctctaaactttttatgttcccaaaatttggaatgtgaaacccatagtaggcaagtagtgcgtctgttaaaagtttacgctgataactggtatatctatccgtggtagggtttgctgaaagtgctgaagaaaaaagttgtgagcaggttttatctaatcccataggataagttagtgcaaccgcctcaaatacgccttctcttgaattaaaaaaaggggtttgaatcgaataattattttgaggctcaatcccaagatattttgttaactccactaaaaattcgactacaaaagttgatgcattaaattcatggttttttaataggataatttgttgctctataaacttataaagggaagtattttgttgttgttcttttaaaatctttattaatacctcatttataaattgtaaaacacctagcgaagcaaagttgttcccttgcaagctgtcaacaaaataacttcgtgcctcggtgattacagctacatctttattttggcgaataatatactccacttccaataaatttagaggtaaaagcgtacttgctctaattttagagcctggagatttacttactgcggcaaagcaagaaaccaatccattacttagtgtgtacagctttacgatgctttttttatcaccagtttttatgttctgtaaaaaaatggctttatcttttaccaacattagtttatcactaaaagctttgttgctatgcgttgttgaccatcagtactggttgaataaattatataaactccagtttttacacgcgcattagcaaatgttgttaagttccactctatctggcctccttttgattttgtttcccaaacgatgttgccactttgatcggtaattttcacaatagcattatctattagtccttttactaaaacagtaccttggtaatttggcctaactgggttagggtaggctatcacgttggttaaaacttcttctccctccaaaactgtacttctgtatgattgtaggccattttcagtagcaatataaacatctcctgttttttcatcgtaattaacatccagtatattatttgaataaagcgggctattatctttggtgaaatgaaatagttgcttttgtccatctgggttaaagcaatataatcctccatcggctgtaccaacccatttattatttgccccatcaatggttatagctgttacaatatctttttctagcagtaattctacattaccatcttgaacaatttttattggctctgcatcaaatttacttgaactaaacacgctactcgagttataaacaaccctaattcctgcgctagttcctatccaaagttttccgtccttatcctcggcgatacagtgtattccttctgtccctagattacctgttccagcattttgattaagatattttaagtttacatttagttgtggtgggttaaaattactacctgggttataaaccgtaataccaccctcatcttcatgaaccatccaaataaaattgttcttatcaataagtaatcttctggtaaatttaggtccattaaattgaaaggtttggtaccctccgctttttttaagcacatttaaataatattgttgaccagagttaagcgtccataaattgccatccttatccatggtcattcccattattctactgctctgcatggctgtattactttgattgtatacagcaaccaacacattgtttttatactcataaatcccactactaaacgatgagccgaaaattctacttttatcttttctgtctatataaacagcattaaggtcaataatttcgccactgtccaaatttctatttggtaaatcaacccatttgtcgttctcataataactaatattggcgcgcgtataaatacttccgccacctttatctgggtgtgacggagcagatgcgattatgccatcaaaaatatctacttggcttgagaggctggatgccaaaccattatttgtggttttgtactgcctaaaaaatgggaattgtccggtggtataaaaaaatccatttattaaatcagtaatccaatactctttctgacccgaactttcgttaattataaaataactatcacttaaatttatttgtttaccgttgaatgaagttatataatctcttaaaccatagtttgccgtgtttcttaccaataatccaaactgatcaaaaattgtaaaaaactcattggtatgatggctaaatttaaataatttgcttggataactcactgcgttagatttggcccaattagcattatctatgctctcatataaagtatcaatctgaggtaaactggtattaacttttgcagggttataagtagctaaaaacttattgcctgtttttattactccccctactggtgcgcttaaagggttatttgggaatattatctttacccaattattaaaattatttaggttctttaacttgtaattacatctgagtaaaccccgctctgtagcagcaaaaattaaagaatcatccatagcaacttggtaaacttcagtattcgtgccatttaatcctaatacgtatgtgtcttttacttcaaatttatccgtgtcaaacacaactataccaaaaccacaggctaaataagccatgcttcctctaaaaaaaacttcgttaattaattttttaccgtttataattttatttttaatatcggcaaagtagcgcacttcatcgcttgaattaataatatcaattgcggaattttgataaataacgagtagcttattgttgtttgggtttacacgtaataatttaactccaacatcatttaaaccgtttgctttgtttagttgtgaaaatttcgctttgctttggttgatagttaaagcttcgtaatctccatcaattataacaataccgttagaatttgatacgtaaactttattattaaatctacaaactgaattggcggtgttaatattagtatgatcacgccaagtgcgaggtggaatattttgaccaatacaaattgccgtaagccaaactaatagtattgttatacctgatttcatacttcaattaaacgataaaattagcatattattgctaaagattaaaataaataagtgcttatatttgccttaaatttaggctccgtagttcaactggatagaatgacagattccggttctgttggttgtgggttcgaatcccgccggagtcactaatttaatcgggctaaaaatagcttaaacatttttacttatttcaatatttaaaaacgcaaatagcattacgtgtttcctttttaaaaaggcacatttttttaaccgcaattgactatagaggtcgattttattgacgaacatctgtttagggtttaatttttgctttttactctaaattctggatttaattttataaattagtaataaaaaaagtgatccacctttcggcggaccactttagatgttttcacaacggaataatccttattgtgatttgcttcaaaatgtgatacaaatataaattaaaattaatataatgacgaaaaaaattttaggattggatttagggactaactctattgggtgggctttagttaaacaagattatgaaaataacaagggagaaattattggtttaggaagtagaattatccccatgtcacaagaaataataaatgattttaataaaggtatatctattccacaaacagctactagaacgggatataggggtgtgaggagattactagaaagaaatttactaagaagggaacgacttcatagaactttaaatattttaggttatttacctgaacactactcaaacaaaattgattttgaaaaaaaattaggtcaatttatcccgaatagtgagccaaaaatagcatacaaagaggttagaatatcagaaaacaaaatacagtatgaatttatatttaaaaaggcatttaaagaaatgttggaagatttcaaaatacatcaaccaaatttattattaaatgataaaaaggtgccttatgattggacaatttattatttacgtaaaaaagcattaattgctaaaatagaaaaagaagaattagcttggttattattacacttcaatcaaaaacgggggtactaccaactaagaggcgaagaagatgaaacaccaaataaattagttgagtttcatgcattaaaagtagttgatgttagagctgatgaacaacaaaaaggaaaaactgatatttggtataatgtaattttagaaaatggctggatttacagaagatcaagtaaaacgcctttatttgactggaaaggtaaaacacaagaatttatagttaccatagaacttagcgatgataaaagcataaaattaaataaagacggtaatgagaaaagaagttttaaagcagttgactcagagctagactggattgctattaaaaaaagtaccgaagaaaaaattgacaaaagcaaaaaaacagttggttgctatatttatgagactttactccaaaatcctaatcaaaaaatcaaaggcaaactaattagaactattgaacgtaaattttataaagaagaattaaaacaaatactagaaaaacaagtacaagaacacactgaattacaagacagaaagctttacactgcttgtatagaagaactttacgaaaacaatactgcacacagagaaaatataaaagagaaaagttttgtacatctatttattaatgacatcctgttttatcaacgtcctttaaaaagtaaaaaatcattaattagtgattgcccatttgagcaaagaacatatttaaaagatggtaaaaaagaaatgcagtctataaaatgtatatcaaaatctaatcctttatttcaagaattcagattatggcaatttatccataaccttaaaatgtatcaaaaagaaaaaactattgatggaaaaacatataatgatgttaatgtaacaacagagtttttaaaatcagaagacgattacactacactttttgattggttaaacgaacgtaaagagatagatcaaaaagcatttttaaaatatcctgcatttaacctaaaaaagaatgctgaaaattaccgttggaattatgtagaagataaatcatatccatgtaatgaaacacacaatgctattgtaaatcgattgtctaaagttcaagaagtaccctctaattttttaacgaaagaaaaagaacagaatttatggcatatactctactctgttgaagataaaatagaaatagaacaagcacttaaatcatttgctattaaaaacaatttaagtgaagatttttcggaagttttcaaaaaaataaaaccttttgataaagactatggttcgtattctgaaaaagctattaaaaaattactcccactaatgagaaggggtaaatattggaatgaagaagatatacaccaacaaacaaaaaacagaatagaaaaaattacttatggagaggttgatgataaaataagagatagagttcgagaaaaagctattcatctaaataacatcaatgattttaaagctttaccgctttggcttgcttcttatattgtttatgacaagcattcggaagatagtaatgccatgcaatggaaaaaaccagaagatattgagaattatctagaagaatttaaacaacactcactacgtaatcctattgttgaacaagtaattaccgaaacactccgagttgtaaaagatatttggaaaacttatggtaacagtgaggctaatttctttaacgaaatacatatagaattaggaagagagatgaaaaatcctgccgataagcgcaaggatatgaccaataaaatgagtgccaatgaaaatacaaatcttagaatcaaagcattattatcagagtttctaaatgatgcgtcttacgaaaatgtcagaccttattcgccaaatcaacaagaaatacttaaaatatatgaggaaggagttcttaactcagaaacagatattaatgaagatattttaaaaattagtaaaacggcgcaaccttcgatatctgaactcaataaatacaaattatggttagagcaaaaataccgctcgccatatacgggagaaataattcctttaaacaaattatttactcctgcttatgaaatagagcatgttatacctcaatcaagatactttgatgattcattaagtaataaagtaatttgtgaagcagaagttaataaagacaaagataaaagcacagcatacgaatatataagagataatcacggtaaaaaaatcgaattatcctttgggaaagtagttaccatttttgaaaccaaagaatatgaagattttgtaaaaagaaattatgcaaaaaacagaagtaaattaaataaattgatgatggaagaaattcctgaatcatttattcaacgtcaactaaacgacagtcgttacattagtaaagtcgtaaaaaatctactatcaagtatagtacgagaaaatgacgaacaagaaagtacatctaaacacgttatttcgagtaatggaaatattacaagtgtgttaaaacaagattggggattgaatgatgtatggaatgatattatttcaccacgatttgaacgtttaaatgaattaactaagagtacaaattttggtgaatggacaaataaaaatggtaaacgtgtttttcaaacacaagtaccattagaactacaaaaaggatttaacaaaaaacgtatcgatcatcgccaccatgcattagatgctttagtaattgcgtgtgctagtaaaaatcatatcaactatttaaacaatcaatatgctaaatcagaaactactcgttacgatttacaaaagaaattaagaagacacgaactaattgaaattaccgataaaaaaactggcgaaaagaaaaaaataaatgtggctaaagagttttttaaaccttgggaaaactttacaattcaagcaaaagaatcacttgaaaatactgttattagctttaaacaaaatttaagagtaattaataaaacagttaactacttccaaaaatgggttccagatagaaatggagatttaaagaaacaaattgtaaagcaagaaggtaataactgggcaattagaaagcctatgcataaagaaaccgtttctggttctgtttccttaaggaaaataaaaaacggtgtgtctctttcaaatgctattgatgatcctgaaatgatagtggataaatctttaagtaaaaaaatcaatcaacttattaaagaaaggtacgataaaaagaaaattcatgcctattttaaaaatttagataataaatggaatgaaaaagatgtaacaaaagttgatatgtattattttgataatgacaatgtagcttctcgttctaaattagatgaatcattcacatcaaaatttattaaagaaagtgtaacagatacgggtatccaaaaaatacttttaaagcatcttgaaaaatataatgaagctaatggaagtaaaataactgaacatccagagttagcattttcagcagatggtattgatgatttaaacaaaaacattatcaatttaaataatggtaagtttcatcatccaatacaaaaagtaagaacctacgaagcgagaggtaataaatttaatgtaggtgtaactggtaataaaaaagataaatttgtggaggctgcaaaaggaacgaatctatttttcgccatttacaaagacgaaacaggcaaacgtaattatgacacaattcctttaaacattgttattgaaaaccaaaagcaaggtgctttacaaaatatcaaacctgaattttgctcagtaccaaacaaaaatgaaaaaggtgatagtttattatttcatttatcgcctaacgatttagtgtacgtgccaacaaatgaagaatttgagaatccgagcttagttaacttcaaaaaattatctaaggaacaacaaaatagaattatgaaatttgtaagctgtactggtagtgagggtcattttgttccaaattattattcttcgcctattatgaaaaatgaaattggaactaataataaaagtgaaaaaacatttgatgatattcaaataaaggctgtttgttggaaattaaaattagatagattaggtaatattataacagttttaaaatgataaatcgcacactccatttcaccaatcaagcaaactcacatcatacataatgtatgatacattttgtatgatgcataatgttttatatatttgatgtatggaaaaatcaaccaacccctttttactatcgggctacaaaagccccagctacttttgtaaccgaaaagaagaaacaaaacaactaacccaattaatgcttaatggcgtaaatgttaccctatttgccatcaggcgtttgggtaaaacagggcttattcatcatgttttttatccttaccaaaataactcaaaaattacctgtatttatttagatattttggctacaaaaaatttagccgatttcaccaatcaaatagctacggccgtgtacaataagtttccgcctcaaaaaacattgggaaaaaaaataatagaactttttcaaagcttcagacccataattacctttgatgaattgagcggaacaccctccttaagcttaaccattgaaaccaaaagtcagaaagaaaataccatagggcaaatttttaactttttagataaacaaaacattaaggtagtgtttgcaattgatgagtttcagcaaatattggaataccctgagaaaaacaccgaagccattttacgcacctacattcaacagttaaaaaacacatcgtttatattttgtggcagtaaccaaaaaatgatgcatgaactatttaactcggcaaagcgccccttttttgctagttgcaccaatttaaaattagattacatcagccaagccgattataaaaaatttataattcaaaaattaaaagaacacaaacgaactataactgaggaatgcttggactttatttgtacttggaccaaattgcatacgttttatacgcaatacttttgctcaacgctatttgcaacacacgtaacaaatcttacattaaaagaagcgcatcaaacagcattattactactaaaattaaacgaaaatacattttttcagtacaaaaatatgcttacaccagcgcaatggaatttactaaaagcaattgccgtagaagaaaacgtatttcagccacaggcaaaaaattttattagcaaacaccaacttggtacgccagcactcgtaaaaagaggtatagatgccctaatgaacaaagaaattattttttataatgccagtgtagaaaaaccctattacgaggtttacgataaatatttaatgcgctggttgcaaaaaatgaaataagtaaataaaatacaatgattaaacgcacgctttatttcggcaatccatcttatcttaaattaaaagataagcaattattggttgaacgtacaatggatggtgtattgcaaacaactgcaattccagtagaagatattgggattgttataattgataatccgcaaataacattaaccagcggcttactacaagccttgcaagaaaacaatgtggctgtaattagttgtgattaccgccacatgccgcaaagtttgttattaccgcttgaaggtaatagcatacaacaagaacgttacgaagctcaattaaatgccagtgagcccttaaaaaaacaattatggcaacaaaccattattcaaaaaattaaaaatcaggctgctgccctagaaagtaaatctttagtaccggattatttaatacccttgcaccgtaatgtaaaaagcggtgatgccgataattgtgaagccacagctgctgtatattactggcaaaccatttttaagcatgtttatggttttgtccggcatcgagaaggaccgccgcctaataattatttaaattacggttacgccattttgcgagccaccatggcgcgcagtattgtggctgcgggcttactccctacccttggtatttttcataagaacagatacaatgcttattgtttggcagatgatttaatggaaccctaccgcccctatgttgaccaaatagtgcatcaaatggtggaagaaatggatgtaacgaatgaaatgaccaaagagcacaaaacgattttattaaaaattccagcaattgatgtaataatagacggagaaaaaagtcccttaatgattgcaacgcaaaggacggcagtgagcttggtaaaatgttttaatggagagcaaagaaaaatgttgtatccggaattatagataagaaataaaaattttaaataggtagtaacccttcgagggtttactaagcgattagaataaccctcgaagggttaatgccataaaaaatttaaaaaaatcatgcaaaacaaatacgaaattttagaatcagattgcttataccatatttacaatagggcaaatggaaacgaaaaactctttttattaaatgataattatgaatttttcttgaaaaaatataccaactatatttcaccaatttgtaatacatactgctattgcttaatgcccaatcattttcattttttggtacaaataaaaagcgaaaaagaaatagaacaattttttaataataaggtatcttcaagcaaaactcttcaagaatttaaaacccttgaagggttggcaaagcaagaatcaatttccaaactattaagtcagcaattttcgcatttatttaattcatatacccaagcctttaataaggtaaataacagaaaaggaagtttatt

SEQ ID NO: 1318 - DNA, 17188 bp, synthetic construct
  misc_feature 1..17188: note = Synthetic
  source 1..17188: mol_type = other DNA
ggtagcagtaagctttcatagcccggtagccctgctattgtagtggcgaattgtttgtttttcctatgatatacctgttgtaggtagaaaatgttccatgcagcttgctccagtcggaaatccggcggcacagcggggtttggcgtggtagattctacaaatttgataaagccccagcgttcggggtggtgcatgttgatgacaccgatgggcgaccacacccagttctcttcgtccaggaacttgccaccatctttccgacgttgatatacgttgtcctgcacctcatgttgccattgtacgcgagagaaattaatgcgccagtagcttccaactttaggaggcattttccgagcgaacgtagttaacgagtggaagggaatggccatttccaccgcccaaaacatatcggtatcatttgcgttgttgatggagccggctacatgcacggcggattggaggcctttaacatcccagtgcatgaccgcatcgccacccaaacggtatgctttgggcatcatgagatccataacggtatttaaggcgtttacttcgatttcgtagtatagcggctgattgtcgaagggctttaaaaatacctcgaagtcattattatggtagatgatggcgtcgcgtttgcggatatcgccccagacatggggctcttccagttgtgcgtaaatatacaggtgctggtcatcccacagcattttcactttgctgttcaatgctggtttctttttgcttgccccttctatatcaacgaaatcatcgctccaaggtgcctgttgccaagcctcctcatctgcttttccgtcaacgttgatttggctgctgatcttttttgcagcgtatacgctaggtgtcgattgcatgcgtgcaatatcatctgctgtttgcgccgatacggcggatgaagcaattaaaaacgcgctactaagaggaaaggctatatgttttatcattttcgaggctgaaaatacgtaattacgcctacagaaaacatatgtaacataaattttgtattgctgccttgctgcggtaatttatcacgatggggttgtcgctatgcgggcaagcaataaaaaaagcttctatctgcggatagaagctttctcgtatgtttgaagaagttagcgggattatacgcgtctcgttttgatacgggcagctttaccagtaaggccacgcaagtaaaataattttgcgcgacgtactttaccgtagctattaacttctattttttgaatgtttggtgaattcacagggaaaatacgctcaacaccgataccgttggacattttacgaacggtaaaagtagcattcacaccttcgctatttaactggataacgacaccttggtacacctgaacacgctctttgtttccttcgcgaattttataatgaacgctgatggtatctccggctttgaaagcgggattttcattttttacgaccgcttgttcttctacaaattttactaaatccatgattttgagtaattattaacgatttatatcctgtaaaaatcggactgcaatattacagcttttttctaaataaaaaaaatacttttcaaataatctgcgcacctttttacaagtgcgtgcaaaggtagtgaaaataaacaaactacgaagaggatttttactttttttagcgagcatttcggatacagtaggaattaaacgataaattatcttgcaatcaatgaagcgtttagcagggtacgttaaaaaaaaacttgacagcaataaattatgctgtatatttgtgccacacaaaacaaaggtgataccttttcggggtgtagcgtagcccggtatcgcgccacatttgggatgtggaggtcgtaggttcgaatcctgccaccccgacaaaaaaagctcgacgaaagtcgggctttttttgtggttggcatattcgaaccgtggttcgatccgttggagcttcagggtttgtgttgggggcttgcggggctgaagcaatcctgccacctcgatgaaactgcacagcagaaaacgcctgtacagcaaacaggaggtgctcgacatgatgaacatgacggaaatcacctaccgccgcaacctgaagaaaggattgctgaacccgatacgcatagctggggtcgacctgtattttgaggaagacctgatcgaggccatgaacgaaagccggcgcaaaggcaagctgtgaacgccgtacaggagcagcccaaaccagacctaaacctcaacctattcctttgcctagcctcaagctgcctacacctttttgaagcggccctaacccgcgggtgcatcgccttccgtttttcttgcgtagctgatcgacgtgcttttgacaaccatcaacacgagtttgacggtgaaaaaaggtttttcttcatccagcagatgcgacctgatgcttgcttgcaccgcgcatgcactggacaatgtgccgcagatggatgattggtttgaccaagcagatgacggcatcaacctgatgcttgactttcccgcgctgagggtcatcaacgtctacctgatgcttgcttacgggagtcattcacctgacgacgccgaccagatggatgtttggtcgacgcaagcaggtgaatggttgccgctgatgggcatcaatgggatgctgtcacgtgaagcgctgaacctgatgcttgacaaagccacgttgatgcttgccgatggcaacctgatggatgaagatgccctgcattttgtagcctttttgatcaaatccgatcaaatccgatcaatttcgatcaaatccgatcattttttcattcggtggtctacctcttcctatgtttgttttgtcgctgggcgggaaagccaatggttccgttcggggaaggagctccctccgaaaagatggaccggttgatttaacgatttccagggacagctataatgatggctatttttttataaagcgctcgtcggctttacaagactgaaagacgatgagctcatggtattggcgagaacggttctcggtgccatgacagaccatgcaaatagaaaatgcttacaattatggtgtgagcaaagcgttataatttaagttcttcgttggcaataaatttaaatcctctccagatcggaaaagaaaaattggtctttcgtgcgattgggatatagatttttttacgctattttgggtgctattcgataagaacgcagtagaactaaatagagatattattgtatcactcgagcctagtgagggcgaaacggtttattagctcaatcaaagaaaaggaaatgacagaactacctaattttacaattcaagctaacggagatatttcaaaagagtttttgaaaagaggtatccagtctttttctcaagccacccactatatccaaaatatcgattatggaaggaattcaaataaagacgacctaacaaccatttttattgataacaaaggaacatgcagtacaaaacacgctctcttaaagcaattggcaaaagagaacgaagttgaggatatcaagcttattcttggaattttcaagatgaatgctttaaatacgccgaaggttgaaaataccttgtcaaagaatcttctgcaatacattcccgaagcacatacttacctgaaatttggcaatagttattttgatttcactaaaagtggctcatcgccaaatgactttataaatgacttgctttttgaaacagaaatccagccaaatgaaattaatcaacataaaatcgaaatacataaagtatttttggataactggctttataaaaatagtaatatagactattcgcttgaagaactttggaaaataagggagcaatgtatccaagatttatcagaataggccgaataactcagatagatataacaaagaatttaagaatgaaaattaaaaatttgactttacgaaccaacaaatttcaagaggttaaggatttttattccaaaattttaggtttggaaatcaatgatgaaacagatgatacatttagtgtgaaaattggctggtcgatattgaaatttaaacaatctacagagccttttctgtatcattattgttttttaatcccatcaaataagttgcaagaggctttacactggatggaagaacgggtcgatattgttgagttagagagcggggaaaaagcggttaacttcgaagattggaatgctgtttctttctatttttatgatggaagtgggaacatttcggaatttattacccatcatgatttagggaatgatatagataaacaattcgatatttctgatgtgttgggtataagtgaaatgggtattgggaccgacgatatcaagaaagtaaactcaattttggaagaaaaatgccaaacgagattatggaagggagacttgagaagatttggtgctaacggttcacctgaggggaaatttgtgttggctaattataatgaaaaagagacttggtttccgactcaaataaaaataaaacctgttccttttgaaatagaaattgaaaataatgataaattatatcgattagaatacaccggtagagagttacgaaaaagacaaactggatagcactaaatccccccttggctcatttgtggcttgcgaaacgaccacattcatcaccaccacgcaacgttcttattgctgatgtttgctttaaaggaggtttgatagtatcaaactataaattcaataggtgagcggacggcatcaagggaattgtctgatttggttgaaaaagaggtgttaataagttcggaaacaaaaggggcagggtcatatttctatttgaccaacaaataacgccgaaataacgccacgataaagccagaatgaagccaagtcgttttccccctcgctcattagtggcctgcggaatcccaccgctcttgcccgtggctgttctcgctttgggcatttaagggtttggtttggcgacctaattctatgaaaaaagaggattgctgttagctagtaattttcgtgtctttatgataccaaagtacatggactgattggaaaaggttctatcaggaaatactaattattttttgttctgttctgccgcgattcagcgatacctgaaatatacttaaccttttcaatcttagcagaacaattgttaaacttatcaatatacttatccgttccgaaattatcaataggaatatctgaataaccaaaatctttctgtacagaaataaaaggatgaaaaacgtacttatttgcagtcatagacgaaaattttaaatctgccgcatccgtttcattgaaatcagcagttaacatttgatcaaagaaacggttataaacaattgtaaattgggtgcattgaaaactactaatccaacatagatgatcatttgcaggaataacctgttccgtgctagaaattccaccaagaattaaatccgcaccaaggaaacttccttgaattattgcatcaaaaagtattttactttgatatccgtcacagaatacgtggtcatcttcacaaatcaagattacttcatcatcccgttctaccgccaactgaactactttttgtatgcttttccaaagtcccatagctccattcgaatcttttattgcttttactatggtgacatcaaactctgttcggccagcaaattgttgttgtatatgaagcaatcgatcggatcgatgaggcaagttaattatatatgttggtaactgaatgtcggtatcaacagcaattttatcaaatatttgtttcgatcgctgaatgtgtgtaataacattttttatcgattgccatctttcatttgttatttcaaacaaacgcgagactatagctggcgcgttattttttggtgtaacgtcagaataaccaaaatcacgttgaatagacaacatagggacagaaacaaaaattttatcagaaagattgcacatccacttatcggtgatatcatcttgttcgaagggagagtctaaaatgcgttcaaagaatgaagagtatataattaaaaattgtgttcctgtaaaattattcacccaatatagatcatcttcaatatgcactccatagtcaaaccagctcacgccccctaaaaaggcatctgcattatactttcgcagacgcttaagatagtttatgaagacatctttattataaaaattggtaaattgatgatcatcttcacatatgagaacaaaaggcagcttttgttcatgtgcttgatttataatggtatatagtgatttgtaaaggccaatggccggtatagtgtcctcaatagcattaaaaaactttatattaaattcggggcggctaagaaattgctcctttacatatactttcctatcctttcttttttctagattaataatatatgtaggtattttattggaatacatatgaaaagtgatgttgttaagtttaaagaatataaaattttctttgtaatactttgattatcctatgccatctattcatataagaatcaacattacttattctagaagaccgttaatcatctcttttactctgtcatttccgggaaaggctgaaaatttattaatgagtacgccctctttgttatataacagataggacggaatatactcaaaatcaaaatgtttcatcaggtaattccattgagattctgtcaagtaataatgctcgtcacctattccaattattctctcttcccacagcttttttggtgaagattcatttgtgagatacacaaacacgacatccttatcgcgaaaatcaccctttgtacttctgaattgtttgattgcatccagacatggagcacaccatgttgcccaaaggtcaataaatacaaccttgttcttatatgtagcaacaatagcctccatgatcttgttttcttgcacagaatggacatcattgacgacaacaggtgattttactttgtccagttccaaaacctcttggtttttcttcaatagaattttcgctatttcatcatttttccaataacgggctatattctctttttgtttttcgcttagcggtttcacctgcacatttagttgtcggccataggcattggccgctaaaatatcataatatggaccgtcctcaaatccgaccaaatcagctaaaatagctttcacgcttgccaaccaggatgggatatcgttttctccaataactggaattcccaaaacttcgtttcgaagaattaaatcctgaaattcagcgaatgtgaaggtttggaggtattgcggatcattgaggctaaagtctttcaaaaaacgaaaatatgacctatcaatcttctgaatttcaggtgtattgacctgatcacgagttgcgttacgataattacgcttcatctgtctttcgtaatcgaagacatctcccgtatatacgaataaacgataatctttagctataaaccctttaaactccttggagaataatttatcgttatctacgaattgtgccaatcttttagatacagtactttgaacagtatccaagaactcatctgcacttacattatacaaatgtgggtatttccaatttgggtcattaggtctataatcaatcattttgtttaacacctccatgctttgtatcatatcgtacttattcatgtcaggcgtaacctcaatgtttttgaaatcacggtttgagttataagctatatcaatgtaagtagaatcattattttttgatctgattataagtgacttgcgtggatttatacttgtatacaaaccaataacagaactctcggtttccatatcaaagtccagtgagaatttgcccgattggtcggcgagaatttcttttctaacattttctccggaaactggatgtacaacggtaatagttaccgtaatgctatccttatcttgcccgtcaggagtggtgattcttcctgttattttggaagtaccggcgacgatggttgttgtgtctgtatttatctctgttgtctggttacacgacgaaaagaacaaaatactacatacgaaaagacgttttattttaatcattgttgtcttgatttaaatcccggcaaaattttaaaaattctgccgggataaagtgattaggtaaataaagtatctgcgcaatacaactcactagccatacggtgccgacaatatcctgagtaagacatgccttgataggtccacgaacaaggatcatactctttcttgcctacacaagcggtcatcttaggattagggtcgcttgggccagatccagtagcttccatacattgattatgtggatatgaaaaataatacccattgttacaaacacacttagagaggagtgaatcataatgtgcgtttgctccacaatactgttcgcttccagtataaccagcaaatacctccttcaactcctttctggagagctgctttacttccttgaggtttaagttttttaatgaaatctttttcattggatttgtttttatttatgacttgtaagcattattgcggccactttggtgagccgttcccctatcattgcctgctcccggagtcggcaacaatgttttgtatcttttcttctaccttccttttgtattgaacagatgaaaggtgtctcgaactcggcataactgtgctgcctttgcgtgtagcagcagattctattccacatgcaaacattctgtattttagtgcaagcaccgatgggaactcagattggttctccaacgtatcgggcaggtcaaactttgtaaagttgacgtttagtccctgtaacagataataacaggtcttgaaaaggttattttttcttttatcagagggtaaagattgtgtttccataaagcatttatatctggttattggtttaaagttaattaaaaatatttttggaacaatatttttaaaagtatatttttaatttgcctacatttggtaaaatatatattcatcaagcaatacataagaattttttgcttttggagagaaagtcgtttaaaggtttatttaaaaaaacttccctttgttggggatattaaatatgatagaccagcattactgactgcgtattatttgacgcttgtttaaaataaaaattaaatgcgacatatccttatattggcctctttgctctgcctaatcaatatcgcccagacccagattccattgcatctggatagctgttttatgcgtttgcaataagagccgaaacgttttctttactgcgcgaataccaataataaaaggtggcctcattttatctctttttcagcgcggtatcgtttcgtgctcataccgctttgttgccagtctgctatcatagcaaacatctgcactcttttttcttctttactcatatagtagagctccacattaggcatcgctcaaaagatatgtacttgatagggcggatacaaaggtatggctagaggtggtcgccaggaaatagccgctttagttagatggtgaacatggctgttcgacttgattggttacgaagggttcatttgcacagttcctaaagcatttcgataagttagagcgagaaagatccccgttgtatccaaccaacaaatgaatggctatcaaacagagactgccacaatctgcagaatagagaagaacataacttttcatattgccggatatacctctgccactacggtgacgttgggaaacgggagtcaaatagaaagtgtgttcaagatgctcggagatactagtatccgcactacggaggtctatgtgccggtagtagataaaaaaatgtgcgaggatgtggagaagcctattaatcaattttaatatagcgtacccataattgtgggtttttgtaaaaattgctaatttgatagcacattggtcgacaggtgattttaaacaaaaaatgccccgtagatagacgaggcgctagatgttttcacaacggaataatccttattgtgaattgctttcatgacaaagatagggaatataatgaattgcccaattatgggtaaccgtaaaatatcaaagaaattaacgattaaatttaattggaaaaaatagcaagttatgactaagactattctcggactggatctaggtaccaattctataggttgggcgttaataagacaagactttgataaaaaagagggcgagatactcggtttaggtagccgcattatccccatgtcacaggaaattttgggagaatttggaaaaggaaattctattccccaaacagctgcacgtacaaactaccgaagcatgagacggcttcgagaacgtttccttctgcgccgcgaaagattgcaccgcgtgctacatattcttgaattcctccctcagcactacagcatgcaaatagatttcgaaaaagctttgggaaagtttatcaaccaatccgaaccgcagatcagctacgataaatcatttgtttttatggcatcctatgaggagatgcttcaagatttcaagggaagttcctgcagtcgcctaatagatgaaaatggacagcagcatttaattcctcacgcttggacgctgtattatctacggaaaaaagcgattagtcatcaaatctcaaaggaagaattggcatggatattattaaactttaatcaaaaaagaggctactaccaactacgtggtgaagatgaagacgagaatagtaatagatcggttgaatttcattctttgcgtgtcgttgacgttacctctgatcccgagagaaacagcaaaggtgaaatttggtattcttttatattagataatggatggatctacagacgatcaagcaaagtttctttggaagattggaagggaaagataaaggactttattgttacaaccgatttaaatgatgatggctcgataaaattagatcgcgatggacaagaaaagcgaagttttagggcgcccggaccagatgactggaccttgctgaagaaaaaaacggagtcagaaatagaccaatccggccttacggtaggcgcctacatttatgatcatctattgcgggatccaaaacaaaaaataaaaggcaagttggtgcgtactattgagcggaagttttataagtctgaattgcgacaaattctaaccaaacaggctgaatttcatccggagtttcgggatcaagatctattggctgattgtgtcagggaattgtacaagaacaatgaacaacatcgccaacaattggaaagcaaagatttgtcaaatcttttattgaacgacataattttttatcagcgaccgctccgcagtcaaaaatcaggaattggaaaatgtaatctagaatataaagtttacaaaaccaaagataaatatggtaagcttttacgcgatgcggagggtaaattgatcgagaagcgggtttatgcacgggcaatcgcaaaatctaatccgtattaccaagaatttcggctgttgcaatggatcagcaatctggctttttaccaaaaagataatgatgaaccgatcacggtgcatttaattcctgatacagaaagctatgaacgcctattcgatttcctaaagggaaaaaaagagataaagcaagacatgttgatcaagtttctattgggggagaaagggttaaaaggaaaagatttgatcaacgaaagcgccagattacgatggaattatgtagaagataaggcatacccctgttatgaaaccagagcgcttatcaatactcgcttagataaaattagtgatcttccacaggattttttgaacccagagaaagaattaggcctttggcatatcctttattccgtaaatgataaaatcgagtttgaaaaagcgctcaaaacctttgcgcaaaagaatggcttgaacatagatgaatttgttgcagctttcagaaaatttccgcctatcaaaagtgaatatggaagtatttctgagcgcgcaattaagaaattgttaccattgatgcggttcggatcttattggagctgggacatgattgacgaagacacgaagaatagaatcgggaaggtaataacgggtgaatatgatgagaaaataaaagtgcgcgttagggaaaaagcacaatacctatcaaccgaacatgattttcagaaattacccttatggctagctcagtacattgtttacgatcgtcattccgaagccggcgaccttcaaaaatggacttctacatacgatatagctcagtttttaaatgattttaaacagcattccctccgaaatcccatcgtcgaacaaatcgttacggagacactccgtgttgtaaaggacatttggagcacatatggttcagcagcacccgactatttctctgagattcatattgaattaggaagggaaatgaaaaatcctgcagaagaaagaaagcgtttaacaaatgctatgaccgaaaacgaaaacactaatctacgcatcaaatcgttattggcagagcttgcttatgataccgagattgtaaatgttcgtccctattctcctatgcaacaggagattctaaagatatatgaagagggagcattgaattcgggcgtctcggttgacgaagatatcttgaagataagcaaaacggcacaaccatccagctcagatctaaaacgctacaaattatggttggagcaaaaatatcgttcgccctacactggtcagccgataccgctaagcaagttatttacagcggaatatgaaatagaacatatcataccgcaaagtctatattttgatgatagcatgagcaataaagttatttgtgaatccgccgtcaacaagctgaaagacaacagaatgggtttgccgttcatcaaagcccatcatggtcaggttgtcgactgtggattaggaaaacttgtgaaaatatttgagatagatgactatgaacagtttgtagaaaactgctatgctaaaaatcgaggcaaaaaaaataaacttctgctagaggatattcccgaaaaaatgattgagcgtcaactcaacgacacgcgctacatcagcaagtatatcacggggcttctatcaaatattgttcgtgatagtcgagaaatcgggaaggatgacggtgttaattcaaaatatgtattaacgggcaatggaaaggtaaccacgcgtctcaaaaaggattggggattaaatgatgtttggaatgatttgattttaccgcgttttgagcgaatgaatatgattacaaattcgacatcatttactgtgtggaatgcaaatcatcaaaaatatttgcctacggtaccgatagagctttccaagggattttcaaaaaaacgcatcgaccataggcatcacgctatggatgcgcttgtgatcgcttgtacaacccgtgatcacctcaacttgttgaataacgaatctgccagaaacaacgcaaaacgacacgatcttagccgaaaactgcgtaattacgaaaaggtagtgtatacggactctaggaacggagaccagatcgctcgtgaaattccccaagattttctgaaaccttggaacaattttacgacagaggcgcgtacagcactctccaacattgtgataagtttcaaacagaacaatcgggttatcaacaaagcgacaaactattatgaaagcttttatgatgaagacggaaacctgagattagataaaaacggtaaagcgacgaaaggtttgattgctcaaaaaggagtaaactgggctattcggaaatcgctgcataaagaaactgtttctggcaaaatcaatctacaaggtgttaaacttccaaaaggtaagatattgacagcaactcggaaaacattagatgcatcttttaatctcaaatcgatccaatccataacagatacggggatacagaagattctgatcaattatctacatgtaaaagataacaaatccgaagttgctttttcaccggaagggattgaagaactgaatcaaaatatcgcatattataacgatggaaaaaaacatcagccgatcaaaaaagtaaggatatttgaacaaggaagtaagttttcgctgggggaaagcggaacaaagaagacgaaatatgtagaagctgccaagggcacaaatctatttttcggcgtgtacgtcgataaccaaggaaagcgcagctatgatacaataccgctaaacattgttattgagcggcaaaaacagggaatccggcccgtcccagaaactaacgaaaagggacacagacttttattttccctgtcacctaatgatcttgtgacgattgcgccagaagagcgagctgacagcgagcatacaccattttcagataatatttataaactggtgagctttaccggcagtcaagctttttttatcaaacatgatgtcgccatttccattgtaaataaaggtgagttctcaacgcttaacaaatctgaacgctctattgaaggactaatgatcaaagatatttgccaaaaggttaacgtagatcgcctaggtaaaatccttaaaatcgagccatgatcaagcgaacacttgcgttttccaatccagcttatctttcccatagtaataagcaattgacgattacttttcctgaaaaagagaaggcaatagttaccgttcctatcgaagatattggtgtacttgttttagagaatcaacagatcactatttcgcacggatgtatcgcagcgctattggaaaaaaatgttgcgattatttcctgtgaccgatctcatatgccgacggggttatttcttcccttggatgggggaagcacacagacagagcgattccgttatcaaattgaagcatcgcttccgttaaaaaagcaactatggatgcaaacgattcaacaaaaaatatataatcaagcgcgagttttggaaaacataggtgttgaagttgataacatgaaaaggtggtctagatccgtccgttctggtgatcccgacaattttgaaggcagggctgctgctttttattggaggcatatttttagtgagtttaccgatttttaccgagggagagctggacagcctccaaataacttattgaattacggttatgcgatcttaagggctgcaattgctagagcactggtttcgtctggcctactaccgacattgggtatttttcatcggaataaatataatgcatattgccttgcggatgatattatggagccttatagaccctatgttgatcaaatggtctacaatattctatgtgataaaggactaggtgggattgcggagttgacaacagatattaagaaaatattactgcaaattcccgtactggatgtacagtttgaagatagcacaagtcctttactaattggtgtatcgcgaactactgcttcactggctcgatgctttgaagggttgagtcgaaagataatatatcctgaaatttaatggactgttggagcgcttaaatcaatatcgaattttgtgggtcttagttttttttgatttgcctacggagacaaaaaaagaccgtaaagagcacgctcgatttcgtaaaggaattatgcagaatggttttacgatgtttcaattctcgatgtacatcagacattgcaacagcagagagaatgccaatgttcacttaaagcgtgttcgaaaacttcttcctgaaaagggaaaaattggaatcttaacaatcactgataaacaatttggagaaattgaacttttctctggcttggagattaccaaaaggcctgatacaccacaacaactagaattgttttaagattaggaacgttaaaactgctttactataaaaaaatccagaggtttccttctggatttttttatttctaaaaaatgatataacgaattaattatcagtcagataaatgaaggtgtggtgttgtaaatatcgttaaatcaaagaatgaaagcaattcccaactatgtcccataacgcgtgatctgtttcgtggtgttgtaaatatcgttaaatcaaagaatgaaagcaattcccaacaagttttcgagggtaaagccgaatatcttaggtgttgtaaatatcgttaaatcaaagaatgaaagcaattcccaacaggatataaggacgttagagcaaggtggtaggtgttgtaaatatcgttaaatcaaagaatgaaagcaattcccaacgcaaacaggtcgtggacaaatctattaataggtgttgtaaatatcgttaaatcaaagaatgaaagcaattcccaactacgggtaccggcatactgatctatgtccgggtgttgtaaatatcgttaaatcaaagaatgaaagcaattcccaactggtatcgcctcgatcaaacaaccaggagcggtgttgtaaatatcgttaaatcaaagaatgaaagcaattcccaacagcgcggcagacgacgacgatctaccattcggtgttgtaaatatcgttaaatcaaagaatgaaagcaattcccaacggtccggaatcggttcctttaaaccaaaacggtgttgtaaatatcgttaaatcaaagaatgaaagcaattcccaacgaataggtttattaatgtacgccaacttctggtgttgtaaatatcgttaaatcaaagaatgaaagcaattcccaacatggataaatatattaaataataaactatgggtgttgtaaatatcgttaaatcaaagaatgaaagcaattcccaactctgtaaagatacaactaggtaatggtattggtgttgtaaatatcgttaaatcaaagaatgaaagcaattcccaactgtatgccatatataataatattagaacaaggtgttgtaaatatcgttaaatcaaagaatgaaagcaattcccaacacgcgttttatagagggaaatggagtaaacggtgttgtaaatatcgttaaatcaaagaatgaaagcaattcccaacgttgtaggtttgtgtcattgttaaacgaaaggtgttgtaaatatcgttaaatcaaagaatgaaagcaattcccaactatttggggtaatgctttaattcagcaaggggtgttgtaaatatcgttaaatcaaagaatgaaagcaattcccaacatattaactgatgcatcacgacagtatatggtgttgtaaatatcgttaaatcaaagaatgaaagcaattcccaacaggtacaatgaaagtgattttgttgccctaggtgttgtaaatatcgttaaatcaaagaatgaaagcaattcccaacggtattaagtcaacagcagatttatgtaaaggtgttgtaaatatcgttaaatcaaagaatgaaagcaattcccaactgtttctccattcagtacgaagtatg

SEQ ID NO: 1319 - DNA, 17182 bp, synthetic construct
  misc_feature 1..17182: note = Synthetic
  source 1..17182: mol_type = other DNA
cacagtacgcacacagggcacaaggcccaccagggatattggagttagcgagcccacaaggagaacttacaatcccacataccaacgcccaacatcgacctcgggcggcgaatacaacaggcccaccacgcggaatcagggtgaagtaaccaggagaggggggagccaatctggagtaacccccagccgcgattcacgtgcaacccaaacctacaataggccgagccgggtcaattcctcagggtcgggttcgtcctcttccacctcgggtagctatacacgctcaaggggcgattcgggttcaagctattccggctcatcgacccgtagtagtggcggttcatcggtatcctcgggttcagggtcgcattcatcgggctcctctggttcctcgggctcttcgggtgttactcgtacaagacggtaatcacgaaccaggcgatgctgttttctggatgtcctaaggggtatatccaggcgggttaaatgctgttgttgaatagtttaaatttgtatctatgaagagattcttttgcgctatcattatagcctcctttgctagccaatttgtatttgcccagggagctgccgatgggctacgttactcccaaacctttagcgggggtactgcccggtttgttagcatggggggggcgtttggagccctcgggggcgattttggggccctcagctacaacccggcaggcttgggcgtttaccggacctcggagttcaccattacaccatccttcaaaagcagaaatattagttcggcgtataatggggagaccaaggaggactcgcgtacccgcatgtacttcgacaatgtagggtttgtcctctctttcaaaccctacaagtcggaggagacgggcctggtcaatttcaacatgggtttcgggtacaaccggaacaacgatttctactccaattccatggccgagggcaataatcagagcaattcgataatggactacttcgaaacccgggcgaatgccaccaacatctactttaacgatttgtacgagagcagtaagcccttccagaacagcaaccttaacggctactgggatgtaataatggcctggaacaccctgctgctctacgacacgctacccggtacaaacggtcggaagtactactcggccctgccctttgccgacgacaaggttcgccagaagaatgtgatcgaaaccaaaggctcatcgggggagttcgtgatgtcatgcgccaccaacatctccaataagttctacctgggggcttcgttgggaataagtagcttcgactactgctatacatcaacctacagcgaggatgcgttcgaaaccaatggtagctggggcaacggcgataggttctactactccgactatatccagaagctcgacattgccggcaccgggtacacgttcaaggttggggggatatttaaacccattgatgggttgcggattggcgcggccattcatactcccacctactactcgttcgaggatacctactcctacacaatgaaatcgaattttgactacttcgagaatggggctgttaacgaggtcaatttcacctgttcaaccccaattggcaagtacaagtatcattttgaaaccccgttcagggccataggcagcatcgcctatacttttcacgataagggtcttatcagcgtcgattttgagcacctcgactactcgaccatgcggttcagagacgggggaaacggggacgatttcagcgacgtgaacgccgatgctagtagtatttataagggagtaaacaacatacgggttgggggcgaggtaaaggtgggcgattttgccctccgggcagggtacggtttttacccatcgccctacaagagtggctacattaacgataaggcaaaaaccaaccagttctcggggggtattgggtaccgatcgggtaattttgtaatcgatgcggcttacctgttgaccaagcggagcgaggagtacatattttacgacttcccgggagtgaatacggtgaaaaccgacatgtccgaaggaaagtttctagttacgctgggtttcaagttttagtttgttgagtttctgttttggggagagcctgcccggttgaaccgggtgggctttttcattttcggtttattgaaacccatgcccctggttaggaggtagcaatgctttcccttaggatgtttgctgcatttaacccttcgttgaacagcaggtcgataatgctgaggttcggcgtgaacccgaaccgctcgccgaacacctggaagtattgggccggtttgaaaccggggtccgtgagggcaaagctgcccttggggtggatggagtcccgcagatcatcggtgtcggcgggatatgttctcaaaaagttgctggttaaataaatgtttggggtaatacccataaagcgggtaagggagttaagcatcgcgttgttgaattctagcagggaggcaaaccggccgtaaaagaaggggtgaatctcatcggccacaaaatcccagtaggccgaggtccgataggccgactcgatggccttccagtgattcttttgccagctggtggagtagtcaatctcaacattcttaatattggtatggttcccgtggggtcgtaccaccgggatcgaaagtggcaaccggccattggcgcttagtatttcgcatcggttacggtagctctgcttggtgtaggtttcgtccgattcgatgaatattgccgggtattcaacaagcttgcaaaaatactgcacaggcgggaggtaggccgtggataggattaccgatcgttgtgaattcatgcaaatgcgggttttggttatatccccgggaaaaaaattgacaaaaccctctaactaataaaggttttgatattcgtactagtgctactgcggagcagattctgttcgagttctggctgatcagcatttagtggattgtcctaaacatccggttccacctgatgttggaggggaaacgcttgtccttgtcgagcgatagccatacgaataccgccttgcccaccacgtgatcctcgggcacaaacccccagaaacgcccatcggcggagttatggcggttatcgcccatcataaagtagtagtccatcttaaaggtgtagctggtggctggttggccgtttatcaggatggtgctgtccttaacctgcaggtcgttgttctcgtaaaggtcaattatgcgctggtaaaggggcaggttctccaacgtcagcggtacggttgcccctttccttggaatccagagtgggccgaaattatcctcggtccaggggaagttggggctgtgggggaaaataaccctcgacatcatcgaggcgttagtgttctcgtcgcggatgatggtttgcacgttgttaaagcccttaattttgtcgtaggcatcctgggtaaggggtatccggtagaatcccccggcgggattgtagttctggtcggctttggcaatcccaagcgactcgaggtgcactttgttaatgggagtgccgttggtttttaccatgtagttgtactgaacctttccgatcttctcctgctccttgccattcacgtagagctgcccgtgcttcacggttatggtgtcgcccgggaggccaacgcaccgcttaatgtagttctcgcgcttgtcaaccgggcgggtgattacatcgaaatttttccagatgtaatccctcccgtaggcccggcaaaggctgtagtaactcgagttctgatcctggagcaccaccgtatcgccctcggggaagttgaataccaccacgtcgtttcgcttaatgcggcccaggccggcaatgcgcttgtagggccagcggggccactcgataaacgatttggtatcctttgtgaaggggagggtgtggtgaacaaaggggaaagcaatgggcgtgttaggcatcttgggcccgtagctgaccttgcttacgaacaggtaatcgcccaccagcaggcttttctccattgatgaggtggggatggtataggcctcaatgaaaaacatgcggattagggttgccgcaatcacggcgaatattatggcatcgacccactcaataattacgctcttctttttctggtcgcgctttttccagaaggtccagttcaccttgcgtgtgatgtagaaatcgaaaacgatgggaagacccagcagcagccagaagttccggatccagattacccaaaggatgtaaattactgccgcaaagccaaaccggaagtacttgttcgacaggattgatcgtaccttattcattgtggttttattttgtttctactataacttgagcaaatcgtccatgccgtaaaagcctgttttcccgacaatgaactcggcggccagcacggctcccagcgcaaaacccctacggctcttggcaacatgcgttagcacgagctgatcctgctccgagtcgagggttacaacgtgagtcccggggacagagccctccctgatggcctcgatggggattttccccttctcggtgtggggcataagtgtccatccgctcagggtgcctatattgctgctgattaagttggccagggttattgccgtgccgcttggggcgtcgagtttctgggtgtggtgtatttccttaatggtaacgttatagccctcaatgccattcaggtactgcgccaactgctggtttaccttaaagaagaggtttacccctatgctgtagttcgacgcgtagaaaagggtgcctttgccggaccttgccaaatcctccagcggtttcagctggtcgagccacccggtggtgccggtaaccaccggtacgccggccgccatgcaggccgatacgtttgcgtaggcggtctggggcgtagtgaactctatagccacatcgatctgttgcaggttgcctacgcagagctcatggctgttatccttgtcgattttcagctcaatggtgtggccccgcccgagggcaactgcctcgatctcgtgccccattttcccgtagccaattagtccgatgcgcatataccgttcaaaaagttttcgaaagtacgtaatccttaccaatacgcaaaaggtcggggtactttattaaacttttttaacgtaacaacctaatgggtagccgtttacccccgaagtagggtagcgctgcggatgtggttccgcatggcggggcccaaacccatacccgggaaaaccggctatcctgaattgaatggctttttggcccctctgctccattgaatcgttctaaattaccccggctaggctacaaaatgttattaaacatgatttttgtcatatattggggctgcgttaacttctatatttaaccatgaaaatcaaacccttaagaaataataaattgttaaatcagtaacaatgttatttcaataacaaaacctaatactaacagattaattttaggagatctaaacatgccagaagtaaaagaattagtaaaaggtcttgccgataagcatgggagaaccagggagagcctgatccccattttgcaaggcgttgttcaacaggagcgttacatctcaggggaggccatgacagagattgcccgcgagctcgacatctctgcggcccaggtgtacggaaccgccacgttttactccttcctcgacacgcagccccggggcaaatacgtaatccgggtttgccgcaccatatcgtgcgccatgaaggggaaaaacctgattgtccaggagctggaggacctcttaaaggtaaaattaggcgaaaccacgcagaacaagaagttctccctgctcgaaaccaattgcctcggctggtgccacaagggccctgccatgctaattaacgatgaggcctacaccgagcttacccccgagaaggtacgtgatattattaacgagtacatgaaaaagtaaacgaaaggagataagaacatggcatatagcaatttaaaacgcgttgatctcattttcgaccaggactgcaacctcaaagaggtgcttaagtcaacctttgagaaaacgaacgatcaaatagtaaacgagctcctcgagtcgggcttgaagggcaggggcggagccgggttccccaccgcgctcaaatggaagtacaccggcgagcaggccgatcccgataagtacgtggtgtgtaatgccgacgagggcgagccgggcacattcaaggatcgcgaaatccttttcaaggtgcccatgaaggtattcggcggcatggccatctgcggaaaggtaataggcgccaaggagggatttgtttacctgcgcggcgagtaccgcttcctccttcccgagctacagaagcagctcgatgccttccacgctgttattaaggagttagggtccaatttcaggataaaaatcatactgggtagtggtgcgtacatctgtggggaggaaagcgccctgttcgagtcgatggagggcgaccgcggtgagccccgtaacaaacctccgtaccccaccatttcgggtttccgcaagaagccaaccgtgattaataacgtggagacccttgtgtatgccttcatgatcagcaagcacggcgcacgcaagttcaaggagctgggaacggccgactcccggggatcgaaggtgttctccatctcgggcgatacgcccaaggcgggtatatacgagctggagctggggatgaccgttgagcagttcgtcgaggagtttggcgatggcgacactaaggccgtccaggtagggggtgcttcgggtttctgcgttccccggaagaaattcaaggacaccataataggatttgagggggttcccaccggggggtccatgatgctgttcaacagttcccggtccatgtacaacgtgcttcataactacctggagtttttcgaggaggagtcgtgcgggcaatgcaccccttgccgcgtcggctgccagcagctgaagctgggcatcgaggcggtgaagaagggcgagcgccatgcagcctacctcgagtcgttacagaagctggcccaaaccatgaagattaccgccaagtgcggcctggggcagagcgtggcaaactcattcttctcaatcgtcgagaacttcaaggaggaaatgatttactaagttgttaacgttaatcaatcgaaaaaatggctaaaaagataaatctcaagatagatggcattgcggtaaccgttgacgaagggacaaccatcctgcaagccgccaagcagctgaatattcatatccccacgctttgctaccacgacgacctgtgcatcgccgggaactgccgcgtgtgcgttgtcgagatgaagggctccagaaccctgcccgcctcgtgcgccatgccggccgccgagggcatggagatcatgaccaacaccattaaggtgcgtaccgcgcgcaagcacattatcgacctgctcttgtcggagcacaacgcgaagtgcaccacctgctacaagaacgggaactgtgagctgcaaaacctggccgccgagtacaagatttcctcccccatgttcatcgacctggtgccccacaagaactaccagatggacgcctactccccctcaatcattaaggacgacagcaagtgtatccgctgccagcgttgcgttagaacgtgcgaggagttgcagcatgttagcgccctgggcgttgcctacaagggcgacaagatgaaaatttcgaccttcttcgagaaccccatgttcgaagtggtttgcaccaactgcgggcagtgcgttaaccgttgccctaccggggcgttggttgagcgcaactacgttgaggaggtttgggatgccatatacaaccccgacaagcatgttgtggtgcaaacagcccccgccgttcgcgtggccctgggcgaggatcttggccttgaggctggtgagatagttacgggcaagatggtatcggccctgaagcgtttgggcttcgactcggtgctcgacaccgattttaccgccgacctgaccatcatggaggagggatttgagctgctcacccgcctgaagaaggccctggttgagaaggatgcgaatgttaagctgcccatggccaccagctgctcgcccgggtggatcaagttcatagagcatacctaccccgagtatttaggcaacttgtcaacctgcaagtcgccacagcagatgtttggcgccctggcaaaaacctactacgcccagaagcgtaacctcgacccggccaaggtagtgtcggtttccatcatgccatgtacagccaagaaatttgaggccgataggcccgagatgcgctcaagcggctttaaggatgttgactacgtgctcaccacccgcgagctggccataatgattaagcaggccggattggacttccaaacccttccggaggcgcattacgacagcattatgggcgaatcgacaggggctgcggtcatattcggcgcaaccggtggggtgatggaggccgccctgcgtaccgcctacgaggtggttactggccgcgaggtgccattcgatggcctgaatatcacccccgttcgtggcatggagggcgtgcgcgaggccgccgtgaagatagagaacaccaagcccgagtggaaattcctcgacggggccgtgctcaaaaccgtggttgcccacgggctaacgaatgccaagaaggttatggacaaggtccgcgacggggaggccgactggcatttcatcgagattatggcctgcccgggtggctgcttgggtggcgggggtcaacccatccccaccaatgcggagatccgcaggaaacgggccgaggccatttaccgcgaggatgccggcatgaaaatccggaaatcgcacgagaaccccgaggtcatcgccatctacaaggagttcctgcacgagccgctgggccacaaatcgcacgagttgctgcacacccattacaaggaaaggcagcgttactaaacggttgcaaaacctactggggaaaggatgccaacgcatcctttccttttttatttgggttgatgggttttggccgacttcggctaacttttttcgggtaatctttttttactttgaaaattattctacctttgcaatccgaaaaaatgcaaaaagcattttaacacgttgataatcaaaaggagtaaaaaatataaaagcattatgccatgaaaagaacgttccagccctccaaccggaagagaaaaaataaacacgggttccgcgagcgtatgtcaactcacaacgggcgaagagtgctcgctgcccgtcgcgcaaagggaagaaaaaaactgaccgtatcggacgaattcccccacaagaggtagttactacaccgcaatacaaagcgaaaccgttttagccttggagccaaagcggtttcgcttttttgccccaaacggtatccggtagggaaaccccatggcaaattctaccccgattccgagcaatcatcccctggcatcctctgccacgatttctgccgaagccattacaaccatcaattgcccaacccggcctttcactactgcccgattaggttaacgtggggtcgagtcaatggttctatcatcatgcgtttcgttgccccggattcgggccggggtttaccctaattttcggcgggtcaaaaatacgggttataaccctacaacagtctccaatagcatatatccccagcctcaagtacggggcaacgtaatcccgtcatttctcaactttaccgggcggtattgaaagccttattagggtattggccccgtttttttggggcttaaacaagccccgggctggataatcagacgaaatattttatacttttagggtgagaaagtgaaacaaaaaaaggcgagttgccccgccttaaatgttttcacaacggaataatccttattgtgaattgcttcagattgtggaacaaatatacagtataatactctaaatacaaaaatattatgggaaagattttaggactcgacttaggaaccaactctataggttgggcattagtatctaccgatgaaaatgggaaaccctgcaaaattgacggattaggtagtaggatcattccaatgagccaggatattctgggcgaattcgacaggggcaactctatctctcaaactgccgagaggacaggatatagaagcacccggaggcttcgggagcgttatttacttcgcagggaacggcttcaccgagtgctaaatttgataggctttttgccaaaacactatgctgatgaaattgattttgaaaaacgtctaggaaaatttaaagcggagaaggagccaaaattagcatacaacaataaaaacttcatatttcagacatcattcaatgagatgctcgaagatttcaggcaacatcaaccgcaacttgtaaccgatgggaaaaagataccctacgattggactatatactatctgcgcaaaaaagccctttcgcaaaggatcgaaaaggaggagttggcttggatcattttgaatttcaaccagaaacgtgggtattaccagttacgtggcgaggaggaagagaacccgaacaaattagttgaatttcattcactaaaagtggttaatgtagttgctgacgaaaagcccaatcaaaaaggagagacgtggtattcattgtacctagaaaatggttgggtttaccgtagatccagtaaaattcctttagacaattggttgggaaaaactcgtgattttattgtaacagcagagcttaacgatgatggtacccttaaaaaagataaggaaggtaacgaaaaaaggagttttcgagcccccgatgtgaatgactggactctaattaagaagaaaactgaacaagaaattgtaagccttaacaagacagttggaacttatatttacgacacgctgcttaaaaaccccaatcaaaaaattaaagggaagttggtcagaacggtcgaaaggaaattttataaggaggagctaagggcaattttaacaactcagaagcaatttcaccccgaattgcagaacgaggatttgtataacgattgtgtaagagaactttaccgaaataacgatgcccagcaattacaactgagcaaaaaggattttgttcacctcattttagaggatataattttctaccaaaggcctttaaaaagccaaaaatctaccatcgggcattgttcgctggaatatcgaatctatagagacgagaaaggtaacatccaaaaggagtatctaaaagcaattccaaaatctaatccttggtaccaggagtttagggtttggcagtggttgcacaacctcaaaatttttctaaaggaaaacgaaaaggatgttaccgagcaatttttaacctgccctgaagatttcgaacgacttttcgattttctgatgagccagaaagacgtcgatcacaaggcagttatcaaatttttactcgaaccaaagggtttaaaagggaaaaccttgaacacagagattgggaaatactgttggaactatgtttacgactcggtaaaagatgagtcgaaaagttacccttgtaacgaaacaggttacgagattcgcagaagactggctaaggttgataatttaccttcagattttttaacgcaacaaagggaatacgagctatggcacatcatttactcggttaccgataaaaccgaatacgagaaagcgctcaaatcttttgccactaagaaccgcatagacgaaacttcgtttgtggagaatttcagaaagtttcctccatttaaaagcgaatacggagccttctccgaaaaagccataagaaaattacttcccttaatgcgggtaggaaagtattgggattggaatttaattgacccaaaaacccagagtcggattagcaagataattactggagaatacgatgaagatattaagaatcgcgttcgcgaaaaggccataaaccttaagcaagaaatagattttcaaggactacagctatggttagcgcagtatattgtttatgatcgccattccgaggccagcattgctggtaaatgggactcggttgacgacctagacctgtacctgaaagaattcaagcagcactcgctgcgcaaccccattgttgagcaggttgttttggaaaccttgcgtgtagtgagagacatttgggttaaacatggaaatggtgcaaaagactttttcaatgaaattcatgttgagctggggcgtgaaatgaaaaataccgccgaggaacgcaagcgattaaccgaacaggttacagctaacgagaacacaaaccttcgtataaaagccttaattgccgagcttaaggagaactcggatgggactctttatgttgagaatgttcgcccttactcgcccatccagcaggaagcgcttaagatattcgaggaaggcgtgctgaattctgacgtggaaattcccgatgaaattctgaaaatcagcaaaacagcacagcccaccaaatcggagcttcaacgctacaaattatggttggagcagaaataccgctcgccatataccggcgaaattattccgcttggcaaactctttacggcggagtacgagattgagcacattatcccgcagagtcgcttctttgacgatggaatgagcaataaggttatctgcgaagccgccgtgaataaacttaagggcaatcagctgggcctcgaatttataaagaaccatcatggcgagattgtggaggctgggcttgaccgcaaggtgaggatatttagcgaggaggattacactaagtttgtgaaggaaaattttgccaaaaacagagccaagcgtaacaaacttttgcttgaggaaattcccgagaaaatgattgaacgtcagctcaacgatacccgctacattagtaaatttatcgcaaatgtactatcaaacatagttcgggccaatgaaaatgatgatgggataaactcaaaaaacttagtgccattaaatgggagtattactgccgttttacgtcaggattgggggctggagggtgtttggaacgatttgattttaccccgtttcgagcgattgaaccagcttaagaaatgcgagggtttcaccttcagaaacacaagtaacaagtccattcctaccgttcctctcgaattatcaaagggttttcaaaaaaaacgtatcgaccatcgccatcatgctctcgatgcattggtgattgcctgtgcaaccagagatcatgttaacctcctaaacaacaagaatgcaaactcaaaagagcaacggtacgaccttaaccgtaaactcagaaaatacgagaagaaagtttataccgatccaaaaacaggagaaagggtagagcgggaagtcccatcggagttcttaaagccttgggctaccttcacgaaggatgccaaggatgcaatagcaacggttgtggttagcttcaagcagaatctacgcgtaatcaataaaaccaccaataagtatgagaaaattgttgagaggaatggcaaaaaagtcaaagaattagttcctcaagttaagggagatagctgggctattagaaaatccatgcataaagatactgtgtctggtgaggtaatactcccgtgggttaaagtttccaaggacaaagtgctaacagcaacacgaaaaagtattgatacatcctttgatctaaaaacaattgaatcgatcactgatactgggatcaggaagatattaaataattatctctctagcaaaggcaacaaccctgaattagcgttttccccagaaggaattgaggaaatgaacaggaacattgagcaatacaatgaagggagaaaacacaagcctatctataaagcaagaatctttgaggagggtagcaaatttcctttagggcaaaccggaaataaaaaaacgaaatttgttgaagccgcaaaagggacaaaccttttttttgcaatttatcaaaacgataaaggcgagcgtagctacgaaactataccattaaacattgtaattgaaaggcaaaagcaagggttaagctccgttcccgaatacaacaagaagggtgataaattgctatttcatctttcacccaatgatttggtttacgtaccctcacatgacgaactattgagccccaaccccgcaaatctaaaaaccattggcgaagagcaggcaatgagggtttataaaatggttagctgcaccggatcgcaatgtatgtttgttcgaaacgatgtggccaatcccattgtgaataaggaagaattttcgccactaaacaagatggagaaatctattgaaggggtaatgataaaggattcatgttggaagatcaaggttgacaggcttggaaatattattgcagtaaacgataaacttttggtttagcgttacaaacagcagccctgacagggttttaaccctgtcagagttttcaacgaagtaataatttcgaaaacatatgccaaattctagggatataccattggaacacggctgttactaccacatatacaaccgcggcgttaacggcaccccgttgttctatatccctgggaactacgcgcatttccttaggctttacaataaatacatcaccccaattgccgatacttacgtatggtgcctaatgggcaaccatttccacctgctggtgaggataaaggaggagggcgagattaatattaattccttaccgaaccctgtcagggttctgaaccttgacagggttaacgccaataaaaccattaaacccccacatctctacttttcgcacctttttaattcgtacacccaggcaatcaacaagcaggagaagcggacaggttcacttttcgaacgacccttccatcgcctaaaaataacctccgagaagtatttccagaacctcgttgtttacatccaccagaaccccgttcaccatggctttaccgacgatttcagggattacccctggtcgtcgtatggtagtattatctccactaagcccactaaagttgatagagaaactgtgctggagtggttcggtggtaaggagaattttatttttgttcatcgaaaaatagttgaccctgatatggttcaaggaatttagctttccttaccctgacagggttttgaaccctgtcagggttgtaaacgaataacgtatgataaagcgcaccctttacttcggcaatccgacctaccttaaggccaaggatcagcaaatggtggttgagtatcccggtggcgactccgaaaccaaatcggttcccattgaggacatcggggtggttgtactcgactctccgcaaattaccataactcacgttttgctgagtaaactgcttgccaacaataccgccataattactaccgacgagcggcacatgccccacggtttactcatgcccctggagtctaacacgctgcaaagcgagcggttcagggatcagctcgaagccagcctgccgctacggaagcagctgtggcagcagaccgtgcaggccaaaattgccaaccaggcctggctgctcggcagcctgggcgtcgatgtggagcccatgcgctacttccagcgcagcgtccgcagcggcgatcccgacaactacgaggggcgcgccgccgcgttctactggggcaacctgttcgaggggctcaccgacgacgatttcgtgcggggccggtacgagaaggagcccaacaacctgcttaactacggctacgccgtgctacgggccacggtggcccgcagcctggtgggctcggggctgctgcccacgctgggaatccaccaccacaaccgctacaacgctttctgcctggccgacgacatcatggagccctaccgtccctttgtcgatcgggtggttcacggcatggtgcacgagttcgacgactgctcggtgctcaccagggacataaaggcccgtttgctcgccatccccgccatggatgtggtgatcgacgggcagcgaagccccctgatgctggctacccagcgcacctcggcctcgctgtacgactgcttccagggggtaagccggcgaattatataccctatattcgagtagccaccaggggaccctgctgctacccatagcggtgggtatggccgaaggcactacccccttgagggggcaggggggtaatgcaaccggcggaggtatggccaccgggggattggcctccctgggcaaaaaacaaaccctcaaaaccagaatggttcatggggatacatcgttatactatttccacgaacatccgatgggagcggggaatggtttttggggagtgcggttcaaagaggaaagcgggaggggatcgtccgccgtgagggcctcacccccttaatccccctcgagggggacaaggccacccaccatcgccgtgaatacggccaatggcattgccccccttgaggggggcaggggggtgaggtaataagaggaagggttgatgcaagagaattggcctctttgggtgaaaagccatgcattcaagttaatggataaacagaatataaattggattatagtgctatatgcttttttcagcagacgctattttcatcatcgtacttcgtggtctatatacgccctttggttccctcggggttacgctccacttgtacaacaccctggtatcgatttggataggatatgaccacgtttaaccgactaaaccagtaccgtgttatgtggatactcgtgttcttcgacctgcccacggagacgaagaaggagcggaaggagtacgcccgcttccgcaaggagctcatcaaggatgggttcagcatgttccagttcagcatctacacccgctgctgccccagccgcgagaacgccgaggtgcatataaaaagggtgaaaaagctgctccccccgcaggggtacgtgggcatcctctgcatcaccgacaaacagttcggcagcatggagctgttccactccaccaagcccatcgccgtgcagcccgagccccagcagctcgagctgttctagggcgctaccctgggcctagggggcgacccatcaatactgccgctgcccgtaccgggctaccacccgtgggaataagaaaaccacagcgaccgatcgccgtggttcccccaccagacgtttttttccgattccaactcctttgttaaatacctcgctaccagaagatagggctcacctatgctgtgtccggtatgtcaaagatacaatctgaaagcaattcacaaccaagggggggaggataaaaaagcgtaaattgctgtgtccggtatgtcaaagatacaatctgaaaccaaataaaaaatattcatcaaaaaagacaccaata

SEQ ID NO: 1320 - DNA, 17116 bp, synthetic construct
  misc_feature 1..17116: note = Synthetic
  source 1..17116: mol_type = other DNA
gaagatcctgaatggcctcctgaatctttaagtttgctgctccaagcctgccttcctttagggcttgactcatttcccaagtggtcttttcaaagtggacaaaatgggtttcctcagtttctgttagttccgtatccaggaatagcaggttaagctcctctatagcatccattttggttttcatttcataccgactgagtctgttggggctttccacaagttcctgaatctggtggagttcggcagaaaggcggagaatgtaactctccgccaaaagtctgtcctcatagatagattcaaaggctgttttcagttttcgggaattggcccgctcgtttaggttattcaataaaaccaaaatcaagactcccatcaggagaagcgatacgcccagtttatttgggatgcgataagtccatttcatagtttggagaattgaagggataattctttggattaagatttcacctcagatacttcattggaaaccttcaggattttaagttttttttgtcctcctggtaggacccaatcgatcagcattccttctttgaatccgataagtgcgacacctaatgggctgaggatggaaattttttgcttgcttatatcagcagattttggcaaaaccaggcgcagttgaaaggttttttgcgaagaaacatccatcacttcaaaataggaattgagtcggatgatgtcattttccatatcttcatcggatacccgaagggaagaattcagttcgctttggagttgcccgatctctttgcttcgctgggaatggggcagatcttggatgagggaatagatggttttataatcagtttcagaaatgatcggtctcatggtatttgggaataaatagattttcactacctggggaaatcaggaagtgagtaactggaaagaagtttgggtgtaatgccctccgtttaagaacccaacggagggttaaccgataaaggctttgctgtgagataccagcattccccacactgtccggcagaatctgccctcagcgaccaaaaagtcaatgtaggagaagtggaaagaggtgatcatagttaaacctaaagtaggcaaagtattcgcaatcgacaaccctttgacaaattggataactgaaaggttccaattagagaatttatcagacttagggacttgctggctatttcggggaaatcattgattctgtccagtgaggttatcaaactttcaagtttggtttatgattaggatagttaaaagccccaaaatcccaagcctgagcagtaattttggaacggaagtaattgccaattttagattccatccagtacccaaaagaggtaaaaaatctattcatgaatcttaggacaatttgaagataggcatgacatgctgttttcgaaatcggcctgcatcctgtgccgtgaaagttatttagcactaaaccaatccataccatcggggttcataaggccgggtatttctttgatcactgtcatcgtgttggtgtcaatcacaacaagcttgttgccggcgctaactgtatagtaggctcggggacgtaccggatcgatgaagattccttcaccaccggcacccacatcaatccgcttgacctccttccgggaagccacgtcccagacccgtagttcattgccctgcagctcattcatcaaaacgtatttaccgtcgcttgtaaactttatccgattgttcaatccgccttcaaatgaaatggtgttgatcagttttttttcaggcacattgatgatcgatattttcttggcattcatgtgcaaggcccaaaactccttcccgtcgggtgaaagtgccatgccttccatacgggtgtcgccgggaaaagtagtgaacaccaaatttttccggcctctttcattggttacccgatcgataatggcaatcacttggccattgctgctagcggtaaagatctgctgttcatcgggagtgacgaggagcatgtgcgatccaccggggagtccgatgatctcgtcaaacttctttgttgccggatcatagcgtgagatcaggcggttggtttcgtggcccacataaaggtgactgcctgcaaatgtaatagcatgacggtcgccaaatgcgctgatgtcaatgggctccacgcgcttttgcgcaatcgcatccacaaccgtgattccgggaagattggatccgatgtacacataccgcccatcggtcgccaattcatgaagatttcctccagctggaatacgagccaccacttcaagagtttctggatcgatgatcaccagacggcccgcatctttttcccccaccagcaaggcctccttgggtgtaggaccaaagctcactaccggggaatcagggtcgactgcctggcttttcgcctgggcaagcaatggctgataaccaagaatgaaaagggtgatcaggagcagaaaaaggtaaccagtgtttttcatgacaggattttggaaagcagtagttaggaaaactgcctccaggaattgtcctgtgctgtcttgaatcttagggaggaatcggtgatcagtcgcagtgtttagtctggtcaaggaatattgggctaggttgcggtgtgggcaaatcccacccagcgtcagtattaccagtgatcctcagctgttttatttcccaggtgccagaggaattcaattttttcatacacaaaggatatttcttcggtacgttcatatcttttgagttcagggtttttgttgttcagcatggcactttttattcccacaattcttgcattggttaaggtgatgctgtacgtaagcacttccactccctggccaccagctgttccaatcttgtttgcgctgaaatttttcagttctaccgtggttagcagttcattgtcaattaatgcctggaaaagaccggtggtgctctgatcaatttccttggatacaatcaagggctgatgctgtcttttacctgtagccaatccgctcgacgaatcgtaaggcgacagaatttcgtggttgtaggcaataatttcaatccatccctccttgtatctctggatacacccacctttgatttgcccctgtttttgtccttttactacgaggtaactgttaagtgccataaaagatcttttctaattaagatataaaaggagtcctcaaaaaaagaattatttcacatattaatttctcaatttttaattctccgtactctaggttaggttgtttttgtagtgctaagattatcagaagcctctcaatcgaatcatgagacaattactcccaaagggggaatactcgtgatttcaattacacaatccccaaataaacagaatcggatagggccctttttttagtccaaggattttcctgactgaaagcgatccatgcatgaaactgggtatttaaataggtgctttgcaaagccaaaacatgctttccagtggctcttgcgcatcccaaaaactcccattccgatccacctcctgtagtagaatgcaagaaaacaaaaacttggtctgtaggcttagcagagccctgccatgaattgtcggcccaactgaattccactccctccggtatgcgttttaccgtaggtgcttgtggacctaggagagttccccggctgaccttcaccaagccgatgtctaatacttttgaatccccttcgaatttgaagcagtttttggaagtataggaaaccgccgcatgatagggcctgcttgctccatctgtgtgggtttgatagccaaaccggaggatttgggagatgtttcttaggaaagcatgagtttgactcatcaccgattgggagcggcgtttggcaggagatgtcttcgctttagtggtagtactttgctttccgggttttcggcggctgtaggtttttccgtctattttatagaagaccaattccccgatgcttcctgacaatccctccagtaatgagttggttatccttgccataggcttactatttggtttacagggaaatataaataaataaagtaaaaactacttcataaattagtttgaaattttttataaaacttcttaagacaactcatcaagcattgtgaaattgtttttataatgattttaaatagatgtaagattggtcatactatagatatagagatactgggttgaacttttgtgtggttggtatataaacgaggcatctactctgaaatgaggaatccattaggcttcaatggtctcgtattcggcggccaatgtttcggcaaagtctttaacctcatcccgatagtggcattttagcacagcgagtttgtgtccaaacagtccaaaaaaagagacgagctgatagtcggtgaattgatccatcagatatagattttttggatcggtagtgccattgataaaaaatgtaaaattcgatttctctggaatgtgtagttttctgtttattctaaacctcagttcgaattgaaaatattctcctttgtcgagtcgcttgatgaccagttgaggtcgttcatctcggatggaataattgcgtatccaatcccgtttcggcttcccacgaagataattcagaccatgggtataataatagtagatgtatttttgtgacgcgataagttgctttgcctcatgccaaagttccagtagctggcttcctttttccttttcctctgcattttgagagaattgtctccaccagtttcttgattcaaccggtgccagtttgcgcatgcagaagcagatcgcattcagttgttgttggacaggagtaatatttattgaatggatatcattctcgctgagcaaaatcgaaatgttggattttatccgttgcttgtttttggttggaacacctagaaaaggaatcagaaacgggtagtggttggagtgaatcgaggacaactgaacatcggccaaaaagtatcctaaagctaaatcattggaaggaagttcatccgtcaaaattggttcggagggtttcctttcatgatgatctttgcttataaaccattcgatcaatttatcgccgggcttataaaagtggggatactggggttttaactcaatatccaatccctgacgatcattgtaaattttgaggaatttgcttttgccggtttggggatcgaagaaatccggccaatagtatttcttgaagcatttgctgcttctaaagtcaagcaaggagagaagtccaaaataggcataccgacttaggtagcccgaatccgtgtccacattgcaactgaccaggagttcgtgttgtgtaactttcaggtaaaccaacttttccggctcattttccagcttgacacccagcatgagtatctcatttcggaactggatattccaaaccttgatgctgtagaagtaatgcggttttcggaattctgagtgcaggttgagcgtttgttcagtaagctcaaaagtgcctttttcgaagggcaggcgataaaaacttttaatgtcaggcgtttggcttgcttttttcatcgtttcagtcgttttcggttcggagattaaaattggggacctcagccgccattgcttccatcttggtggcgcacattgtcttggtcaactcaaatagggcggaggcttttttgtagagtttttcggcgtcattctgagcaacctggaagtctggcgcgtaccgtgcctgtccatagctgctggttaggaggctaaacagctttttgtcctcaggccgatctccgatcgtcagttcgatagggatttcagaaaaacaccgggtcaaccccaacaggcggtggaggttgtgaaactcggagcggtagtcgatatggactcggatcagaagaatacaggcctgctccactgcctggtggattaggaaggtagctatgttatactgtccctttttgagactgcaatgcgctgactccaaaaatcctcgggccaagtctgtcctgtggaaaaaatgcctttccgctttcgcgagcgtcttagcatgatcaatcgagggtttgaagtcgaggtcaaagaaaccgtctttggtatagagtggctttccatgagcaagaacggtagagaagaagcggtttttggattcgattccttcctggacggcagcttctccgtggcataggatggtgatctgcccgttgtgatagtgggcattggcaaagtcctgcacctcatattctatacgggcggaagattcagtgcagacgagtaagcaatggtgccgatgaatgacctgtttgttagcaaagcatcctgaaatttcattaaggagggtttgggttccaaaggagataatccgggtgggctggaatttttcgaccagcagctgcagaaagcctctgaagtgctctgcccggtcttgatcggttcttgagattttgacttgcatgggaatagcggttaaatgggagaatagcgaacaagaatcaggtagctggcttcgagcagctttttgaagcaggtgaagtcctccaagtatgctccttcatctccgtcaaaggtggaatctcggtaaaaggccatctcgcggaaccgattccagcgcttgatccatttcttcagggattgcttttggtaaaatgctttgataaaggccgaggggtcgaggatttcctcttggctcagatttttggggccgtattgcaggatttgaaggggaaggagggtttcggattcatttttgcatcgcttttgaatccaggagtcggccagatggctccagccaagcgacttcttttctatagcggggaattcctgcaggtggatgctggcatagataaccttgagtatcagttggccggagtagagcagggaatcaggcgaagtcttttcgaaatcaatctcatgattgaaaaccgcctcctgaattgttccgatttttttcagccaggaggagatgtccgtgacactttggaggacatagtttaaagtgacaaaggcctcgtattgatttttacatcggaaggccctgcggcaggatctgaatgtattttccattgttcgatcagtttggtgcggttgtctctccttacggagaaactatgagtccaaattcatgatcttcagtggggtatggtattctggagaggaatagcttagaaaggatttgggataaattattcttgcaaaggatgagttttggaaaatgccttaggcatgatcgattacctagccagccatggttggtgagcagagtcgtaccataatggctggaaaaaatgattgatcaagtatttttgcaaatgccgtaggcatggccgatataatgagcttgtattcagatttatcgaaccctctgagaaacctccatcgatcttttcgctgtgacttttttcttgataaaaaagtcaccatcccgtagccatcgggacaagtcagggataaaacaggagtttttgagctggaactgtggagtcgcaaaagtggggaactacgtttgagtttagtctttctagcactaaatatggttgggatgggcgcggtgggctgacgcagcagcgggccggcgttcggccttgtgcggtgggagctttgctgcgtcttgattttttcgttcttttttatcaagaaaaaagaacaaagaaaaaaagtgacctaaatgagcattggggcagtgtttagtgggtagaggcaatattcagcgctttcaagcgaaaaatgctgaaatagtggtgtttttataacagaaaatgttctttccggtgtggaggcgtctaaggaacttagatcttcccgactctcgtcggtcaggtgccgtaacgatgggcggaattacttcgtcggcttttagagctcctcgcaatgatggtcgaaaatctaagcatataggaatctttttaggatctgtaggagccagtttctcaggggcaaccagtcaaatgccgctcctgaaaaggttgagcaattttctttcttcgtccttttggcttgatccaaaaggaccaaaagatcaagatttgccaaagctcctaccgcacggggccgaacgctggctcgctggcaaatcctcccaccgcgcctataagattagtgttttgtgctaagctggtataattctaacgttacagtattttttgatgcctttaattgggtaagtgtcagtcaaacacttcgacttcccgactctcgtcggtcaggtgctcggtgtgacaggagtcgaggactctccaaacttcccaactctagttggggcagaagaatttgagacagcaaatgtccggaatcatgtgagcttgtttggataaaaccattcacctgaatatcttagtttagtcaattcggaggaatttcttaatttccccttataaacacttcacctatgagcgacaagatccaccatggcagaaacatcaagcgattccgggagatgatgggcatcaagcaggaggccctggcctttgagctgggggaggactggtcccagaagaaaatcagtctgctggagcaaaaggaagaagtggaagagaacctgattcgtcaggtggcggagatcttaaaagtgcctgccgaggcgattaagagttttgatgaagagcaggttgtgaatatcatttcaaatacttttaatgatcaatcaaatgggtacaattattacccgacttttaatattaatccatttgaaaaatgggttgaagcactggaagagaacaaaaaactttacgaacgattgttggaatcggagcgggagaagttggagatcttgaagaagattttagagaagtagaagttggccattttgttttaagagcctttccgaaagccggaaaggcttttttgttttttgggttcgaggaccgaattaatccatggcctttttcaacttatcatcgacttataaaaaggttttgacgtccacgcagattaatttcagtcgaaaagtgtcggagattgactaaaaatacccagtactgggtatttttatcaagttgccaaatgatatattgccatcgggtagttttgcctagggtacattctgatttcctagggacaaacggattatccaattgtaatgtcaagaaaaaaagatttggttacaggcagaaaagagtttctaaaagccatgggtttgggaggcgtatgcttaatcattcccagtgggccacgcaagcccgatttgattaccaactgctgtagtaccctctaaagctctacgaccactgcttatggggagggcaatactatgcttgggtaaaatgcctgatggaaatcagagtcggagatcaggtagagttgtagcgttttcccaatcaccggaatgatcgttttgccgtgagagtggagtggagcaactaatttctcggctacttaccggcctatcaaaacttcgtcctcgctaacctgctggatttggtggcaagacttaccgagatgatgccttataggaattctctccatgaagttgggataggctctggacggatatgatcgtcagcaagtcaaggctcaagcacggggctaagtgcccgggcagctgatgaagtggaggattggtgtagggggcgaaaaagaaaaggcgagttgccccgccttgaatgtttacacaacggaataatccttattgtgaattgcttttaaatcagtatcacaaagtagagagaaacaataaactttcaaaataatatgaaaaagattttaggactggatttggggactaactctattgggtgggcgttgatcgatcaggattttgaaaagaaagagggtaagatccttgggatgggaagtaggattattccaatgtcccaggatgtattgggtgagtttgacagaggtaactccgtatctcaaaccgctgaacgtactagattaagaagtgttaggcgtcttaaggaaaggcatctcttacgaagagagcgattacatcgagtgttgaatgtattgggatttttgccatcccattatgcttcgcagattgacttcgaaaagcgtctggggaagtttgttaatgaagcagagcccaaacttgcctattatccggtttggaatgcatccaaaaacaagaatgaatatgattttcttttcaaagaatccttccaggagatgctggaggaattccgtcaatttcagccccaactgctgatagacaagaaaggtgatgcggccttaattccctatgattggacaatcttttatctcaggaagaaggcgttgacccaaaaaatcaccaaaaaggagttggcctggataattctcaatttcaaccaaaaaagggggtatcaccagttgcgcggagaagaagaggatgaaaatccgaataagctgatagaatttcactcgctcaaaatagtggatgtattagctgacgaggctcaaaaagggaagtcagatatctggtattccttgatcttggaaaacggatgggtgtatagaaggtctagtaaaactcccttgattgattggaaaaataaggttagggatttcattgtcactactgatctcgaggaggatggtagcttcaaatccgacaaggaaggaaatgtaaaacgaagttttagagcgcctggggagaatgattggactttggtgaagaagaaaaccgagcaagagattgatcagtcagataagactgtgggggcctatatctacgattctttgctgcaaaaccccaagcagaaaattaaggggaaattggttcgcacaatagagcggaagttctataaaggtgaactcagacggattttggcaaagcaggcggagtttcattccgaattgcagagccaagatttttattatgactgtgtccgcgagctctatcgtaacaacgaggcgcatcagacaattttgggacataaggattttgttcacctgatcgtggaggatgtcatattttaccagcggccgttgagaagccaaaaatcatctattggaaattgttctttggaaaagaggcctatgaaagataagaaagggaatcctctaaaagatgccgatggtaagcaggtgttcaagcctttgaaagctactcccaaatcgaacccatactatcaggaatttcggatctggcaatggatttacaatttgtcgatttaccgaaaggatgaagatgtcaacgtcaccagtgatttcctcaacagcttgaaagattgggaaagtctgtttgaattcctaaatgacaaaaaggagatagaacagaaagttctgcttaaatatctgcttgaacaaaaaggattgaaagggaaattgctgaacgctgaagtggagaagtatcgctggaagtatgtggaggataagaaatatccctgtaatgagactagatctctgatcggggcgaagctggaaaaagtggatgggatccgggagggattcctgactagagagatagaacaacagctatggcatatcatctactccgtgacagataaagtagattatgagaaggctttaaagtcatttgcggtaaaaaatcaactggacgaaagctcttttgtagaggcatttaggaagtttccccctttcaaaagtgagtacggagcgttctctgaaaaggctattaagaagcttttacccctaatgagggcgggtaaattttggaatgaaaatgagatattacgggaatctcctgtttacttaaggaatattgagcggttacttcagaaattagaagagcaaaacagtaagatatcgagttcggggcaagaaatatggaataaggatatcaacaggaagctgtaccaagagcttggccagtttttggatggagatgtagctacatttcaaaacctaagacttcatatcgcatcctatcttgtgtacggacgccattcagaggctgctgaggtaggtaaatggaattctgtggacgaaatggagggatatcttcgagaatttagacaacactctcttcgcaatcctatcgtggagcaagtgatcacggagacattgcgagtggtgaaagatatctggtcaaagtatggagagggagccagagatttcttcagtgaaattcacgtagagctaggtagggaaatgaaaaataacgccgatgagcggaagcagatcaccaatcgaatgactgacaaagaaaataccaatttgcgaatcaaagcacttttggcggaattggcacaggacgtcgatgtcgaaaacgtacggccttattcgccaatgcagcaggagattctgaaggtttatgaggaaggggtacttaactcaaatgttgtgattgatgaagatattttgaaaataagtaaaacgccacagccttcaagctctgatcttcgaagatataagctttggcttgagcaaaaatattgttcaccctatacggggaaaattattcccctcaataggctatttactcctgagtacgaaatagagcacattattccgcagagcaggtattttgatgatagttttagcaacaaggtaatttgcgagactgctgtcaacaagctcaaggataaccaaatcggcctggaatttataaagaatcatcacggtcagatagttgaattgggaatgggtaagtctgtgaagatttttgaagtggcggcttatgaggaatttgttaaacagcaatatgccaaaaatcactcaaaacgtaataagctgttgatggatgaaattccagaaaagatgattgagcgacagctgaatgatacccggtatataagtaggtttataacgtctgtattatccaatattgtcagagaggagacaaacgatgatggcgttaactcaaagaacattatcccaggtaatggcaaaatcacggctgagctcaagcaagattggggattaaatgatgtttggaacgagttgatattacctaggtttgagcggatgaatctgcttactaattctccacatttcacgacgtggaatgagaatcatcagaagtttttgccaacagttcccctagagctatccaaaggtttttcaaagaaaagaattgaccatcgccatcacgcgatggatgctttggtcattgcctgtgctacgagagatcatattaaccttttgaataacctacatgctaaatcggcaagacggcatgacctaaataggaagcttagaaagtatgaaaaagttgcctatatcgatccaaagacgggtgaaagaattgaacgagaggttccgaaggaatttgttaaaccttggaaaagcttcactaccgaggcaaaagatgcattgataaatataattgtaagcttcaaacagaacctcagggtaataaatagagcaaacaacaagtatgaaaaatggacggaaaaggaaggcgttaaggttaaggagttgcattcacaaacgggtgggaactgggctattcgaaaaccgatgcacaaggataccgtttcagggcttgttaaattgaggggtgtgaaaagtgtttcgctaaatcaggcactggattttatcccggatgtagttgacaaggctttaagaaaagagttaaaaagattggcttcaattggattagataaaaagaatatttcaaaacatttaagagaggttgataacaagttcaatgggcatgatatttctaaagtagaaatctactattggatggaagacaatgtggcatccagagtattgctaaatgattcctttgatgaaaagagaattgaaacaataactgattccggtattcagaagatattgctgaaacatttggagatatatagaggcagagtggatgaaaaaggaaaggagattcctgcggagttgctagcattttcaccggaaggaatagaagaaatgaataagagtatacgggccttgaatggtggaaaaagtcatcagccaataatgaaagtccgtacatacgagccgaaaggcaataaatttgtagtgggccaaaaaggtaataaaggcagtaaatttgtcgaagcggctaaaggaactaacctatactttgctatttacgaggatgaaaataagaggagatcttatgagacagttcccttgaatattgtaatagagaggcaaaagcaaggtttaagtccagtgcctgaaagaaatgagaagggggatggtttgctgtttttcctttcaccaaacgatctagtatttgtatcaaaagaagaaggtggtgatttgcagaaggtgagccagtttgatcatagtgtagttgaagttgaaggaatttacaaagtggttagctttactgggaatagactctatggagttccctgccatgtggcaaaagctattgtggataaagttgaattatctcaactgaataagcttgaagttactttagatcgtaaatctctaaaagaaaactgtctaaagcttagtgtcgacaggctgggaagaattagtgggatagtgtctctttgattcatggagccctctaaatcttatcatctctataatcacgccaatagatcggaaaatattttccgggaagagggaaactataggtttttcctgggtcaatatggtaactaccaaggagatgtggtaaatacctatgcttattgtttgatactgaatcactttcattttttggtgggggtaaaggcgacagatctgtcaggttttcaaatcctgaaaggtctgattgaacattcctcaagaaatccggcgataaaggggggttcagacttttattattcctataccaaggcatttaacaagcgatttgggcggaatggaagtctgtttcaaagagcatttgccagaaagcctattttaagcggagagcaatggcaagagacatttctctatatccatcttaatcttatcaaacacggttttagggaatcaatggacggctggaaatggtcgagctggaaggcctataatggcatgaacaggtatctccataggagaggtcctataactggaatttcttcgacggcctgttccatgtgagagaaatgatggcggcaaaaagagaattgattttgagtaaggagtttgaataggttaatcctgataggttttcaaaacctttaaggattttattttctaaaatttcatgatcaaacgcacccttttctttggcaatcctgcctacctcagtaccaaaaatgagcagttggtcgtcagttttcccgatgggcagcccgaaaggacggtgcctattgaggatatagggatgatcgtgttggaaaaccagcagatcaccgtgaccaatggcttattggccaaactcaccaatcaaaaaacagctgtggtctcctgcaatgcccagcggctgcctgatggcctcctgctaccaatgcacggacatagcgaacagactgagcggatacgctaccagttggatgcgagtgttccgttgaagaaaaatctttggcaacagaccgtgtcggccaagatcgctaaccaagcgggacttttggaggaaaaggggataccggcgcagaaacttcgccatttggccaagaatgtaagctctggagacaaagaaaaccacgaaggccaagccgccgcttactactggcaaaatctgtttgtgatttcaggatttacccgaaagcaggccggaattcctcccaacaaccttctgaactacggctatgcaattctgagggcagtgatcgctcgtgcgctggtttcctccgggatgctgcccaacgttggaatttggcatcgtaataaatacaatgcctactgcttggcggacgacatcatggagccttatcgtccttacgtagatctggtggtatcacatattgtagagacggaggatgatctcgacgaattgacgacctccgtaaagaaagaacttttgagcattcccgcgctggatgtggtcatcgatgggcaaaaaagtcctctaatggttgccgccagccggacaacaagctcactatttgactgttttgcgggtaccagcaggaaaatctcctatcccgaatatggataatggctatttttcacgacttaaccaataccgaagcttgtgggtgttagtattctttgatcttcctacagagaccaaaaaggatcgaaaaattgcgtcggccttccgtaaaaagcttttggatgacggctttgctatgttccagttttctatttatatgcggttttgcgccagccgggaaaatgcggaagttcatcagaggagggtaaagaaaaatctccctctcaagggaaaagtgggaatcatgtccattacagacaaacagtttgggatgatggaaattttttatggaaccaaacctatggagtctgaggccccgtcccagcagttggagttgttctgagatggaaaaagacctgttaggttttcgaaacctgacaggtcttttctttcccactctaaatcattgtctttttttgattctgatttttggtataaaaaacagcataccagccagttacgggtcggtatgctgtgatttccataggaaagtactgatttgaaagcaattcacaaccgtagaacagctcctcgatcttagcctcctgctgtgatttccataggaaagtactgatttgaaagcaattcacaacatagatttcttaatactgaaacactttctagctgtgatttccataggaaagtactgatttgaaagcaattcacaacctgggaacttaacaacagctatgtacaagggctgtgatttccataggaaagtactgatttgaaagcaattcacaacgaccagctgaggattgttgaggatccgctgctgtgatttccataggaaagtactgatttgaaagcaattcacaactactgcggtggaaatactcattaccgccttgctgtgatttccataggaaagtactgatttgaaagcaattcacaacaaagggatttttcagcggaatctcatcctcgctgtgatttccataggaaagtactgatttgaaagcaattcacaacgatgtggaggtgcggtccgtacttttccgagctgtgatttccataggaaagtactgatttgaaagcaattcacaacgaaggagcagcatctccgaaatcagcgggagctgtgatttccataggaaagtactgatttgaaagcaattcacaacacctattcgcagattctgagcaatactcttgctgtgatttccataggaaagtactgatttgaaagcaattcacaacagctgaactcgtacagctcagggagccaaagctgtgatttccataggaaagtactgatttgaaagcaattcacaaccacctgtttaacacccctagaaggcgagatgctgtgatttccataggaaagtactgatttgaaagc

SEQ ID NO: 1321 - DNA, 17113 bp, synthetic construct
  source 1..17113: mol_type = other DNA
  misc_feature 1..17113: note = Synthetic
attcaattaaatcagttatttcggactcgctgatggccaaagaataggcagttggcatcacgcttttcttttctttggttttggattttatttctttttgaggaatggttgttacatttcctgacaggtctttgatggttatggttttaacgttttctgaaattaaaaacccataataagtactgctagttttggtctgaatagtagaggtttcatatccaaaaaccatagaagccgaaggataaaccaaagcttcatagaggccttttttctctaactttcctccgatttttgtcagctctgggcctatttctcttccaacattcccaattttatgacatgaaatacagtaagtattaaaaacttttcgtccattttcagaatctccattggtttttaggatcgcatccgtattgtataaatttactggggtgttcagcaagtttttagcctgaaactttatggtaggttcaggatgattgcttagaacaggcatgctaaactccaataagtcggtactgagtttgtcgttttgaatcagatctagtatcatttgactgccttgtgtagttttcatcatttctgaaatagcgtatcttctgtcgccgaaagcaatgttttggttcaagacaatttctttctgattttgaagtttgctgagccgttttagttggtctaaatcagtggacagacttttccaatcgtgcaggtcataccaatcgttggtgcttctgaaagagacccaatatttcgctaattcggctattttttggtcatttgattcacctaattttaacatagaagccacggcctcttttgattttataaagccgatggcagttacagatttctttcttttttcgaatggttcattggcattggtagcaatttgctgaaaataatcaactgccgatgagggataaagtgcaaatgccaaatcgaagtgttttttaaaccaagttatgttttcattgtaaaaatcattttcatgtccagacaaaacgaaagcaatggcatttgtatagaaaagatcaccaactggatttttatcagcatatttcttaagtaagactttgtttttttcaaaagggtagctttggagagcttgaatggcttcgcgtcttacgaaaggagaagggtcgttgaggagattttgtaaaagtctaaatagatcttctgcacctaaattttgtcgcaatgccctcaatgccaccactttttcttgtgcatttccttttttcaagatttccttaaccatagtttttcctttggattccatggatgctaaaagccaaatcgctcttgattttatgaatggattggggtcttgcaacaattttataactgatgtaaaatttgctacaggattttcttttaacttcaaataggcctgatattttacgtgtattgctgggtttttaaaacattctaaaagatccttttgggtatttaaagtcagtttagggctttttaaattacggtttttaggtgttaccctgtaaatccttccgtgtgctttttggtcttgtattctatggccacccaccacggcatcataccaatctgcaatgtaaagggcaccatcggtccccatcaatatatctgaaggtctaaaccatttcgataggtcattttgaaaatttgcattattccaatgataggcagggtcatctgtaaaattggaggaaatcagcatctgtttttttccctttagttcgtatcctgagctttttaatttaggatgatacccgaatagaacatttctacccgcatcggcactgagtaccattccttggtatttttgacccaaactattcccttcaattctgagcattccagtgggcgatcctgcacctgaattgtcaccagctggcattactgcggggtcttcttggtgccaatgtgccttaaacatgctttggccgggtctttgatctgcattccaatatctggtgccgtctttactgaagaaacctgcgtctgcaccttctgctagccatgaaactcggcacgttaccacttggtcgtcgttatcgttttgccacatatcaccatggccatctacgtaggtttcatacgagttccgaaaattatgtgcctgtacttttagtccagttatatcgggatttatacgcatttgtaagccacccacccaagttttgccgtcatcgctgaccatatttccttggtttttttcgttataaggagagcctccagtataaatactaccagaacgaagcgtaaagccgcttttatcagtaaccacatgcggccctgcatttcccacactaaaatgccactttccatcaggaccagccaccacagaatgtaatgaatggtcgtggttaaatcctccaaagcctttcaagagaatttctttcgagtcgggtatatcatcgccattctcgtctgtatattttatcaaatagggagcacaagaaacaatgatgtctttgccaaaaaccgcaattcctagtggagccaccaaatctttgtcttgcacaaaaacttgtgatttatcggctttgccatcttgattggtatcgctgattattactattctatcccctttttcatgatgaaaaaaagcagaagaatcattattgaagtttctataatttaccccttcggtcacccaaatccttccttggaggtcggtgtccatattggtaggattgtaaagcataggtgactcagcccaaagttcaatttggaggtcatctggcagataaaatttaagatttcccccgtcaggattgggattcattacaaaccctaaaaaaaggaagcttgtgacaatcaaggcagatggaatgattttgtttttcatgaaaatctattttagcgattggatgaagtccagattcttttgatgtccagaaacaaaatcatacttatcaggtaaagaccattctaattgctgccattttttgttggaatatcctatctcttgcaaggcattatttactttttgccaatctatatcgccagttccgagaaattttccgttttctttcaaatgaatttcacagatatttttgtttcccaaaagcttaatttcgtggaaaatatcattgccggcgtcttttgcatttctaaaatcataatagacttttatggcttttgaacccactttttccatgatatccaaatgttcttctgcagttaaataggattctatgcctaaagtaatgccttgtttttcagcgtcaggtgcaatctccttaagttttgcgataacattctggactccctttggatcattcctaaggtcatttttagagaaaaacgctagcaatactacttctacacccatatttttagccacacctatgctatcagctacccatggggtggttctatcatccgatttataaggaatgttattgagttcaccaatggccaaactggtgatgcttatcttcgtttcctttgatttttttaggaaaatttcttgaacagatttttgtctcaaatgcaggtcattggatagattgcccatattcacttgaaccccagctaggccaatggcttgggctacctcaaaagaaagggggtctgaacttttgcccaaggaccaatcacaagcacccaatttatttacattgaatttgttaactgcaggaaaaaaacaatgtaaaggtaaaaccaagcccgccgctgaaattttcgaaacaaattctcttcttttcatagtctgatattgatccacttaatggtttgttttagaaacataactctctatacccacagatttgtacatctttgagatacggtgggcatgctcatcataagcactttggaataagtccgccgctttttccgctcccactacggctccggctgtcaatacttttggtgggcggccagcctgcgttaaaagattggcaacttccgctttgatagaattgatgagcatacaagaacccacggtagaacctggtgcaactggcgtttctaagttctcaatttttatcatggcgtcgcccagtggtgcacctgaatccaaaacgatatcacaaaaatcctgtaatttctttccgtcttttcttttcgaattactggcttcagaatgcagtttggtattcaatcccactactttcaatccttttgacttaaatatttctgccatttcgattggcaccacattgcagcctgaagatgaaataatcaatgcactgtcttgatctgaaacatcaaaatttcgaatgatttgttccgctagacccgtaacattttccaaaaacatagcttgccgttggccgttggcacctacaaccaaattatgaaaagttagcgaaagctccacaataggattaaaccctggaaaggaaccataccgtggccacatttcttctaccataattcggctatggccactgccaaaaacatgtaccattcttcctgccaaaatagaatctgcaaatatgctagccacttcaagaatctgtttttcttgagaggctactgtttcaatcatctgctggcacttttctaaatattgttttgtataggtcatattttatttttatttataacacataggcacatagataacatagttttttctattgactcgtattttttttaaacacataggcacataattagcatagttttttctattgactcgtattctttttaaaacacataggctcatagttagcatagtttttttttaaaattttctattgtgctctatgtgcctatgtgttcattaaattttccccaatgcaaaagctgccgctccaatagctcccgagagatcatcgaaatgagccttttctatgcttgtttttttgcctttcggtctaaattcataaaggtcaataaaagtttgtaaaggctcaaaaagtaaattgccagccaatgtgatacctccactcaaaacgatgatttcaggtgaaaaaacattaattaaggaggccatcgaaatggccaatttacggacagcatccaaccaaagccaggtcccaaaactatcgttttcactataggcctttaaaagctcatgggtagatttaaatttccccatagaacgtttttcgatagaataattacccaaggcatattctaaactaccaggaattcccaaaatacttcgctcatcgtctgatatattgatagatatatgtcccaaatgcccggccatctgacttaatccttggtacaattctccattaatcaaaataccacctccaacacctgttcctaaagtaagcaaaatcgcatttttataaccttttacagccccaaatttagcttcggccatcaatgcggcatgagcgtcgtttaataccaaagtttgagttccgaaataatctgcccacacaaaattctctaatccaaaaagtctattgggcaaatgagcgatacaagaattctctgcatttgctaaacctggagcagacataccaatgatttcaacttgattttggcttttcgctttaagatagtttaccatttccaaaacattcaccttccacctttcatctccctcatcactggtagggatataatgtttctgaaggacctcacccatttcattgagcaaaatccctttcacgtttgttccgcctaagtctattccgattgctactttcattttttagctgttggcttttagcaaatagctattagcttttatttcaatccattattaaacccattccaatttcaaaaaatcaacatttgctaattagcacattaactaattaacacattaacacattagtattgtccttcagaaacctcccatccgccatcaacatatagcgtttggccagttgtaaactttgaggcatctgacataaaatataccgccgcaccgtctaaatcttcgggttttccgtttcttccgccgtcgagcggttgttttgttttcacgaaattcataatagtttcatccgtacttgctctggcagacataggggtttcaaccaaagctggagcaagaatattgatacgaatattgtctttggcataataagccgccaaagcttttgtaaaaccaattactgcagatttggctgcagcataggcatgtgttacgaaatattgcggagagggtgaaaaccccaaaaccgaactcatatttaaaatacttcctgattttccgagttctaaaaattttcttactgcggcttggttagaaagcatcaaacttgtaaggttcaagtcaaacgttttattccagccttctaggctgagctcatgcaacggcccatcaccaaatttccttccacttccgccagccacatgatacaaaccatcaaaatttccaaattcagacatacagatttcgatggctttaaaagccgtttggggatctgaagcatccccttttacagctcgggcattttcacctagtgctaatacggcagaaatgcaattttcaggatttcttccaactaccaccacatttgctctattttttacaaatgcttttgctgccgaaaatcccaagccagtggttcctcctatgataacaatatttttgccttcgagcataatttacaccatttattgaaaacatatcaataatatacaaaaatatataactaaaatttaaatttccacctatatttattgttcaaccaatactatattgatatttgatggaacctattctccaaagattaccactcagcaaagacctctcctatatctatgagcgttatgaatctccctttttcgaaactccctggcattatcatgacgagttcgaaatcgtcctttgtgatggtggttttggaaaaaaagtaattggcaaccatacttctgaatataaggagggcgatttaatattgataggtagcaaactaccacattggtttcgtgcggatgaaacgttttatatgcatgcggctttcccgcgtccagcttctatcgttatacagtttcgctcagatagttttggtgagtctttctttgacttagtagaaatgaccccagtgcggtcgctattggaaaaagcaaaatttgggctggaatttaagggctatgccaaggagctgataaataaaataattaaagaaaacattcataaaagtagtttagaaaagttcctgagcctttttgaaatattgcaattgatggctgaaagtaaagagcatcagacgctttcagagataggaatggaaggcattagcaagaaagattcagagagaatgagcattatatttgaccaaattttgaaaaacttcaaagaaccggtgtcggtggaggacttggcccaaaaagtaaatttaaccaaagcggccttttgcaggtattttaaagcccgaacacaaaagacgtttgtggagtaccttatgcaagtccgaatcaaccacgcgtgtaagcttttgaaagaaactgacctgagtgttctggaaatttgctatgagtcgggatttaataacttatcgaattttaatcggcagtttttgaagcttaccaaacaaaaccccaaagccttcagaaaaaaccagcatacttcggtttccacaaattcatagctgaaatttcagaaaaaaaacttacaccgcctttctcaaaataaggttaaaattatatccaattttggccatgaaatgagtcaatagatagtcagattttaaggatatttttaaagtgtaaaattaacacctaaagcgacatttccgatataaaccttccaaaaatttagcagaaaaaatagtcaactacctcaaaatcagcacaattttattttatatttttatgattttagaagtaaacgttgtactattacaagaaatgcatgttttttttgcttctgttaacacttcctaaaaccgctatccgtttgttttgcataaaaattaagtgcgtatgaattttacaaaaacactttttataatacttttttctgctttaggttttgtgccttcattttcacaaggtttggaatacaaaaaatcgtttgaaggcttagcatcgttttatggcaaagaatttaatggcaaaacaactgcaaatggagacgttttcagcaatcgctattatacttgtgcacatcgcacattgccttttggtacattgatagaaatagaaaatcctaaaaatgggaaaaaagtaatagtaaaagtaaacgaccgcggtccctattgtggagaaagagtaatcgatctttccagagaggctgccagcaaattgggattaatccaccatggcgtatccgatattaaggcaagaattcttaagaaaagaagaggttttgatatcaacacaggatcaatggccacaaaaagtaagtggccagcacctaccacctcacgtagttttcatgagatgatattcttgaattctgcaagaagaaactttgtgatgaaaatctagcatcatcattaggccatgtcttattataaaaaccttcgagcattgtaccctcgaaggtttttttttgtaaataattattggatggatgattttaaaaacaaagtcttattcaaagtttaccgaagtcttataattattttttgaaaatggcagttttcaaaaaaatggatttcccagtgtaaattatatatctgaaaaattaactttatcaccaaggtatttaagcgacatattgagccaagaaacgggtaaaacagctctagaacatattcacatagcaatggttttggaggcaaaaaacttattgttgagtaccgacaaaactgtttcagaaacggcttacgaattaggttttgaaaatccaccttatttttcgagactttttaagaaagaatttggtctgacccaaacagaatatagagaatggttttttttgaattaatagattaggttcctctcctatccaagggatattgtcttctgataggtggatgacgggtataggcaggagcataggatcaaccatatcatttccgattcaaaaagatctccacatcctatagaacttataaaaaacctttaaattcgttcaaatgtaaagggaattggcaataaatagggttttctggaaatacaatttgtgctaaaaatgaagaataatcacaaaagatttggtctccaaatgtatactaccacaggattctaatttacattattgtaataagaattatatgcaacatcaaaaactttatatagccccctagaactttatccgccccctccgacaaagtttcccgaccccttgacaacgtttctcgaccccccgacaaagtttcccgaccccccgacaaagtttcccgaccccctgacaatgtttcccgaccccccgacaaagtttcccgaccccctgacaaagtttcccgaccccccgaaaactttttccgaccctctggaaactttttccgacccccctacaacgtttcccgacaccctgacaatattttccgcctcccccctggctaacaaagatagcttgaatagcttgtgtgatttgctgatggaaaatacattggccaaagaatatgttttagaattgcggatattgataccattactccgagcgtggtgcgggccatggaaaagctaaagaatcattttgttattattactaccgttaaggagattaaaatgaacactttgttcatttatgattttgaaagattgtaatttgaattcaaagccctatctcttttaaaactctaaatatccattctttataaaagagaaataaatacacattgttccttatattttcaattcaccatcgccgattttgtgtttgtttttcacgaatttgtgtttaaagttgacgattttctattcaacattaccgatttcgtgttcagaatctgcgatttcgtgttcaatattggcgattttgtgctcaatattggctagtttgtgtttaaatttctcacataaaaaaaggcgaggattactccccaccttaaatgttttcacaacggaataatccttattgtgatttgctttcgtattgcaaatgtaaaagaataaatttaataaataacacgtagaaatacgtattttttaattcttgtatttaatttatcttgcaaaaaattcaataattataatcaccatgaaaacaatcctcggacttgacctcggcactaactctatcggatgggcacttattaatcaggactttgaaaataaaacaggcaagattctcggaatgggaagtaggattattcctatgtcacaggatattatgggagagtttggaaagggaaactctatttcgcaaacagctgaaagaacgagccttcgaggagttagaagactaagagagcgattccttttgagaagagaaagacttcatagagttttagatctaatcaattttttaccaaaacattacgcagataagatagatttcgaaaaaaaattgggcaaattcaaaaataattctgaaccaaagattgcctattcggaaggaaaattcatatttctagattcttttcaggaaatgattgatgacttttcagttaaatgtccagaaattttatttgacaaaaatggccacaactgcaaaatcccgcatgactggaccatttattatcttcgaaaaaaagccctatcaaaaaaaatcagtaaagaggaactgtcttggataattttaaacttcaatcagaaaagaggatactaccaactgcgaggagaagaagaagacgaaaaacagaataaagatgtagatttttattctttgaaagttacggaagttattgcagatgaaccacaaaaaggaaaatctgatatttggtattcaattatacttgaaaatggatggatttacaggagggccagtaagcttcccctttttgattggaaagataaaacaaaagatttcattgttacaactgagcttaatgaggacggctctgtagcgaaagataaggaaggaaaagagaaaagaagctttagagcaccaagcccggacgactggacgcttataaaaaagaaaaccgaaaaagaaattgaaaattcatcgaaaacggttggcgaatttatatttgaagcattaattgagaatccaaagcagaaaataaaaggtaaattggttcggacgattgagcgtaaattttataaatcagaactaaccttaatactacaaaaacaaaaagaataccatccagaattaagtaacgaagacttattaaatgatgtagcaagagaactttacaaaaataatgaatcactacagaccatacttgggcagaaaggatttgtccacctcttcgtgcaagatattattttttatcaaagaccacttaggagtcaaaagtcttcaataagcaactgtagtctcgaatttagcccgatgaaagatgataagggtatattattaagagatgcaaacggagcagtgttatcaaaacctttaaaatgtatccctaaatccaatccatactttcaagaatttagaatttggaaatggatttcagatttagccatctatagaaatgacgacgaccaaaatataactgatacatttttgaatagccatgaggatcttgtacaattatttgattttttgaattccaaaaaggagattgaacaaaaggtattaatcaagtttctacttgagaacaaggcacacaaagtcaaggcatcaacgacagaaattgaaaaatacagatggaattacgtaaaagacaaaaagtatccttgtaacgaaactaggaatctaatagttagccgacttaataaaattcaagaaattactcctagttttctttcccatgaaattgaactaaagctatggcatttattatactccgttacagataaaatagagttcgaaaaagctttaagcacttttgctataaagcataatttgccagaaacagaatttgtggaaatattcaaaaaattccctccctttaaaagtgaatatggctcctactccgaaaaagccttgaaaaagattttaccattaatgcgattgggtaattattggtcttgggaaaatatttcggaaaaatctaaggatagaatttctaaaatcatcaatggtgagtttgatgaaaatataaaagaaagaacaagagagaaatcgaggaatcttcaaaccgaaactgatttccaaggtcttccagattggttggcaaaatatatagtatacgacagacactcagaggctagtaatattgaaaaatggaatagtgtaactgatttagagggatttctgttggagttcagacaacattcccttagaaacccaatagtagagcaagttgtcactgaaactttaagagtagtcaaagatatttgggtaaagtatggaaaaggttcaaaggacttttttagcgaaattcatgtagaacttggccgtgaaatgaaaaacacggctgaggacagaaagaatttaaccaaccaaattacagaaaacgaaaataccaatcttcgaataaaagcccttttggccgagctattcaatgacaataatattcgcaatgttcggccattttcgcctagccaacaagagactctaaaaatattcgaagaatacgccattagcaatgaagaaagatacgaccttgaaaatgattcatttatctatgaccccataccagaggatatttcaaaaataagcaaaaccgctcaaccttctaaaaatgatttaattagatataaactatggcttgaacaacgttacagatcaccctatactggaaatgttataccgctaagccgactattcacttcagatttcgaaatagaacacataatacctcaaagtagatatttcgatgatagttttagtaataaggttatatgtgaggcggcagttaataaactaaaggataatcaaactggatttgagttcataaaaaaccaccatggcactacaattaataacaagttaagaatctacgaaatcgctgaatatgaagagtttgtaaaggaacactatgataaaacgcgaggaaagagaaataaacttttgatggaggaaattccagaaaagatgattgaaaggcaaatgaatgatactagatatataagtaaatttataagccaattactttctaatattgtacgagcagaatcaaaagacgatggtataaattcaaagaatgtaatgccgggcaacggaaaaatcacagatagtctaaagcaagactggggtttgaatgatatttggaatgatttgatattgccaaggtttgaaagacttaacgaaattaccaaaactgactcatttacagtttggaatgaaaaccaccaaaaactacttcctacagtaccaatagagttctcaaaaggcttttcaaaaaaacgaatagaccatagacatcatgcaatggatgcattggtaatagcatgtgctactcgtgaacatgtaaacttcatgaacaatgagcatgcactgagaaaagggaaaaacaaagacgaaaaacaaaccctaagacaagacctaagaaatatcttgtgcgtaaaaaaatataatggaaattctaaagagaactacaagtggatatttaaaaaaccgtgggaagaaattacccaagagactcgaaaagaacttgataaaaccgttgtaagcttcaaacaaaatacaagggtaattaataaagctacaaataagtattataaatgggtagaaacagatggtaaagtagcaaaggaaaaagtgagtcaggagggcatgaattgggctgttaggaaatcaatgcacaaagacactgtttcaggtttagtaaatctaccacgtattaaagtacctaaaggcaaaatcctaactgcgtctagaaaacccctagacacttcatttgatttgaaaacaattgaatccataacagatacaggaatacaaaaaatactcaaaaattatttattagccaaagatggaaatcctgaagttgcctttactccagaaggaattgaggatatgaatagaaacataaggttatataatggtaataaaaatcaccaaccgataaaaaaggttaggatatttgaaatgggaagtaagttccctttaggccaaacaggcaataaaaaagaaaaatatgtggaagctgcgaagggtactaatttattctttgctatttatcaagatagagatgacaaaagaagttttgaaaccatacctttgaatgaggttattcaaaggttaaaaaacggtaagtcctcagcaccagaagtaaacaaaaacaatcaactacttaaacacattttgagtcctaatgacatagttgctataaaaaataataatggcaatttagaattctacaaatttgttagttgcacaggcggagagggtcattttgtccttcactcatatgccaaagaaataataaagaatgaaatgggaacaaataacaaatccgagaggcctattacattacatggatttgataaaagtcagaccataaaagataaatgtatttttttaaatatttcgagacttggtgatatcctttaaatatggcatataatttgtaatggctttataataaagccattacaaacatgataaaaaggacactttatttcggaaatccatcctacctctcaatgcgaaacgagcagttggtacttaaataccctgaactagagcaaaacgaaagtattccgatacattttaaaaaagaaacggagaccacagtaccgatagaagacatcggaatggttatcatcgaccaccgacagattaccatcacccacgacctttgcgaaaaactcatcgagaacaactcagccatagtatggtgcgacgccaagcatcatcccactggcatgacactgccctttgcagctaacgatacaatttctgaaaaaacaagataccaaattgaagcatctgagccgctcaaaaaacaattatggcggcaaacaatcgaagccaaaatatcaaaccaagctgcggtattaaagcattttggttatccataccaagacctagtcaatatgtctaatcaggtattaagtggcgacaatgctaacatggaaggtagagcggcggctaaatattgggataaaatactcgaacagtttgataccaccagagggcgttttgacggtccaccgaataatttcctcaattatgcttatgccatcttaagagctacagtagcaagaaacttggtaggaagtggcctgttacctgttttgggcattcatcaccgcaacaaatacaatgcatactgtttggcagacgatatcatggaaccctacagaccaattatagaccaacatatatttgattatattgaactacaagagtttttacctgaagaactgggcaaaaaagaaaaagctcatattctaaacttggtaaatatagacgtagagatagaaggcaagaaaagcccacttatggtgggcgttcagcgaaccactgcatcattgatgaagtgttttatgggcgagagtagaaaaatttcatatccagctttataatgccatgtcattagaaagactaaaccaatacagaatcatgtgggtaattgtatattttgacttaccaaccgaaagcaaaaaagataagcgagcttatcaggattttagaaaaacactgcaaaaagatggtttcagaatgatgcaatattcagtttatttccgccactgcaacagcagagaaaatgctgaggttcataaacgaagagtaaaaaacaatatgccagttaaaggaaacatcatagttttcgaaattaccgatgcccaatttggtagaatggagttttataatggatacaaacgaacccatagcaaggagaatccgcaacaattggaaatgttctgataaaaaaatgccccaaagcaggacaaagcattctgatagatagttgattttttatttctaatatcagacataaaatattgatattctgacagatgacaacgggtatgttgtcataaatatcagaatatcaaagaacgaaagcaaatcacaacgatatgtcgccatacccatttttacttttcgttgtcataaatatcagaatatcaaagaacgaaagcaaatcacaacattattacaacggcagggtttagaaaagaagttgtcataaatatcagaatatcaaagaacgaaagcaaatcacaacgcttcgaacaagactttgaaagttcaaaagttgtcataaatatcagaatatcaaagaacgaaagcaaatcacaacgtctaacttcttcgccgtgatgcaagtgaagttgtcataaatatcagaatatcaaagaacgaaagcaaatcacaactgggaagagtgcctttggtgagggcttccagttgtcataaatatcagaatatcaaagaacgaaagcaaatcacaacaggactctcaaaaggttataaaagagctaggttgtcataaatatcagaatatcaaagaacgaaagcaaatcacaacgcactatacatttgtgacatcaaaaacaatgttgtcataaatatcagaatatcaaagaacgaaagcaaatcacaacaatgtatctcgttttgagtatctgtaaacggttgtcataaatatcagaatatcaaagaacgaaagcaaatcacaacactcaagtgtattaaacaccaggaggttgtgttgtcataaatatcagaatatcaaagaacgaaagcaaatcacaacttaggctgtttaattctgtttttttaaagtgttgtcataaatatcagaatatcaaagaacgaaagcaaatcacaactaattatcgctttattataaaaggactttcgttgtcataaatatcagaatatcaaagaacgaaagcaaatcacaactcaggctgtttagttctgtttttttaaagtgttgtcataaatatcagaatatcaaagaacgaaagcaaatcacaactgttattaggatgcaataagcctatattaagttgtcataaatatcagaatatcaaagaacgaaagcaaatcacaacttaggttgtttagttctgtttttttaaattgttgtcataaatatcagaatatcaaagaacgaaagcaaatcacaacctaatctcgctccgccatccacaaaaagttgttgtcataaatatcagaatatcaaagaacgaaagcaaatcacaacatttttcgtcggcatatcgccagaagccgtgttgtcataaatatcagaatatcaaagaacgaaagcaaatcacaactgggaagagtgcctttggtgagggcttccagttgtcataaatatcagaatatcaaagaacgaaagcaaatcac

SEQ ID NO: 1322 - DNA, 17024 bp, synthetic construct
  source 1..17024: mol_type = other DNA
  misc_feature 1..17024: note = Synthetic
taaaaatgcactaagatcagtttcggttatgtattgaaccagcagttctgtatgagctgcgaataaatccggagaagttccaagcagtatagtatttaaaacagccttatttatttgtttgccctgctttaattcaaaccacaaagcagccggttctatttctctgtcctcccgcaaagcacagattgtttctaatgcttccagaacttcttttctgaatgataaagattcattgcttagaatttctttagccttctctttcaatcctttttttgacaggcagcctgccagcaattgatagcgctgttttggcagaaaggaatttcccgttactgtcgcaataatcgggagtaattcataacaaaaattgctgggaagggcaagattaggcagaattaaatcttcaagctgtttgctttgctcctgatccagctcgaaattctgcagtaacagatattgcgttaaaattttagccgccagtccaacctgatagctcttcagaggatgtttgggagaaagataattatcccaaaaccacttgtaccctttggtctttgatatcttaatacaagtcgcataagaatgtaggctgacggtatcgttttgattttgtacatgaaggggcctgaactgaagctggttgagaatttcaaaatattcatcacataaaacttcatgtttaaactcagcaagaatgatcgccccttgggcaacaaaattattaggccatgtaagattcttacagatgagcttacccgtttcttctgctacgctgctggactctcctttaattctggctattgccaaagcaaatgaaaggctgcgccaatgttccttactgtctatttcgatatgatccgatttcaggttttccgctaagaataatcctgaagcacattccagcaatggtgctgaaataaatccatacatcctgttggtggtctcctgcaagaaaatatttttgaaatattttatggcctgagttacaatcctgggtttatttgcaactgcccctatcatactatttaccgctgaatgaagttctgtttcacttaatgcttttgctttagaggtaaatattttccatgcaagagaagccaggagaggttctttattaaaaacagacggaaattctatattaaaatccgaaaaatcatccgctctgctatcaagactgtcccagtttaatttttgctgcagggtctcatacaggatatcacccagcgttttatcgccgataccctcattaaggctgtttctaatggaacaaataatcagcggtgtatcggctattgcatataattcgggacgcccttgtaaaaacataaacctttgttcgctgtcccttttggctgctgcatctgagagtttgcggtttttagcttcattgtaaagaacagaaagtatttctttttctgttaaagcaattgtacatagcacatgccatcccgagggtactaaaccttcaagttctactggccggcctgtagcaataatccgcagaaattcgcttgcggactttaaactttttaaatgcacaatcaattgtctggcaaccctgatttccaattcatcaaggccatcaatgacaagtacgatttctttgccggtcttaaatacagtatctaagtcaaaagatttattgaccagctgaagttcattatttacaaagtcatttattgctgattttacattttccaaggcagaaagattcctttgatgaagataactcgaaggaataaatagagggacaatgcccgattcttgtcctatcacttcaagcaaatactgggcaacaatcgaacttttaccgcttcctaaatctccaaaaagaaaaataggcttcctggattgcacaaaacctgaaaaactgccctgaatactgtctggtctgatttgttcagaattagcctgatgtgatgccagtcttctgttttcatcaaataataaaacatccctgtttaataaacagggagagttttttaaacctgatatcgcaaaatatttcagatcaataaaatcccgtagataggactttgtcttttgctcaatttcagtataatcaagagtaagatatttgtaactctcttcctcaattccctcatatactgctttgtaaaatacaatctcaacatcttttcgggttaagaatctttctgctgttttttgcttgccctgcctgagttccagctgataaaaaagctctgctcttataaaaggggatcttaagtgtatcttatcagatgtaataaatgggccgctattgatcttgtcaattatggcaccttctaaagtttccagtttttcatcggtaaatatccagctaatagtgttcaaaaaatcaatccagtcctggttttcaaattttaataaagcggcataataactgttttcaaggcttacatttttattattttcgtattgacttttatattcatcaacaattaaagtttttacagcctcgattgtattgggatcgctatagtccttcttatccaatgattcgataattttcgattcaggtaagtctatagccaagtctttgaccctgcccttttttatctcctttgcaacattattggttgcataaattccaaatttaatctttgcattacgttcattacttagccagtgatcaataaaataaacgatcgtgttttttattggctgacttgcaaaagagaaattttgggaatcgtatgctttattctcttcgatatatgaaaaatgcttattttcaacaaatacatcaccattaaattcaatagccgctacgaaatccacttcttgatctttagtaagctcgtctaacagtaatgagatcgttcttaatttttgcaaggtgtagccttttgcagtgtctcccgcttctcttgaaattgtctttatttcttgtgacataattactttagtgattacttttcctatgaaaaattataaatataatatactattacctattagttttggaaaattataaatatttcccaaatgatttaattttagaaaatatactccggaaatctgaattttgatcgctccaaatgcgatcaaaaaaaaggctttaaaaaacttttttccattaaaagttgctttgtaattcaaaactacttcctgaatttactggatttagtttaaatttacacaacagttataaactcaaaaaaacatttataataattaaacaaaaaaaatggaaaaagtaatttttgatactaatgcctatagatatttagttgcaaacaaaacaaatcgtcaagtaaataaaataatacaaaagttaaaagataaggaacgaaaaaacagtattgaatctttgatgagtcctattgttgccaaggaattgttagcacacgtagcaaacaaaaaagacccatcctatcataaatgtttaaaagcgattaaagcattatattatcatagtggaactgataaagaaataagtattatgccttcctctgaattattaataagtaaagcttttttccatcaagaaatttcatcaaaaattgaaactcatcaagcaattgcgcaagttttaatgcatttagcgagaaacccttcacagcatatttttaaaaaatttcaaagaaatttaaacttaaatgcaaagcacgttaaagatgctgaagatgttttcgcaactgaaatgaaaacttttttaaaaaaaatcgatcctaactttgtagactggaaggtttttaaagatgaaccaaaaaaaaggacgaaagccctaaaagatgttcgcgctgaggaaacttctattgcaattgctaccggatatctttatatagtttataaattattagttcaagatggaaaacgtccaaataaatctgacaatgatatatttactgaaatagctccaatggctgaagaatttttaaatatatttcctgaacccattgcattatataaagttgtattggaaaatttaattaatagtgaatttaatttattcgaagatagtagatcaaattttgtttgggatatacatttaatgttcaatgtcggtcaaaatacaataggaaattcaagaattatttttgtaacctcagatgcggcaattattaaaagtgccatgaaaacaaatagcaaaaatactattttaacctttgaggaatatatggaatatttaggattgaaatagttagtttcaatattttgcgaaataaaaatttgtttaaagaaattggaatttttttatggctggataataaatagccaaaagggctcttttagagcccttttttattttcttctactattcttttttttcgttttacggttttatccttttgcagtttatctcttatagttctaaggtttgatttttttaatctttcaaatcttcaatcatctcgatcatatcgagtttgataagttcccagtgcctgcctctgagacagagtggctcaaaatcttcatctgcacctgaaaaatcagtaaactgatcgatcagaagcgtacggtcgtgcgtgtatggatatctttgctcgtgcagggcaaacatttcccttatactgaaatcttccctgagcatatgaatatcccagaaatctttcttccttccccctctttgtacaacgtccagtttcattgccgcaatttctgatctgcttgcaagccttatgcttccgtactcttgtacaggatcaataaactcatcggtgtaatacagatcaagttttacactttcctcagcactacgccccacatagtaagactttcccattccaacaggctgtatatccatactgtccacataaaaataatgggcacgcagataatcatcaatagccttaaaatcaatacttctatactctgcatcactaaacaggtcaatatccacagacatcctgtgtccgtaatacaaactcagcgctgtcccgccaaccagcctgaaagcgtcaaattcctgagcctgcatcaagtcctcaaggatagttctcagcagtggggtaacggtattaaaatgtaatggcattatttagatttttttatctcatttacagcatctctgccataaaatcggatgatttcctgcttctcactttcattgcccctttcaaaaatcctttttataactgcttttttttgtttctgccagtcgattttcttaatgtcagtatcccagaaaataatctttctgattttatcaaggtcaggctttaaatttattttatttctgtttaatttttttttctgctcttcaatatcataataaacctgaagggtcataaaatacccttcctccatgcagagtgacttctcaattttcatggcaaggggtatgttcattctgcgctttcctttagttatagccgttaaggtctggggaaactctccaagcgcaatggcaaactgccccttaccaagcatgcgttttttcagctccctctccagtacaaagcccggatgaattcccttaatgggatctatagtcgttttcataatacaaaaataaacaattttgtttacacaatggtgttaaaatggcattttaacagagtcttcgcaagtggcgcgataagtattttcattcgaaacggcagaaaagggcagccaagatagtaaccgccgaatgctgcatgcgcataatgaagcggctctgcctctccacccttcgggacttatagcacttcgcattctccatgtggtcacagtaaataagactaatttattttttaaaagaactctttgaaaagctggcctaacacttttctacaaaaaaaagcgactttgattttgctattgaattctattgtataaaaaaacttgattttttagggagaggttttggtagaaaaccatttttcagcatctcttatattaggttctctagctaattttaaaacactagccatgacttctaaccaatgtcctacattgtgactatcatgaaacgcagctccataaaatgaagcgatagctggataagaaggaattcttctctcttttgcaattttagaaaagacgattgctaaattttccttatttatgctaattaatttaaatctttcaggtaaaatactagatgtgcaaaataatgttaagcatagatttgataattctctatactctatattacttggaagacattcatttagatatgaaaaaagatattttgtattattatccatgataatatttttatttaattatttaataaatcgtttatctcattaatacgattttgtttatatctaatactattaggaattgttctattaacttcatcgcctataccatgtggattagatgtatgaccactattcatctctcttgcaatctgatttcttccgttttgaagttgttctatatcttgggctaaagctttttctaaaaaacttttctcagcaagaagagcatctgttgtcattaactctgtatctaatttacctaaattactaacacgaacgctgctaataacagttcctgttgcaaaacgatttggtataaaaccagctataataaagaaaggagaacttaattcttgaggagagaccctaccacttgcggtatcagctaacgctttattagcagaatttattgcatttgctcctatttctgttaaataatctctgaaatcaccagatgtcgttctggaagataaaaaattttgagtctcttccgaaatcatattatttggagctcctgggcttgcaattaattcctttgctgatttccaatcagatcctaagctccatccttcagattttgcataatcaatggctataggcataatcatttgtttataatttgcttcttcataccatactggtgcgtctgtaccacttacagaatgaccaacccaagttttataaagcttattattttctgtattatcaaacaacgatttaaaaaaatctaaaggaccataatctctgctgtctaatactgcttggtcaatcgcattttctctttgcccttctgcagttgcagcttgacgaggttctaaaccttccagctctaccatatcaattaatctattcccactaaattgataaggagaataaaatggatattttgcttccaaaggattcaccgcaaaaaacctaccaattctcgggtcatgcattctaaaggcataattcaaagaattcccttcaccaccttttatttcatcatctttttcctgtccttggaacccataacgatactcgcttttaggtttatcaggattcggtaccagcattccaaaaggatagtaatcaaatcatcgctacatcagtaaatactagaacatatgctatataataaacatcttaaaactgcctttttaggtatttttcactaattcaaaaatacacaaaataggtgtaatatttttttcttatttattttaaagctattctagctactaacaataaacagcgagaagagttttactcgcaccactggtgcgagtttttaaataagacatttatatatactctattttaccccccatgatgaactttaaaaatcaaatgtttttcttttcaaacctctgccaagtcgcttaaaagctggaaatcttcaagtaaaaggttcgaattttgtaccaaggagtcacttaaggggacgatcgtaaatgaccacccccttctttatcttacttaattcattgattttcaatttgttatttcgttattttttcaatttttactggttcgatatttttgatttgtaaaaatcgtttaaaaaaaacaccatagtagataataaaataatgattagatgttcgatatcctctagcgggttattgtcaactcaaatatgtttgaacatctggatttgaatatactttagtaaatatatacaggaaatcaagtatctcttttgcctgtgctacacttgtctcgataccattttttttcaatattctcattgcctgattgacagagatgtttctatctgagaaaactctgggtttaccatttggaatttgattaatggttttggtgtgtaaaaaattagtactagtaatatattgaaaattataagtaattatcatggatatactctgatttatttgtagaggatttaatttcttcgttacagggtcgaacgaaagaggtgtaaataactcgatgatatatcgtttaccagctacatcttgacttttgtataatgttaaaacattgttttcagcatcttttaaatctttgatgtttttgcgagcattacaattagctagactttcgtttacaagtgtaagtcgctcattaaggaaattcatcatctgtttgtattctttttttaaatcattaaaatcttcaaaatcaattttattctgaataaaataccttcttatcttcgatattaaaaattcttgatttgaaatctctttaagaatctttttttgatcatttataaattcctgtttcacagtcaaaatattttcatcctctagtataagttcaagtaattcataaacttttgattttatttttattttttttaatagttcttcatattcaaagtccaaaatttcggttcttatacgccctttgcacttactaactgcacaatggtagtattggtgcttcgcagttcttccagccgataaacttccagttaatcttcttccgcagaatgggcagattaaaaaccctctcaaaaggaaaactggtttcattttttgcttaaatgaatttgtggtgcgacggctgttaagcaagcactgaacttctttataaagcttctctgaaataagtggctcatgtataccttctacaaaacattcttcatccgtcttgattgcaggaacaaagactaatccacaatagaatgggttatgtagaagcttccaaaaattattcctgctacaggtaagtcctttgaggttcgccatcctcctaatgtagctaattgtaaatttaccttttgaatattcttcaaatgaccaccgaatataatcggcttcaggttgtttgagcacgataatctttttgccatcagaagcaaccttgttaacataaccaataggtgcttttcctggccatctgcccatttttctcgctcttctcataccatcagaggtatttaacccacgtctactattctctgcttcctgaattgataaatacatagtaagcattacagtgctttcaggaacttcaaaatcgactgtctgatcaatagccatagtttgagtattcagctctcttaatatcccgatcatttgataagcatattcgatgttgcggctaaaacgatcccatttaataaatagaatattttcttttggacgatgtttatttctctttattgttttaataagtcttgtccattctggtctattgaaatccttggcagaaaaatcttctctgaaaatcccctttacctttatttggttcagcgcacagaattttaataaacggtcttcctgttcaatcagagaaaaaccttttcttttttgttcgtcagtacttactctgacatataaataagcattttccataacaaaaattatgtagagatttcttgatttgctattaaaaggaaacatgtctagacatctcaattagttacagaaatttaaggaaacggtaatctttcggataaatcgacagataaatattagtaacagttaattatgaattaacagtctaatcgtgcggacaatatatttttactctgtttctgaatcatataataagcatctgcaatattcctgctgaatctgccccaggtggtacatagtataacatctacccctttctctaaactccttaagatttgtgaataatttttgccataccggcctattgaaagattttagtataatattcaaaatatttgtagacaaatattataatgcctaaaataatacatataaaaaaagcgacccttttgaggccgctttgaatgttttcacaacggaataatccttattgtgaattgcttcaaaattgtattgcaataatacaaaaaaattcgtgcttcttaattatggttttccgtaaatcagttaattatcttttacttaattttagaaattaattttttagagatgaagaaaatattaggattagatttaggaacgaatagtattggatgggcgttaacaaataatgacttcgataataaacttggaagtattgaagggttaggaagcagaataattcctatgagtcaagatgttcttggtaagtttgacagtggtgtttccatttcacaaactgctgaaagaactaaatatcgaggaacaagaagattagtgcaacgctttttattaagaagagaacgacttcatcgaattttaaatatccttgattttctaccaagacattattccgaagcaatagattttgataaaaaatttggacaatttaaacccgaaagagaagaaaaattatctttttataaaaatgaaagtggtaaaaatcaatttttatttttggaaagccaccaagaaatgttctctgaattcaaattaacacatcctgatttaaaacaagttccttatgattggactatttattatttaagaaaaaaagctttaactcaaaaaatatccaaagaagaattggcttggattattttaaattttaatcaaaaaagaggctattatcaattgcgtggtgaggaagaagaagtaaacaaaaataaattagaagaatttcacactctggtcattgttgatgtaattgaaagagaaaaaggaaaatcaggtgtttggtataacgtaattcttgaaaacggttggatttacaaacgtgaaagcaaaattgccttatttgactggattggaaaacaaaagaattttattgttacgaccgaattaaatgatgatgggacaataaaattaaataaagacaatgaagaaaaaagaagttttagatctccaaaagaagatgattggggattaagaaaaatcagaactgaacaaacaataaaccaaagtgaaaaatctgttggttcttttatttatgatgaacttttaaaaaaacctaatcaaaaaataaaaggcgagttagtaagaaccatcgaaagaaagttttataaggatgaactatcaaaaattttaaaagcccaaattacatttcattatgaaattttaggtgaccgaaatatttataaaaaatgtattgatgaattgtacagacacaatgattctcataaaaacaacatcaaagacaaaggttttgactatttgtttttggatgatattatcttttatcagcgtcctcttaaaagtaaaacatcattaattagtgattgcagtttagagtttgttcctatcaaagacaaaaaaggcattttggtaaaagatagtaatggaaagcaagttgtaaaacctttgaaatgcattgcaaaatcaaatcctatttttcaggaattccgtttattacaatttgtaaaaaatcttaaaatttacaagaaagaaatcataaatgaaattgacgttacgaatgattatttaaaaacggaagaagatttagtagaattattcgactggctaaatgacaaagctgaaattagtcaaaaacaatttttggcatatccaaaattcaaattaaaagaagataaatacagatggaattttgtcgaagacaaaatctatccttgcaatgaaacaagaaatcagtttttgaatgctattgcaaaaattgatgtaaataaatctttttttgatgctaaaaacactcaagatttatggcatattttatattctgttacagataaaactgaattattttcaataaatacggaaactggcatacagtctggagctctttctacattcgctaaacgacataatttatctaacgaatttgtatcgaatttttcaaaaataaaaccttacaataaagattatggatcttattctgaaaaagcaataaaaaagttattaccattaatgcgttttggaagcaattggaataaaaacaatatagatgccaaaacattggctagaattgacaaattacagactggagaatttgatgaaactatgagaactcgtgttcgagaaaaagcaattcatttaagtaaaattacagattttcaaggtttgcctttatggttggcttcttatattatttatgacagacacagcgaagctagtaatatttcaaagtggaaaactcccgaagacatagcatggtttctaaatcctaaaaacaaatccggtttcaaacaacattcgctccgaaatccaattgtagagcaagttattacagaaaccctacgagttgtaaaagacatttggcaacattatggagaaggaaaagaaaatttctttaacgaaattcatattgaattaggacgtgaaatgaagaataacgctaatgatagaaaaagaataacagaaactatcaatcagaacgaaaacacaaacttacgaatcaaagccattttaacggaattgaaaaatgacggtataaatgatgttcgtccttattcaccaagtcagcaagagattttaaaaatttacgaagaaggagtttataatagtgaaatcagaaaagaaaaactagaagacattgataaaattagaaaaaatgcaaaaccaacaccttctgaaattatcaaatacaaactttggttagaacaaggttatatttctccttacacaggaaagttaataccattaagtgacctttttacaactaaatatcagatcgaacatattattccacaatcaagattatttgatgattcgttatcaaataaagttatctgcgaatctgaagtaaacgatttaaaaggaaataacactgcattagaatttattttgaaaaacgaaggtagaattgtactcttaactggtggaaaaacagttaaaattttcactaaagaagcttataatcaacacatcactagttattatatcaaaaataaaagcaaacaaaaacgattgttaactgaagaaattccagaaaaatttattgacagacaattaaatgacactaaatacatcagtaaaattgtaaagaatcttttaagcaaaatagttcgagaagaagatgagcaagaagtaacttcaaaacatattgtttcattaaatgggtcaattacttcacgaatgaaacaagattggggtttgaatgatgtttggaacaaaatagtttcgcctcgttttgagagattgaatgcaataactaattcaaatgattttggcaaactagaactcaaaaaagacgaatttggaaacgctggaaaacaagtttttcaaaccacagtgccagatgacattgccaaaggtttttctaaaaaaagaattgaccatcgccatcacgctttagatgctttggtaattgcttgtataaatagaactcacatcaactatttgaataatctaaatgctaaagatgaaaatgacaaaacaattaaacacgaattaaggaacaaactttgttttaaaaccaaacctgactcaaatgggaattccaaatgggaattccacaaaccttgggagaatttcacaaaaaaagtagaagatgaattgaatcaaacaatcatcagcttcaaacaaaacactagggttattaataaaacggtaaacaaatatcaggtttggaaagaagaagatggtgcaatgaaaaaagtaaccgttaaacaaactaaaggagacaactgggcgattagaaaaccaatacacgcagaaaccgtaagcggaaaagtatttttaaaacgaattaaacaaagtcatattactattgcaaatgctattgaacaaatagaattgattgttgacaaggaagttagaaaacaactgaaagcaaaaatcaagcaatatcccaacaacaaagaaggctttaaaaaacaccttaaagctttccctataatgattaatggaaaagctatagacaaagttcagatttatgagaccatagaagccacagcaactagagaacgaaataatttagatattacgtttgacgagaaaaagatagaaaagataacagatactggtattcaaaaaattctattaaatcatcttaaacaagaaatatatcaaaatgcaatagacgaaagtggaaaaaaaatagctccgcatgaagtagctttttcagaaataggcatagatgaattaaataaaaacattaaagtgctcaataatggcaaaaatcaccaacctataaaaaaagtccgtattttcgaagaaagcaaacgattttcacttggacagtctggtagtaaaacagataaatatgttgaaactgccaaaggaactaatcttttctatgcaatatatgaaggcaaaaaagggaatagaaactataaaaccattccactcaatgaagtaattgaaagacaaaagcaaggtttaaattctgctttagtaactgatgaaaatgaaaatcgtcttttatttactctttctccaaatgatttagtttatataccaacaaacgaagaaaagaaaaacttaactacaattaattttgataaattgtcaagagagcaaactgaacgcatctataaatttgtaagttgtactagtggagaagggcattttgtttctaataattattcaaaagagataatttctaatgaaaatggttcaaataataaaaatgagcgaatgcttgaattcaacaattcaaatactatttatgatgaaaaagaaaaaccagtaatgataaaatctgtttgttggaaacttgaagttgatagacttggaaaaattaaaagaataattcgatgataaaacgcactcttttctttggcaatcccgcctatttgagcactaaaaatgagcaaattgtaatctcttatcctgacaaagaacaagagactaaaaccgtcgccattgaagacataggtgttatcgttttagaaaatcaacaaattacaataaccaatggtttattagaaaaactcactcataacaatgttgctttaatcaattgtgaccaacaacatttaccaattggtttgttaatgcctttaagcggacatacagaacaaactgagcgtttcaaaaatcagattaatgcttctgttccgctcaaaaagaatttgtggcagcaaactatcagttctaaaataaccaatcaggcaggactattaaaagaaaaaggaattccaatgcgtaaaatggaattatgggcaaaggaagtaacctctggtgattctttaaatcatgaatctagagctgctgtgtactattggcaaagtcttataaaaatagagaatttcacaagaggacaaaaaggaattcctccaaataatttactcaattacggttatgcgattttgagagctattacagcaagagcattagtaagttcgggcatgctcccgacattaggaatttttcatcgtaataaatataatgcttattgccttgctgatgacatcatggagccttatcggccatatgttgatttaattgtatgtcatattatggaaacggaagattcttatgacgaattaacaatcgaaataaaaaaacaattattgaatattacaacaatagatgtgaacattgatggtaaaaacagccctttaatggtggctatgagcagaacaaccaattctttacatgaatgttttgaaggaagttccagaagaattttatacccaatttatgtacgatgagcattacacacgtttaaatcaatatagaagtttgtggatattagtgttttttgatctgcccaccgaaacgcgcaaagagcgtaaaattgctagtaattttcgtaagagattattagacgatggtttttctatgttccaattttcgatatatatgcgcttctgtgctagtcgggaaaatgccgaggtacattccaaaagaataaaaaacagcttacctgaacatgggaaaattggtgtgatgcaaatcacagataaacaatttggaatgatggaacttttttatggaaaaaaacctgtggaaacagaaaaaccatctcaacaactagaacttttctaaaattaggattgaaaaagaacctaactaactgaacttcaacagtcaaatgaatggattttttaattccaaaacaaatatataactaccaacatatcaaacgattaactcgcggtatgttgggaattataagtaaaaatacaattttgaaagcaattcacaacaagttcttctatctgacttccatatgtagacaacaaaccaaaaatctctatttaaaaaacgattatagttcttttttattaaaaatacaatgtggaaaacgaacatctaccgaatcttttagggtgtatgtttttgtactatctattactccacctttattataatatttccattctccatatttaaaattgttttttatctctccctcttctttattgtgttccaatatgtaagatggatttatatgttcgtaatgatacattttccagaatccgcttccagagaaaaaatactttttcaagggataatgtgtataatccaatttaatatattttgtagtatcattgccttgtttagtatatagatctgaataattatcatataaaaaatcaatatctccctctttattatagcaatacccttcagtgtcaagaggccctccagatctaaccaaatccacgcttttaagttcgccttcgtataagctcaaaatttttagataattaccatcttcaaatcttaaataatcaataattgtttttacattattttgtttttcaattaattgaccttgtataattttataatctattttaaagtctttcaaagaaattacaaaataatgatcttcttttgctattttttgtcctgtttttatatttgtcaaactatcaaagttatcgctgtatgtcttctctgaatacttcgtttcatttgaatcattcggattatagtctttgacaagtgtcactattaaattctttttattataccttatcaagctatcaccaatctttactaaagggattggtggtggttctgtcgcatctgccatttaaatccgcaagaaatcagaaacccgaaaattatgcagccaatttacaaaatgatttgaacatacttgttcctgggttaagcatctgattttttcttaacatgtgcacaacttcaattcctgccaaggttcttctggcagacgcaaaac

SEQ ID NO: 1323 - DNA, 17002 bp, synthetic construct
  misc_feature 1..17002: note = Synthetic
  source 1..17002: mol_type = other DNA
cactggctttcattctgggtatggttcctatggttattgcaaccggaccgggttcggccagccgtcaagctatcggaacgggtgtattctttggtatgattgtcgccgtgacggtaggtatcttgcttgtgcctttcttctttgtgatgatttataaggcgaaaaacaagctgaaaacaaaaaaaagctaattaacaaaacctgaaacgtatgaaacgaacgaaatatacttatcgctttttatacatgctgacaactctgttgcttttgggcagttgtcagttgggcaaacattatactcgtccgaaactggacttgcccgaaacgctcgacagcatgagtgtagacacagtttccatcggagattatccgtgggaacagctctacaccgatacgaccttgcaaggattgatacgtaagaccttgtcgtataataaagatatgctgatagccgcagcgcgtgttaaggagttggctgcaatgaaacgcattgattatgcaaatatgttcccggcagtcggtgcaaaggtgtatgctgagaaggaagcagaaaattatggaggcaatcattataaatccggttatgagattgatgccaaggcttctgtttcgtgggagcttgatttatggggcaatcttcgttgggcacgcgataagagtcttgccgaatttgtgggatctgtcgaaaatcagcgtgcgcttcgtatgagtctggttgcacaggttgctcaggcttactttgagctggttgcgttggataatgaattgtctatcgtgcaaaagacagtagatgctcgtcgggaaagtttgcatttggcgcgcgtgcgttacgaaggtggactgacttctgaaactgcttttcgtcaggcacaggtggagttggcacgaacagcaacattggttcctgatttggagcgtaagatttctctgaaagaaaatgaaattgcatttttgagtggcgaatatccacatcatatcaaacgttcggtgttgcccgaagatgttatgctttctgccagtttacctgtaggtttgccttcagcactgctggagcgccggccggatatccgtcaggcagagcaggctgtcattgctgcaaatgctgcggtaggagtggcttttaccaatttgttccctcgcataacattgactgctacttatggcagcgagagtgctgcattgagtgatgtactgaaatcgccttaccatttgttgagtgctaacattctgcaaccgatttttgctatgggaaagaatcgtgcgatgctgaaagcaaagaaggcagcttgcgaacaagcagcttatgcatacgaaaaagctgtactgaatgcctttaaagatgcttataatgccatagccgaatttaataagataaaggaaatctatgaaactcgtctgcgtcttgaacaggcatcgaaaagtactcttgaccttgcacagcttcaatatctgaacggagttatcggttatatggatttgctggatgcacaacgtggatatctggacgctcagataggtttgagtaatgccgtacgcgacaagcagattagtatggtaaatctttataaagcacttggaggaggctggcaagaataacctgtatgacctgttttttacagttgggagataagcttttaaaaaagatgtagattattttaagaaacatattcgaaatatgccaataaatctttatctttgcatcccgaattgtgatgtaccctaatgtgtagtttagtgaaacaggtaaagaaaaaaggttttactccggattcgagattgcagaatttgattcaggcagtggtggaaaacagaggtcttttcgggattttgttttcctcgaagctttccttttttctgaataatgctacattaggcattactcattctgattttttcttttgtaagattttaagcaaatgcgttaataataaaaatacctggaattacttttcagtaagttcaggtatttttgtatatatagagtagccaactaaacgatacgaaataatatggaaccgctaaagcatgaatgtggagtagcgatgattcgcttgctgaaaccactagagtattatcaggaaaagtatggcacgtggatgtacgggcttaataagttgtatttgctgatggaaaaacagcataatcgcggtcaggaagctgcggggcttgcgtgtgtaaaacttcaggctgatccgggagaggaatatatgttccgcgaaagaggattgggagctggagccattactgaaatattcggaacggtacacagctatttcaaagatcttacagccgaacagcttcatgatgctgaatatgcgaaaaagtgcttgccctttgccggagagctctatatgggacacttacgttattctacaacaggaaagagtggtatttcgtatgtacatccttttctgcgtcgcaataactggcgtgccaagaatcttgctttgtgcggaaacttcaatctgacaaatgtggatgaaatattcgccgacattactgccttcggacagcatcctcgtaaatatgccgatacatatatcatgttggaacaggtgggacatcgcctggaccgtgaagtggagcgtctttacaatgagtgtaaggctgaagggctggagggtatggatattacacatgctattgaagaccgtattgatttgactaacgtattgaagacatccagtccgaagtgggatggaggttatgtgatatgtgggctgactggtagcggtgaaagttttgctgtacgtgatccatggggcatccgtccgggattctggtatatggatgaagaaatcatggtgctggcatccgaacgtccggttatacagacagcattgaatgtgccggctgacagtattcatgagttactgcccggacaagctattctggtagacaaaaagggagaaatgcgtctggctcaaatcaatgagccgaaagaaaagaaggcttgttcgttcgaacggatttatttcagtcgaggaagtgatatcgatatttaccgcgaacgtaaactgttgggtaagaaactggttaatccgatactgaaggcaatagactacgatgtagtacataccgtattctcttttataccgaatacagcagaagttgccttttatggaatgttggaaggtttcgataactatctgaatgaactgaaagtgcagcgtattgaggccctgggacacaagccgagtcatacagaattggagcagattctgtcacagcgtatacgtagtgagaaagttgcaatcaaggatatcaaattgcgtactttcattgctgaaggaaatacacgtaatgaccttgctacacatgtgtacgatataacttatggcagcttgattccttatgaagacaatctggttattatagacgacagtatcgtacgtggtactaccttgaagcagagtattatcagcatactcgaccgtcttcatccgaagaaaattgtgattgtatcttcttctccacaggtgcgctatcctgattattacggtattgatatggcaagtatggaacagtttattgctttcaaggccgcgatagcattgcttgaagagagaggaatgcagcatgtgatagaagaagcataccgtaagtcgaaagcacagcttggacttccgaaggaagagatggtgaattacgtgaaagagatttatgctccattcaccgacgaagaaatttctgccaagatggtacaattgctgactccggctggcacacaggcaaaggttgaaatcgtatatcagacacttgatggattgcacgaggcatgtccggcacatttaggtgactggtacttcagcggtgattatccgacaccgggtggagtgaaactcgtcaatcaggcatttatcaattacgtagaagagatttatcagttctgaaacgttacagaacgaagccgctagctgttttggtgcctttatataaaaaagaaaaacaatattaaagaaaacgatatagatagaaaatgagaaatgttacattaatcctcgacgacgggagccgctttcatggcaagtcgttcggttatgagaagccggtagccggtgaagttgtgttcaacaccgcaatgaccggttatccggaaagcttgaccgatccttcgtatgcaggtcagttaatgacgctgacttatccgctggtgggcaattatggagttcctcctttcacaatcgaagcaaacggtctgcctacttttatggagagtgaaaagattcatgccgaagcgattattgtaagcgactacagtgaaaagtattctcactggaatgcggtagagagcttgggtgactggttaaagcgtgaacagattcctggtattacaggtattgatacacgtgagctgaccaaggtattgcgtgaacatggtgtgatgatgggaaaaatcgttttcgatgatgaaccagacaatgttcctgaagcaacttatgcgggagtaaattacgtagataaggtgtcatgcaaggaagtaatccgttacaacgaaggtgaaggcaagaagaaagtcgttcttgtggactgtggcgtgaaatcgaatatcatccgctgtttgctgaaacgtgatgtagagattatccgtgtaccttggaactacgatttcaattcgcttgagttcgacgggctgttcatttcaaatggaccgggtgaccctgatacttgtgatgctgctgtacagaacattcgtaaagctatgcaaaatgaaaagctgcctattttcggaatctgtatgggtaaccagttgctttcgaaagcaggaggagcaaaaatttacaaattgaaatacggtcaccgcagccataaccagccggttcgcatggtaggaacagaaaagtgtttcattacttcacagaaccacggttatgccgtagacaataatacattaggagccgattgggaacctttgtttatcaatatgaatgatggttctaacgaaggaatccgccacaagaagaacccttggttctctgcacagttccacccggaagctgccagcggtcctaccgatacagagttcctgttcgacgagtttgtaaagttgctgtaatccattaaaaacaaaagaaaacaatgaaagaaaatataaagaaagtattattgttaggttccggagctttgaaaatcggtgaagctggtgagttcgactattcaggttcgcaggcacttaaggcgttgaaggaagaaggtattgaaactatcctgataaatccgaacattgctaccgtacaaacttcggaaggcgtggcagacaaaatctatttcttgcctgttactccgtatttcgtagagaaagttattgccaaagaacgtcctgatggcgtattattgtcattcggtggccagacagccttgaattgcggtgttgctctttacaaggcaggaatattcgagaaatacaatgcacgtgtactcggtactccggtacaggctatcatggatacagaagaccgtgaactgttcgttcagaagttggatgaaatcaatgtaaagaccatcaagagtgaagctgttgaaaacatcgaagacgctcgccgtgctgccaaagaactgggttatccggttatcatccgtgcggcatatgcactgggaggtctgggatctggtttctgtgataacgaagaagaactgaacgtactggctgaaaaagcattctctttctctccgcaggttttggtagaaaagagcttgaaaggctggaaggaagtagaatacgaagtagtacgcgaccgtttcgacaactgtattacagtatgtaacatggaaaacttcgacccgctgggtattcataccggtgagtctatcgtaatagctccttcacagacactgacaaacagtgaatatcacaaacttcgtgaacttgcaatccgtattatccgtcacatcggtatcgtaggagaatgtaacgttcagtatgcgttcgaccccgaatcggaagactatcgtgtaatcgaagtaaacgctcgtctgagccgttcttcagctttggcttctaaagcaaccggttatccgttggctttcgttgctgccaagttgggtctgggttacggtttgttcgatttgaagaactcggttactaaaacaacttctgcattcttcgagccggcactggactatgtagtatgtaaaatccctcgctgggacttaggtaagttccacggagtagaccgtgagctgggctcaagcatgaagtctgtcggcgaagtgatggctatcggccgtacattcgaagaagccatccagaaaggtcttcgtatgattggtcagggcatgcacggtttcgtggaaaacaaggagctggttatcgaagacatcgacaaagcactgcgcgaaccgactgacaaacgtatcttcgtcatctcaaaggctatgcgtgcaggctacacagtagaccagattcatgacctcaccaagattgacaagtggttcctcgacaagctgatgaacatcatgcagacttcgaaggaacttcacgaatggggcaacaaccacaagctgctgtcacagcttccaaacgatttgctgtacaaggcaaaacgtcagggattctccgatttccaggttgcacgtgctatcggttacgaaggagaaatggaagatgctatcatcgatgtccgtaaccaccgtaagagcgtaggtatcgtaccggtcgttaaacagattgatacgctggctgccgaatatccggcacagaccaactacctgtatctgacttatagcggtgtggcaaacgatgtacactatttgggcgaccacaagagtatcgtcgtactgggttcaggtgcttaccgtatcggttcatccgtagagtttgactggtgcggtgttcaggcgctgaatactatccgcaaagaaggataccgttcggttatgatcaactataaccctgaaacagtatctaccgattacgatatgtgcgaccgtctgtacttcgacgaactgacattcgaacgtgtaatggatatcctcgatttggaaaatcctcatggcgttatcgtgtcaaccggaggacagataccaaacaacctggcacttcgtctggatgctcagaaagtaaatatcctgggaacttctgccaagagcatcgacaatgctgaagaccgcgacaagttctcggctatgctcgaccgcatcggtgtagaccagcctgaatggagcgctctgacttcaatggaagatatcaacgcctttatacagaaagttggattccctgtattggttcgtccgtcgtacgtgctttcaggagcagccatgaacgtatgttctaatcaggaagagctggaacgcttcttgcagctggcagccaatgtatcgaagaaacatccggttgttgtaagccagttcatcgaacatgccaaagaagtagaaatggacgctgtagcacaaaacggagaaatcgtagcatatgctatcagcgaacacattgagtttgccggagttcactcaggagatgcaactatccagttcccgccacagaaactgtatgtagaaacagttcgccgtatcaagcgcatttctcgtcagattgctaaagaactgaatatctctggtccgttcaacattcagttccttgcccgtgaaaacgatatcaaggtaatcgaatgtaacctgcgtgccagccgttcgttcccgtttgtgagcaaggtattgaagataaacttcattgaacttgcaacaaaggttatgcttggcttgccggtagaaaaaccagaaaagaacttgttcgaactcgattacgttggaatcaaggcaagtcagttctcattcaaccgtttgcagaaagcagaccctgtattgggagtcgacatggcttcaaccggagaagtaggatgtatcggtgaagatacttcgtgtgctgtactgaaatcaatgctttcagtaggttaccgcattccggaaaagaatatcctgatgtcaaccggtacaccaaagcagaaagtagaaatgctgaaagctgctcaggagctgaaggcaaaaggttacaatatctttgcaacaggcggaacatcaaaattccttgccgaaaacggaatagagaatacccgcgtatactggccgagcgaagaaggacatccgcaggcattggaaatgctgcataagaaagagatcgacatggtagtaaatatcccgcgtgacctttctgccggagaactcgataacggttataagattcgccgtgcagcagtcgacctgaatattcctctggtaacaaatgcacgtctggcaagtgcctttatccatgcattctgcacgatgactatcgacgatatcgctatcaagagctgggacgaatataaataatcctgcctcttgataaaataaatattacttaagcgccgcttcggaaaggtaaaatttccgggtggcgctttttctttaaaaaggctgtttcctcgtgtcaggattcagccttttgttgttcctttacgcatttttttatgatatcgatgtaagtatattcccgaacgagcgactaaataaagtaaaaaacatgtagaaaccagatgctgtatgaataaaaccctgcaacaagaaaaagactttctcctgctgattgagtcgcacaaacgagtcatttataaagtctgttacatgtatgcaaccgatgatgaactgttgaacgacttgtatcaggaaatagtaatgaacctttggcgcgcctatcccagttttcgtggcgaaagctctccagccacgtggatataccgtatcagcctgaacacatgcatttcgtaccggcggaaatcaaaacatcagattcaggctgtaaccttaccggtcaatttcgaagcttttgccgaagacgacggaaacaaatcgtcgcaattgcgtgagctttaccggttgatacacgcactcaatccgctggaacgggcacttatcctgctttggctggaagaaagaagctacgatgaaatagcccggatagtgggaatatcgaaaaacaatgtcggtgtccgtctgaaccgtatccgtgaaaaactgaaaaatatgtcgaaccaataaatgtctgctttatggaacttgaagaactgaaaaatcaatggaacttgcttagtgaacaactgaagaagaatgaaatcatcaatcatgaagcgataaaaagaatgatagaaaaacgtaccctgagcgcccgcgaccgtctgataggggccaatgtaattgccgtttttgtactttcaggcatgctgtttctgtttccgctagcagctacccgagtaattatcagacaagaacttctctggatgttctacatcgtgtttccactcctcattttatattcactatggaacatacatgtattgtataaattcaatctggctacccgtaccttactcgaactccaccgttggatattatcctataagcggaggcttcgcatagaaatctggtgtactccctttcttacactgggactttttatctctgttttccttattcatcaccactaccgcaatctgcttatggttgttttcgatatcctgatgctgtctgtggggatgatggcaggatatatatgttatcgctatgtagataaacgttcggtagatgaaatagagcaaggaatgaaagacttgcaggacctggagtaggtaaatacatcagaaaaacaggatagttggcagtgttgtcggattgccgggcaacattgccaaaaccactgctgaagttttatgaaaaacatgctgaatttttgctagaactttgtacaaactttttggaagtttgtacgaaagataaaataatctgtacaaataaatgacataatttgtacatcttttctgaaacatatgctgaagactttgggaaatgatggacggaagattgtgcccttattatcaaaaagaaagcgaccttcgaaaaaagaccgctttaaatgttttcacaacggaataatccttattgtgatttgcttcaatttagataatacaaatatagcagatataattcatatcaagaagattttttatatcttttttctatctttgaaaaaatgaataaaaaaaaattggttatgaaaaagatattgggtctagatttaggaacaaatagcattggctgggcagtgataaattcttcagttgacgatgaaggaaaagagaagttgacaagtatatcttcttgtggcagtagaattattccgatggatgctgcaacattaggagattttgataaaggaaatgctaaatcttcagtcgcagaacggacacgactccgtggaatacgtcgtttgctggagcgtagtttattacgcagagagcgcttgcatcgggttttatctgttatgggatttttgcccgaacattatgcttctcaattagaccgatatggcaaattcttaccggaaacagaacccaaactggcttggtataaagataatacaggtagctatagatttttatttcaggattctttcaatgaaatgttggaggatttccgcttgtaccatcccgagctggtagcagaaggaaaaaagataccttatgactggactatctattatcttcggaaaaaagctctttctcagaaaatagccaaagaagaattagcctggatacttcttaacttcaatcaaaaaagaggatattatcagttaaggggagaagaagaacaggaagataataagaaatcggtagaatattatgcactgaaggtagttgcggtagaagattccggtgagcgtaaggggaaagatatctggtataatgttaagttggaaaacggctggatttaccgtcgggccagtagtattcctttagactggacaggcaaggtaaaagaatttgtggtaacaacagatttagatgatgcgggaaatcctaaaaaagataaagacggcaatgtgaagcgttcttttcgagctcctaaagaagacgattggggattattgaaaacaaagacccaaacacagatcgatgaaagcggtcagactgttggagcctatatttttgattcattgctccgtatgcctgatcagaaaataagggggaaacttgtgcgcacgatagaacgtaaatattataaagatgaacttcgtaagattttgctcaagcagaccgagtttcatgcagctttgcaggatcataatctgttgctttcttgcatagaagaattatatccaaacaatgaggcacatcgcaggctgctatcttcttctagttttacttgctttttgctggaagatattttgttttatcagcgtccacttaaaagtcagaaagggctgatagatgattgtccgtatgaatcgcatgtatataaaaaggatggtagtttgcaccgtactcctttaaaatgtatatccaaatcacatccgttgtttcaggaattccgtttgtggcacttcctttctttcctgcgtatttatcagcgtgaaagaatgatagatggttctcttaaactggatgtagatgtgactaatgaatttttgcagaacgaagatgattatgtgaaattattcgactggctgaatggacgaaaagaaatagatcaaaaaacaattctggcatacaaacctttcggattaaagaaaaatgaacaacctaaatatcgttggaattacgtagaagacaaaagctatccatgcaatgaaacaagagcagatatgatatcccgattaagtaaggctggagtttcagaggggttcttaacagaagaaagggaggaggccttatggcatattttatattctatatctgataaaaaggagttgacaaaagctttaggtacttttgctgagaagaatgggctgaatgaagcttttgttgagctgttttctaaaatgccaccttttgaaagtaactatgctgcttattctcttaaagcaatccgtaaattgcttgcactcatgcgtatgggtaaatattggaatgagcaggatattgataagcaaacgcgtagtcgaatagaaaaaattctgacaggagaatatgatgaaactattcgtactcgtgtgcgtgaaaaggctatacatttaacggatatatcttctttccgtgggcttcctttatggttggcatgttatgtcgtttataatcgtcattctgaagcaaaagaacttgtaaaatgggaaactcctgctgatatagatcacttcttgagtaaatttagacagcattcgttacgcaatcctattgtagagcaggttattatggaaacattgcgtacggtacgcgatatttggaaacaggaaggacagattgatgaaattcatgtagaattaggtcgtgaaatgaaaaatccggctaaagaacgtgcccgtataacagcgcaagtattggaaaacgaaaataccaatttgcgtataaaggcgctgcttacagagttcatgaatcctgaatttgagatagagaacgtccgtccttattcaccaggtcagcaggaaattttacgaatctatgaagaaggagttttgtcgggtgttgcagaaaaagatttgcctgaagatattatttcgatattgaaaaagttcagagaaaatgatgtaaagaagcgtcctactacctcagaagtcttgcggtataaactatggctagaacaacggtaccgttcgccttataccggcaggattattccacttggcaaattgtttactcctgcttatgagatagagcatgtaatacctcagtcacgttattttgatgattctatttccaataaagtaatttgcgaatcagctgtaaataagttgaaagataactgcttgggatatgaattcattaaaaaacactcaggtgagattgtggaattgggcaatggtgagaaagctactgtttttacatcagaagaatatgaacattttgtgaaagagtcttaccttggtaatggtaagaagatgaagaaactgctgttggaagatatacctgataactttatcgaacgtcagttgaatgatagccgatatattagtaaagtcgtaaaatctttgctttcgaacattgtatgtgaagagggcgagcaggagggtatgtcgaaaaatgttatcgtttgtacaggtggagtaacggaccgcttgaagaaagactggggagtgcaggatgtatggaaccggattattcttccacgttttctgcgtttgaataaaatgacggacagcacgggtttcacttctgtaagtacgaatggacatttattacctgccttgcctttacatttacagaaaggttttaacaagaaaagaatagaccatcgtcatcatgcgatggatgccattgtgatagcgtgtgccgatagaaatatagttaattacttgaataatgcttctgcacggaaaggttctgaaatctctcgttatgacttacagcatttattatgcgataaagtaaagacagactcgaatggcaattataaatggatgttacgtaaaccttgggatacgtttacgcaggatgtgtatacagcattgacaaatattgtagtcagctttaagcaaaaccttcgggtaataaatcgtactacgaattatcatcagcattataatgaatcaggagaaaagaaaatgattccgcaggttaaaggtgatcgttgggcgattcgtaaaccgatgcacaaagatacggtatatggtgaggttaatttacgtagggagaaaacacttcctttgaaagatgtgctcaataatccatcgattgttgtggataagtcattgaaaagcaaattgcatgagttgttaaaagctcaatatgatttgaaggcaataacaaagtattttgaggcacaccaagatgtctgggccgatattaatttgaagaaaataaaagtctattattttacgaaggaaacaaatgagcgtttttttgcaacacgtaagtcattggattcaagctttaatcagaaaaagattcaagaggaagttacagatacaggtatacaaaggattttgctacgtcatttgcagctaaatgataacaattcggatattgctttttctccagatggaatagaacgtatgaatcagaatatgactattttgaatgatggtaaggggcatcaacctatttataaggtacggacttatgaaaaagctgagaaatttgctgttggagaacatggtaataaagttaaaaagtttgtagaagcagctaaaggaaccaatttgttttttgctgtatatgaatctatacaagaagatgaggctacaggaaagcaagtacgtaaacgtacttttgcgactatacctctaaatgaagtcatcaagcgtaaaaaacaaggactatctgttgctccggaagattcgaatggaaatctgccaatatttgttttatctcctaatgatttggtttatttacctacggaagaagaacgtaatagtggtaaggtaactcaacctctggatagagagagaatttataaaatggttagttgtactgggaatagattatttctagttccttatatggttgcttcacctatatatgataagaaggaatatacttcattaaataaaattgaattgacggatgataaaatttctataaaagaacggtgcattccaattctgatagatcgattaggaaatatatctataaattattgataacctatttaatactatgatcaagaaaacattgtattttggtaatcctgcttatctatcattgcaaaataatcagttggttataaaacttccggaagtggagcgtaatgcttcacttccagaaaattttaaaagccaatcggttattaccagaccgatagaagatattggtttggtgatattagatcataagcagataacgattacctcaggagtgcttgaggcgcttttagaaaacaaatgtagcgtcattacttgtgataataaaagtatgcctgtagggttattattgccattgtatggaaatacagttcaaaatgagcgctttagagaacaattaacggctagtattccattgaagaaacaattgtggcaacaaacgataaaagttaaaatacagaatcaggcaaatgttctacaagattgcttgcaggaaaatcataaatgtatgagagtgtgggctgaagaggtgaaaagtggtgatcctgataatttggaagctagagctgcggcttactattggaaaacactttatgctcatattccagaatttacacgtgatcgtgatgggatacctcctaataatttattaaattatggatatgcaattttgcgtgctattatagctcgtgccttagtttccagcgggttgttacctactttaggaatacatcatcataatcgctataatgcttattgtctggctgacgatataatggagccttaccgtccttatgtcgataagcttgtatttcagcttgttaaggattatggtgaaaatgtagagttaacaaaagaaattaaatctgttcttttaacgattcctacgcttgatgtcgtcataggtaaaaagcggagtccattaatgatagctgccactcagacaacagcttctttatataaatgctttagcggagaacttcgtaaaattgcttatcctgaaatgtgatggatagatacagtgaatatcgtgttatgtggatacttgtattttttgatttgcctacggaaactcagaaggacaagaaagcctatgcattatttcgtaagaatttacagaaagacggatttactatgtttcaattctcaatctatattcgtcattgtgcaagttatgaaaatgcagaagttcatatcaaaagagttaaatcttttttaccagagttcggtcaggtagggattatgtgcataacagataaacagttcgagcaaatagaattgttttatgggaaaaagcctcataacaaaaatgtagcagggcaacaattagaactattttagaaataagaaatcccgctttttatagcgggattttcttgtaggaaacatttcttttttatttctaattttagatgtaatttgttgtattatataggattacattaattgagctgtttcctatatcacaaagttactaaattgaaagcaaatcacaacgctttggcgcaattttactgatatcaatgggctgtttcctatatcacaaagttactaaattgaaagcaaatcacaactgacattctgaatagcaccctctttgctagctgtttcctatatcacaaagttactaaattgaaagcaaatcacaacacggattcctctcccgagcctttacgcttcgctgtttcctatatcacaaagttactaaattgaaagcaaatcacaacaaatcatgagagaggctgttaagtcgaaaggctgtttcctatatcacaaagttactaaattgaaagcaaatcacaacaatcatctctactttgaactgcaaatctagctgtttcctatatcacaaagttactaaattgaaagcaaatcacaactcgaagcgtcttcgcttgataccgtcttaggctgtttcctatatcacaaagttactaaattgaaagcaaatcacaactagaaacctgtacaaccttggcgcaggtttgctgtttcctatatcacaaagttactaaattgaaagcaaatcacaacgctccggatgaagtggctttcacaccgcctgctgtttcctatatcacaaagttactaaattgaaagcaaatcacaactgtacattcaatcttggttttccttgctgagctgtttcctatatcacaaagttactaaattgaaagcaaatcacaactcgtaagcggtgatagtatcagtcagcagcgctgtttcctatatcacaaagttactaaattgaaagcaaatcacaactgcctttgccaacggaatctatcaccagcagctgtttcctatatcacaaagttactaaattgaaagcaaatcacaacgactgaaaggtaaataacggttaaataagtgctgtttcctatatcacaaagttactaaattgaaagcaaatcacaacggttgattagtgtttcctactagcttagtagctgtttcctatatcagtaagcattctattttccgccacgacaattttatcggctgtttttcagccgataa

SEQ ID NO: 1324 - DNA, 16919 bp, synthetic construct
  source 1..16919: mol_type = other DNA
  misc_feature 1..16919: note = Synthetic
actcagggacgcctttttgcaccaagggttcgtggacctggacaattcctatgacctgattgtacagttgttctttgaactggatcccaacgggcaaattaccaggaccaacccttctgtggaagcattgctgcactacaacgaaggggatctgaacggactaccatttagggaactcttgaccaaggactcccaaaaaggctggaaaaaactcatggaggcctcaaacatgggccgtgtttgggaaatgaccgtaaagttgacctttatcgagcgaacagggctccacctgcccgccaattgccacatcgtgcactttccccaaaaagaaagggaaaagggaaccaccatggtcaccgcctttgatatggcgaggaatgcccggtcccaagggccccatatgaaaaagcaagtggaacaacggctacggtaccacaacctcttgccaaagccccaaaaaagaaagacctatatcctccatgtcacggattttgaaaacctcagggtcgcggaacggtatatcatggagcacttggacaggccactgccttcgatcaaggagcttgcccatctgtgcggtaccaatgagttcaagttcaaaaacggctttaaggaactcttcgggatgtcggccttccaataccaaaaacgagaacggctcaggaaggcccatatcctgatcgagcattccaacaggaccatccttgccattgccaaaacggtagggttcaaaaagggcaaccactttgcacgtgaattcaaaaaacgttacggatacacccccacccagctacggaaactctcaaaataatcccttacagagcctaaataatccctcacagatcctttgctccccttaattttaccactgtaaatcaatagtttacaatgaacggccagtgcaacataaaatataaagggaccatcgtggaagccatatgcctcctctacaccgttctttttgtctatgcgggcagcagtaaacttttgggccttggggacttcaaagcccaattggcccaaaccggggtcttagccccctttgcggggtgggttgcctggttcgtgccccttgttgagatcctccttgccatactgctcttgaccaaagcgttccgactggccgcactttacggggcccttgtactgatggccctgttcaccacttatatcgcttggatgctccgattcagcgaacatatcccctgctcctgtgggggcgtcatctcctccatgggctggaaatcccatctggtgttcaatgcctgttggatggtactggccctgatcggtatcgtacttatggaaaacaaaaaatcaaactttaaaaatactgtgcagtgataggggaagccgaaaacctaagaaaaagagtaggcatcaatatctaatccttaatactatgaaaactggatttgtaaaacttgctttaccggccattgccatcctgttggcggtcggactggcctttgcgaccgaggaggaacccatgttgcaagtggcccactattaccatcccatcgaggggtggcagaccaccatggtagatgaaaattgcatcaacggcaatcaaataccatgcacccaggatggatatcaattgtatgaggaaccctccttcagcagcagggaacttcgcaaggattaatatccctgcccattgggccttcaaacaaaaggtgcccttcgccgggcacctttttcgactaatccaaataaaccgatgaaacaaacaaccaagccgtctttcatggcttatctttacaaccgcttaccagagtacttccatcttctttaggcacaattgccaatgtcccaaagtagccccccttttgttccgtttgatgcccttttcaatctcccttttcaaatccatcattcgctgcatcaaaatccccttcccataatcggtatggtcaaatgcggtctccatgggattaaaacccgttcttttcttttgcaggatactgaccaccccatcgatataggtcatctggagttcctgtctccttgggtccacttggcccatatggcccttcaattccttgaaaagtccattttggacccgtatcaagtaggcttccagcaaccctttttcgccccatcgggtttccatatgctcaattcgtttcagtcgcagggcaccgatcagatccatgaccaggaattgttggtgtcccatgaccttgtcggcatgtctggaataatttgtcttcacatggaacatgggttcggtcagccatgaaggggcatccatggcattctccaataggaaatccaaggcttccatctgctcttcccagggtatcgggtcatagggatccccggatccatccaggggccgataatgcaacctatagccgcctaccacggaaaggacatgccccatatggtcgtgccatagttccaccgtctttgcatatagccgttgcaaccgcacattgtccttatctccctgcacagcattgggcaacaaagccatgaccctttttatgtttttcagggccaattcggtgctccgtaccgggtgatcggtttcggtcacctcgtccacttgggccggaccggccttttccatccgtccataattgaaacggtaccaaggtaccgtatcctgccaacggatcatccgttccaattcggccgcttccacttctggcggtgtcccttccggaaactcccgatacccccatcggatatggtagcgatcggcaggcccgacgtgctgcaacaatgactccggaggaatgctgtcctcgggttgggggatattacagctccgggtgtagttcatcacactgggggtgtgccccattttcctcaaccatagactatcgttcattttattccaagggtaggcgtgttccccgaaattgccgtccatcaagccgaacacatgtcccgcctcatgggcggtcaattgttggtacagggccccgatcagctcatccgggaaggggaaccgttgcgccctcttgtccaatggtgccgaacgcacaaaatattgttccgacacatcacggacgggggcctccaataggatgtccccgcgaaggatctccccagacctccaatcgaccacatagcgaatggagccgccaaggcgttcattttcatagctccgcatgtccctttttgatgtccagtagaccatgttggaatggatactgtgggcctgccactcatccaaactgtcaagctccttgacgaccagggcatccttgaaccccgccgcctcaaaggccggcaaccactcctcgatccctgccttgacatagggcctccattttttcgggacttccggtgagatcagaaaggtaatcggggcaacgggaacgctcacctccctatccttgaactttttctccagcctccatctaaggatgttggcccgaatgttctggagcccttcgtgaaacgtatcatccgcttcctcgctgaagaatcccatacggtaatcgaaccgcctgcccttcatcggcgctttcagggcactgaacccatagtacaggggaacggccaccttggattcgtttttgaccatcccacgtctgaccttgaccaacgtttcccctgccaggttcttggtggccaggaccagggacagctggggaacgggcggcccaaagaccaccccgtaccattgtggccattcgatttcctgtcgcagcaaaaggtccgtggccttcaccacaaagttcccctccccactgagatctttctctatcgggagtatggcaaggatattctcctcaaggggaagcttctcgtggaaggtgatcatgacgcccgccgaggatacaatgctctgctgcttgaacaacatattgtccccgtggaccgaccaggccacttgcataaaactgcggcggcgccaatcgtagcaaacaaacatcatggggcggtcgagtacctcccggggtatgtccaggtatacttcgccccccttcatgaaagaggtcaaaaaaggctcggcaccgaccggttcgatggcctgtccgaagggatcgcccccttgctcggtggctgcagcccctacataggaccaccacaaacaaagggtcaggaacataacatatgctttcataacgtatcgctttaaaaatgtgtaccccatacccgtcctaatagcccgtgttttgtggtaaaaggttcggattggtctccagttccgcctccgggatgggcaacaatacatccgtgggcctccaattgggtttgatcggtcccaaaacctgatccgcccttcccgatcgtttgagatcgaaccaccgatgtcccccttccgtgaagagttccaccctgcgttcctgaaggatggcatccattatcgattctggtgtatcggcaccactgtcgggcagccctgccctattgcgcagggcattgatatcctcaagggcaccattcttatcgcccagttgcagcctggcctcggcacggatcagatactgctcggccaccctgaaacgaatggaatattccagggaccgggtttcattgatatcggccttgtacttatgggcataatggagtgtgacggtattgtcggcatcggacacgctggagacccatcggtcaaaccgtagatcgccactttcaaaagcgcccaaaagtccttccgtcagggcataggtctggccgggcaccgattggatgatcaactgaatggcttcctgcgtattcctgatattatcggcatccgccttgagctgccaaatggtctcgggcgaccctttcaggaacaccttgtccaggtcgggctccaagggaaaggcatccattaggtccgtggccagcaaagcggccttttcccattgccccgcatagaggtacgtccgtgccaaaagggccttggtggtaaaggcatccacatatatccgttccgaagaaatcgggccaccgtccccaaacaatgccaaggcttcctccaggtcggcaatgacgcgatcgtaaacctctgcggccgccatccgtgaaaccctgttgttcaccatataatccgtggtcgtgatatagggcacatccccatacagggataccagcaaactgtggatataggcccggataaaaagggcctgtcccctatacccccgcttttcctccccggtcaggccctgggaggactccacgccctgaaggatgtcgttggcaccatagatgagctcgtatgcctggccccaccaagcccttatcagcccgttaccggccagtacgttgtgattgtacaactgggcataatcggagttgaacccgtaataatcgagttcatccgcatagattcccatggcggtggtcaggccataaaaacccgataccatgccctgttcgtcccgcatggcatggtacagctgggccaaggccgattccacggtggccgggtcttcaaaaacggtctcggataccaaggtgttcttgggcggttcgacctccacaaagtcagtgcaaccgattaggctaagtgccatgagcttgaagagcagggaacagcgttgacgaaaaagacgtatgcatcgagggccattgcccaaattggtagatattgttttgttcaaaatgttcattccgataggtttaaggttaaaaactgagttggagtcccaatgtgatctggcgcaacgggggcaatcgcgtattcgagggctgctcgggatccggtcccttgtaatcggtcaaggtccaaaggttctgaccctgtaagtatacattggcatccaatccgttgcccaatccgggaagccggtagttgagggatatattccgcaaccgcacaaaggatgcatccgataccgccgcattgctctcctgttggaattcgcccaatcccccggtaggtgccaatccactgtaggccctttggatatccttgacatcgccaggcccctgccaacggtcgtagagttccacgggcacattgcccctaaacccaggggtcgattggtaccgtaaggtattgtaggccttttgtttcttgaactggaagaaaaaatccaaggtcacgttgcccaagctcagtgaattgcccagccctccgtaatattgtggcgccagatcttccacccattgccgatcttccgtgctggtgatggccccatcaccgttgtagtcctcgaactggtaggaacccgtctcgggatctacgcccaaagcgtggtagagccttacaatggtcaggggctcccctataatataccggttggcaaaggtcgatgtctccaatccgtcaaattccaccaggctgttcttgggaacggtcaggttaaaggtggaggaccatcggaatgcccgggaccggatattgagggtttggatatcgacctcccatcccgaattctccaccagggcatcaaagtttcccgtcagttccgaaaagcccgtggtggccgccaagggtatgcccaccaattggttggaggaacggttacggtaccaaaccgtattgaccatcaaccgatcctggaacaagcccagttccaaacctgcctccaacttttggttctcttcccaaccgaactgcggattgaagacaccggtgggctgcacggcggtgaccccgtcataatcgcttccggtcaccgtataggtatcccagaaccggtagtccccgatgttatcgcttcccgtcgttccatagctggccctcagctttccgaagctcagccatgagccttcaccaaatatgggttcctcggaaaacagccatgccaggccaagggccccgaaatttccgaactgtttgccgggaccgaaccgggaggacccgtcccttctcccggtaaggttaaggatataacggcccgaaaacttgaggttgacgcgaccaaaaagggcattgtaccgatattccccgtccgaatcggaaacggcctccacaccactggccgccgccatgttcccgatcaacccgtcattgggaaatccggtgcccctcaacacgagctgttgggtggtctcctgttggaaggtcgtccccatgagcacatccatggaaaaccatccccaatcctttttccagttcaactgcggctccacgatccatgactccctttgggaggcattggtggtcaaattggaatagctctgcggggtaaggcccaggccggggtttctggccgaactgggcatggtcctatacgaatccaatcgataatccgtgtatcccaggctggtcctgaactccatgtcgggcatgatatggtaggagaccgtggcattggacaccagggtactggatcctgacacaaactgttcgtccaatgcggccaagggattgtcccaggtattgttttcccaattgatgttcccttcgtcgtcatatacccgaggggcattgggttccaaggtataggccatgacggtaaaatcggtccctgggagcttatggtcctcatgggcatagcccaaggtaaggtccatcttgaagcgtccattgtccgaacgatgggacaggctaccgtggatgttggcacgtttatagtcgttgtccccgggaaataccgtggtttccttcaaataggccccactgaccaaaaactgggtccggtcactgcccccggacaccgacaattggacattgttccggtaggcggtgccgccgatcagttccctttgccaatccgtatatcggtcattgtcccaggatttgatatcgggccagacaaaatcaaagtccgggttctccaaaaaggaaccatatccatcattgatgattccctctcgcctgacctccaggtactgttgggtgtccattaggtccagaaaccgggacaccttgcccagtgtcgtgctcagccgggcatcaaaccgggtcttcccggcctttcctttcttggtggtgataagcaccaccccattggccccacgggaaccgtagatggccgtggcatcggcatccttgagcacctcgatgctctcgatgtcgttggggtcgatggcgtttagcggactgatgttcccgccaacgatatccctggacacatcataggaacccagggactgggctccaaagggcaccccgtccacaatgaacaaggggtcggtcaccccacttagaaagtttcggccacggacctcgatggaaaagccgccaccgggcactcctgtgttctggacgatgttgacccctgacaaatgcccttgcatggccgccaagggattgcccacgggctgctgctcaatcacatccgccttgatggtggcaatgttcccggtccgttccttcccggaaacactgtagtaccccgcattgaggacaacttcgcccaattgggtcacgtcctcctccatggagacttggatctcttccctgcccccaatgggcacggaaagggtcttgaggccgaccatggaaaagaccagtacatcggtagggccagcttgaatggaaaaggtaccgtcgaattcggaaatggtaccgatattcttggactccaccacgatgttcaccccggcaaggggttcgcccgtgccatcggtaacggtaccggtaacggtgaactgtggtggttccaggttattccccgcccgcattttttgtgtacaaatcggtatcaaaaggacattcagcagtataagcagtaatgccctgtgcatgcttgttgtcagttgttgcataaaattgagttcgtttggttaaagcgttagttattattgtattcccatgggacagtcccataaccgcccgtgggtcgttatccacactgcccaaaaaaagccggcataaagccgtacctttaagaggacattaaggttcggacataggccatcctgtccatgtggcaaaggcacatggaatcgggattcctaaaagaaggactatgatctctgagtagggacggttaccccaaaagtgtacgcgtcagttatgggccggaagtataatataaaccgaaaagcaagtagcgtaggacccacaactatagtccatggttatacgggattcttcggcttttttatgaagaggatatcgaagaccgtgtgataggctccataaatggaacaaaaacaaggtgtgaatcccacataaaaatgttgccaaatgtttcccataaccttttgtttgggcaatccccgaaaggaccagaagaaaccaaacgccaagaaacaagttgggcgtggaaactcaacttacccgctagcggtactggtataccttgcactgataagagagcccacgcccgggtcgtgagccaatctgcttatcatctctagtgcaaaaattaccagttttctagcgagagactcaaagcgatagcttcaaatattgtccatacgaaggatcgcaaatttatgatattgggataaatatagtaaacctttttaaaataacacatatatgtgttgataaaatctatttgaaatggcaatttttgattgatgtcaaataaagaccttaataagctattattaaacatcggcgctataattaaaaagcaccgaaaggaaagaggtctatcacagctaaacatggggttagatattgacatgtcagccaatcaaattggtagaatagaaagaggtgagagtaatccaacagtcgtaacactacacaggattgccaattattttggttttgatattaaagaattctttaatacccaataattaaatatttgatatctgactttttacagaaatcctcatttccttatcgaaaattcttatattaattcccacaccacaaaactttattgacgagaagaaggccgtgcaaacttgtgtattggcaacaacttctgaagaatatatttgagaaagttggggtaaccagaaagtacgttaattttaaaatatttagttataattaaaaagccccgaattggaagtcgaggcggcttaatgttttcacaacggaataatccttattgtgaattgctttcagatgtgtaaatatataaaaagttgatgaagtaccaaataggtttttccgtaatggatcatcttaaaatattattaatttacaactttaaaaagttccaagtaaatcaaactttccaagagcatgaaacaaatattaggactggacctaggtaccaacagtattggatgggcattgattaaacaaaattttgaagaaaaaaaaggtcaaattttaggtgtaggatctcgaattatcccaatgagtcaagacatattaggaaagttcgaatcaggacaatcacattctcaaacagcagaaagaacaggttatagaagtgtaagaaggctatatcagcgagacaatcttagaagggagcgtttgcaccgtgtattaaatattttaggttttttacccaaacactatgttgacgccattgattttgagaaaaagttaggacaatttaagcccggaaaagaagtaaaactcaattatgccataaacgataaaggcaagcacgaatttattttccaagcttcttttaatgaaatgcttagtgagtttaaagtagctcagcctaaattgttttataaaaaagaaaatggtgaagaaactaaaattccatacgattggacgttgtattatctacgtaaaaaagccttatctaaacctttgactaaggaggaattggcctgggttattctcaatttcaatcaaaaacgagggtattatcaattgcgaggagaagaaattgtaactgacgacaccaaaaaagaagaataccataatttaatagttgtagacgtacaagaaactgaagataaaaacgccagaggaacttggtataatgttattcttgaaaatgattgggtgtatagacgccaaagcaaagagcctttaaattcttggattggaaaaaacaaagagtttattgttacgactcaattagaaaaagatggttctttaaaacttgataaagaaggtatagtaaaacgaagttttagagccgtagattcagaaaaagattggatagccataaaagcaaaaacggaacaggatatagagcaatccaataaaacaataggtgaatatatttatgaaaacttgttggataaccctaaccaaaagattcggggtaaattggtaaaaaccattgaacgtaagttttacaaggatgagttcaacaaaatcataagtaagcaaattcaacttcaaccggaactttttactgatgaattgtatcaaaagtgtattgaagaactgtatccaaataatgaagcccacagaacaacgattaaagatagaggattcaaatacctatttaccgatgatattattttctatcaacgcccattaaaaagtcaaaaatcaaatattgcagaatgtcctttagaattcagggtgcacaaacaaacaaatgaagaaacaggggaaatcgaagacgtaaaaaaaggcatcaaagctatatcaaaatcacatcctttattccaagaatttagaatttggcaatggttacaaaatctaaaaatctacaataaagaacagattgaaaatggtactttaaaggatgttaccggccaattactcccagatgaagaggcttgggtggcgttgtttgactttttaaacgctaaaaaagaattggaacaaaaacaattcatcgactattttgtaaaaaagaagttaattgataaaaaagaaaaagattactatcgatggaattacgtagaagataaaaaatatccttttgctgaaaccagagcgcaattcatcagccgtttaagtaaagtggaaggattacatgatgtagaggcttttcttgacgaaaaaaccaaaatgggtaaaaaagagaagagtccatacatgagccgaatggagcaattatggcacattatttattcggtaacagatgttaacgaatacaaatctgcacttaaaaaatttgctctaaaacatgatttagacacggaaagttttgtaaagaattttgagaaatttccaccatttaaaagtgattatggtagttactctcaaaaagccattaacaaacttttaccgctaatgcgtagagggaaatattggaatgaagcacttattcctgatgatgtaaaagcccgtgcggaagctataatggaacgtgtttatgctttgccattaaaatccaattattctgacaaggatataaaacaggctttagaaactgtaagtgatgatgatattccaaaacaactgataaaaagctttgtgccttttaaggataaaaatcccatacagggattaaatacgtatcaagctacatatttggtttatggaagacattccgaagttggtgaaattcaacaatggcgtataccaaatgacattgatgattatttaaaaaaattcaagcaacactctcttagaaaccctatcgtagaacaagtggtaacagaaaccttacgtgtggtaagggatgtctggaaacaatatggagaaggccaaccagatttttttgatgaaatacacgtagagttaggtagggaaatgaaaaacccagccgataagcgtaaaaaaatatcggagcgtaacaatgaaaatgaaaacaccaatcacagaatcaaagaactgttaaaggaattgatgaaagactcttcaatggaaggggacattagggcctactctccaagtcatcaagagattttaaaaatttacgaagaaggcgtttatcaaaatcctaaggcagattattcaaaagtaagcgaagatgagatttctaaaattagaaaaaataataatccaacgctgaaagagatacagcgctaccgcttgtggttagaacaaggctatatttctccttatacaggtaaacccatcccgctttctaaattgtttactcacgaatatcagatagagcatattattccgcaatcaaggtattttgataattcgatgaataataaaattatttgtgaaagtgaggttaatgaaaacaaaggcaataaaacggcttatgaatatttaagtcataagggaggaaatgtagttaacggtcataaattactaacacttgaagaatacgaatcccatgtcaatcaatattttaaaaataataaaacaaaacttaaaaatttattgagtgaaaatgttccggaaggttttataaacagacagttaaacgatagccgttatatcagtaagttggtaaaaggcttattgagtaatattgtacgtcaagatggtgagcaagaagccacttccaaaaacttaattccagtaacaggggctgtaacctctaaattgaaaaacgattggggcttaaacgataagtggaatgaaatcattttgccacgatttgaacgcctaaataagttaacccaatcaaaagattttactacgcttaacactaatggcaaaatcattccaaccgttcctgatgaacttagtaaaggttttaataaaaagagaatagaccaccgtcatcatgccttggatgcgattgtagtggcttgtactacccgagaccatacacattatttaagtgccttaaatgctgaaaacaaaaattatggtttaagagataagcttttgattaaaagtacccaaggtgattacaccaaaacattcctgatgccatgggaaggctttgccatagaagcaaaagaccaattagcaaaaaccgtggtgagttataaacaaaacatcaggatcattaataagacctccaataaattttggtcgtataaagatgaacacggtaacctaaatcttgataaaaacggaaaacctgtaaaaaaacttagacaacaaactaagggcgatagttgggccattcgaaaatcattgcataaagaaaccgtatcagggctttataatattaagacacccaaaggtaaaatagccacttctgtaagaacggctttgtcggaaatcaaaaatgaaaagcatttggctaaaataacggatgaacatattagggatgttattttgcccaatcatttaaataattatttggatgaaaaaggcaaccataaatacgatttagcttttagtgatgaaggaatcgaagatttaaacaaaaacatcgaggccttaaacaacggaaaaaagcaccaaccaatttataaagtaaagatgtatgaggtgggaagcaaattttccatttcagaaaacgacaaatcggccaaaagcaagaaatatgtggaagcggccaaaggaaccaacctcttttttgctgtttattgggatgacaagaaacaaaaaagaaattttgagaccattcctttgcatgaagtcatagcacatcaaaaacaagtggcccatttaccgaaaaaggaacgcctccccatacaaccagaccctaaaaaaggtgtatttttatttacactttcccccaatgacttggtgtatgttcctacggaagaagaaatagaaaatggtgttcatgttgattttgacaatttaacaaaggaaagcattaataggatttttaatgtcaatgatttttcgggtgggacatgctattttacaccaaattatttagctaaatcgatttgtaataaagaagttgatatgcaatatgataagaaaaaaagtaagattacaggttcatttgatataaagacagctagtttcaatggggtttccattaaagaggtttgcattaaactaaaggttaatcgattaggaaatatttcaaaagtctaaaacatgatcaagcgaaccttgttcttcggcaacccggcctatttaagtacccgtaacgagcaattggtcgtccgctatcccgaagaaggtgtaccagaaaaaacagtggccattgaagatctgggctatgtggtgctcgaagacccacagattaccctgaccaatgggctgttgatgaaactggtacagaacaagacggccgtcatcacctgcgacaaacagcacctgccctgtagcttcctacagcccttggtgggccataccgagcagaccgagcgtatgcgccaccaactaaacgccagcctgcccctaaaaaaacagctctggcaacagacggtgatggccaagatagagaaccaggccctgcatttgttggcccgtcaaaaaaaggccctaaaactaaaacgatgggccaaagaggtaaaaagtggcgacgtcgaaaaccacgaggccattgccgcggcctattacttccagcacctgttcgatatagaaggctttagccgcaaccaaaaaggcatcccacccaacaacctgctcaattacggctatgccatcttgcgggcggtgacggcacgggccctgtgttccagtgggcttctgccctccgtgggtatttttcaccgcaacaagtacaatgccttttgcttggcggacgatattatggagccttaccgaccctttgtagatgccctggtctacgatattgtagaaacgggctgccaaatccaggaacttaacaagaacctaaaagccgaactgttgcgaatcccggccatggacgtaatcatagagggcaagcaaagccccttgatgaacgccatgagccgcaccaccaatagcttgtacgaatgctttttgggcagtagccggaaactgatgtaccccgaatttgcatagttaagaaggtcttatagtaaagaccgggaatgtatggaccaaaaccgatttgaacgactcaaccaataccgcagtatgtgggtactcgtattttttgacctgccgaccgaaaccctgaccgaacgaaagtatgcggccaaatttaggaaggacctcttgaacgatggctttgccatgttccagttcagcatctatatgcgtttttgtgccagtagggaaaatgccgccgtacatattaagcgggtcaagggcgccctgcctaaaaagggaaaggtggccatcatgcagattaccgacaaacagtttggcatgatcgaactgtttcacggacaaaaggagatggagcctgtgcccccgagccaacagttagagctattttagaacccgaaatctgctctaccataaaaagtccggtctattttgagtagttgtttttttattctacaaaagaagctaaaaacaagaataccagcctgttgtggccggtatcctgtgaatcatctactaaagtagaaatctgaaagcaattcacaacacgtacccgaatttctcaaggaacgaatctcctgtgaatcatctactaaagtagaaatctgaaagcaattcacaaccggtaagatagcagtaccacaggtctattgcctgtgaatcatctactaaagtagaaatctgaaagcaattcacaacagcgctgtggtgtaagtaaagccatttacccctgtgaatcatctactaaagtagaaatctgaaagcaattcacaacggggaatatgtctgctttataaaattttcacctgtgaatcatctactaaagtagaaatctgaaagcaattcacaacaactcctccaagctataaactaccgcatagcctgtgaatcatctactaaagtagaaatctgaaagcaattcacaactctgcattgtgcaaccgtaaaaacagccttcctgtgaatcatctactaaagtagaaatctgaaagcaattcacaacagcaacatgcaagaattgattttgacactgcctgtgaatcatctactaaagtagaaatctgaaagcaattcacaacacaacctccctaaacctctcgttctgttcccctgtgaatcatctactaaagtagaaatctgaaagcaattcacaaccgaggttgaagatccaaaaaaaaccaaggacctgtgaatcatctactaaagtagaaatctgaaagcaattcacaacacacccctctggagggcctcattatttgggcctgtgaatcatctactaaagtagaaatctgaaagcaattcacaacaccttggcagatttctttgtagtcgtttaccctgtgaatcatctactaaagtagaaatctgaaagcaattcacaactaataagccacagaaagcgttgcacagggccctgtgaatcatctactaaagtagaaatctgaaagcaattcacaacttgtttactttatttggcttacttcccatccct

SEQ ID NO: 1325 - DNA, 16852 bp, synthetic construct
  misc_feature 1..16852: note = Synthetic
  source 1..16852: mol_type = other DNA
ttcccacgacaccgccacccaagataagtacgcgtgcggggcgtacacccggtacaccacccattagcttcccttttccgccctgcggcttctccaggaaatgcgcacccacctgtgcagccatacggcctgccacttcgctcataggcgtaagcaggggcagcgagcggtcttttttctctacggtttcgtaggcgatacatacggcgccgctctcaatcatggcatgagtcagcgctttatcggcagcaaagtggaaataggtaaacaccacctgtcccttcttaatcagtttatactccggtgcaatgggttcctttaccttgacaatcatgtcggctatggcatagacatcctcaatggcgggcaaagtctttgcacctacggcgatgtaatcgtcgtcagagaacccgctgtttgcgccggcggttgcctgcacatacaccgtatgacctttcttcaccaacgcggctactccggcaggggtcattcctacacggttctcgttgttcttgatttctttgggtactccgataatcataatgttatctgttaatggttaaacgtgttgcaagataacgatttctctgcctcattgtcattccgggcagggtgttttacagcagaaaatatccggttatttcttaggcggggcagcgggataattcttgttttgtttaggcagagagaactattctttttatatttgcatgcattaaaaaataataggatatggactataagaatataaaacgttctatacttctttcttttttgttttttgccggcagcatgcaaggcgggtatgcacaggaagcatccggtacggaaaccgcttcatttgttccccccttcgattttcctatcaccttctccggcaatttcggcgagatacgtgccaaccattttcatggcgggctcgatttcaagaccggtggagccataggcaagcctgtccgcgccctggccgacgggtatatatcgcgtatccgcgtaacgcacgggtcgggctacgtgctcgatgtggcttacgacagcggctattctactatcaaccgccacctcagcgcttttgtgggcgatgtagcccgcagggtgaaagcgttgcagtacgaacaggagagctgggaagtggagattactcccgagccgggagaatatccggtaaaggcaggacaggtgatagcgcttagcggcaatacgggctactccttcggtcctcacctgcatctggatatgattgagtctgccacgggagattacattgacccgttgcctttctttatggaaaaggtgaaagacaccgttgccccccgcgccgagggcatcatgctgtttccgcagccgggcaggggagcggtgaacgggaagcagagccgccaggcattcccggtacgtcccgcgaaacccgttaccgcctgggggctgataggcgtgggcatccgtgcctacgaccatatgaacggggtaggcaaccgctacggcgtgcacaccgtgatactcgaggtagacggcgaggaggtgttccgcagcgtggtagaccgctttgcctacgaagaaaaccgctatatcaactcgtggacgcacgggcagtacatgaagtcgttcatcgagccgggcaaccgcctgcgcatgctgcatgcctccaacgggaaccgggggctggtggaaatcgacgaggaacgtccctaccgttttgtatataccctgagcgatgcgctgggcaacacctcgaaagtccgttttaccgtgcagggaaagaaaacccgcatccttccggtggaacatcgcgagaagtacgccttcaaatgggacaagaccaactacctccaggaaccggggttggaactggtcgtgccgcggggcatgctgtacgacgacgtctggctggattatgccgtgcatgccgacagcggggacgtggctttcacctaccagttgaacgacaagcgcatccccatgcatggagcctgcgagatgcgcatcgggctgcgccgcgactgcttggacgacaagtcgaaatattacgtggctggcgttactgccaaaggcggtaaatacagcataggcggtacttacgaggacggctttatgaaagtgcgcatccgcgacctggctacttatacggtagccgtagacaccgtgccgccggagataatcccggtcaacccccagcagtggcggcgtaccggccgtatcgtctttaaggcgaaagacaagcagaccggcatcagcagctaccgcggaacgatagacgggaagtacgccctgtttggcaagcccaattccattagcggcaacctggtatgcgagctcgacccggagcatgtgaagaaaggcagcaggcacaccgtagaaatgaccgtaacggacggttgcggcaacctgaccgccaaacagttccattttgtatggtaagcttccgccccctctccggtacaccgtgccaatctgtgcaagctgtggcggaataagtgaaatgaacaggtaaacctataacaatattaatcattacaaaataattcgaagtatgaaaagattcaccctctccgccgtattggcagtggctgccgtggcgaacgctttcgcctgtaccaacctcatcgttggcaagaacgcctctaccgacggctctaccattgtttcctattctgccgactcctacgggctgttcggcgagttataccactatcccgcagggatacataagaaaggtacgttaatcgacgtgcacgagtgggacaccggcaagtacctcggccagatagagcaggcacgccaaacctacaacgttatcggcaatatgaacgagttccagttgactatcggcgagacgactttcggcggacgccccgaactggtggatactaccggcatcatagactacgggagcctcatttacctggggctgcaacgttcgcgtacggcgcgcgaggctatcaaggtaatgaccgacctcgtgcaggaatacggctattacagcagcggcgagtccttcacgattgccgaccccaacgaaatctggataatggagatgataggcaaggggcccggcgtacgcggggctgtatgggtggctgtccgcgtgcccgatgactgtatctcggcacatgccaaccagagccgcatccaccagttcgacatgaacgacaagaacaactgcatgtactctcccgacgtcatttcctttgcccgcgagaaaggttatttcgacggagtgaacaaagacttcagctttgccaacgcctatgccccgctggacttcggaacccgccgctactgcgaggcacgcgtatggagctacttcaacatgtttaccacccgcggcaatgagttcctgccttatatactgggcgatacggacaccccgatgccgctgttcgtgaagcccagccgcaaaatctccgtgcaggatgtgaagaatgccatgcgcgaccattacgaaggcactcccctggatatcagcaaggacttcggcgcaggaccgtaccacacgccctaccgtctttctccgctttcctttaaggtagacggccaggaatacttcaacgagcgtcctatctctacccagcagagcggcttcgtgttcgtggcgcagatgcgctccaccttgcccgacgctatcggcggcgtgttgtggttcggtacggacgatgccaacatgaccgtgttcacccccgtgtactgctgtacggacaaagttcccgtatgctattcgcgcgtggacggtgcggactacatcaccttctcctggaactcctccttctggattttcaactgggtggcaaacatggtatatccccgctacgaccttatgataggcgatgtacgtgctacgcaggcggagctcgaaaacaccttcaacgaagcgcaggaaggcatcgaagccgctgccgccaagctgctggagaaagacccggcacaggcgaaggtattccttacgaactataccggcatgacggcacagagcacgttcgatacctggaagcgcctgggcgagttcatcatcgtaaaatataatgacggtgtagtccgtaagatgaaagacgggaagttcgagcgcaatgctatcggccggccggccggcgtggagcgtccgggctatccgaaagaattcctgaaagaatacgtaaagcagacgggcgaccgctacaaaatgcccgactgattgccggtacaaacggcactaatcgttcatatgcgttgcaatttctgtacaaatcggtaaatctgcaataaaaaaattaggatatttgaacttattcttctacatttggaactcgacaagcaattatagagtattaacctttaaaataaaatagtcttatggaaaatcaggaactgattaaacaggtcactgagaaagccgaaaaatggcttaccccggcttacgacgccgaaactcaggcagaagtgaaacgcatgttggaaaatccggataaaaccgaactgatagagtgcttctacaaagacctggaattcggtacgggcggcctgcgcggtatcatgggagccggcagcaaccgcatgaacatatatacggtgggcgccgctacccagggcttggcaaactatctgaacaaatgcttcaaggacaaggagcaaatctccgtagtagtaggccacgactgccgcaacaacagccgcaagttcgcagaaatctccgccgatatattctctgccaacggcattaaggtttaccttttcgacgatttgcgtcccacccccgaagtttccttcgctatccgccacctcggttgccagagcggtatcaaccttaccgcaagccacaacccgaaagaatataacggctacaaggcatactgggacgatggtgcgcaggtgctcgccccgcacgataccgccattatcgacgaagtgaacaaggtaaccgtggccgacatcaagttcgaaggcaacaaagacctgattcagattatcggcgaagacatcgacaagatatacctggataaagtccatgccctctctatcgacccggaggtcattaagcgccagaaagacctgagcatcgtctataccccgcttcacggagcaggcagggtgctcatccccgcctccctgaaagagtggggctttgagaatgtgcattgcgtgcccgagcaaatggtaaagagcggagacttccccacagtcgtttcccctaaccccgaaaatgcggaagcgctttctatggcaatcgcccttgccaagcaaatagatgccgacatcgtaatggcgagcgaccccgatgccgaccgcgtaggtatggcttgtaaagacgataaaggcgaatgggtgctgattaacggcaaccagacctgcctgcttttcctgtactatattatcaagaaccgcatcgccacgggcaagatgcagcctacggatttcgtcgtaaagaccattgtaaccaccgagcttatcaaggcggtggccgataagaataagattgagatgctggactgctacaccggcttcaagtggattgcacgcgaaattcgcttgcgcgagggcaagcaacagtacatcggcggcggtgaggaaagctacggtttcctcgccgaggatttcgtgcgcgacaaagacgccgtttccgcctgctcgctgttggctgagatttgcgcctgggcaaaagaccagggcaagacgctgtacgacatcctaatggatatctacgtagagtacggtttctcaagagaaactaccgttaacgtagtgaagccgggcaagagcggtgcagacgaaatcaaggctatgatggataatttccgcgccaacccgccgaaggaaatcggcggctccaccgtaacactggttaaggactacaaaaccctgaaagctaccgatgcccagggcaatgtaaccgctttggacatgcccgaaacatccaatgtgctccaatactttacggaagacggcacgaagatttccgtccgtccctccggtacggaacccaagattaagttctacatcgaggtgaagggcgaaatgggatgtcccaaatgctatggcagtgcgaatgccgaagccgaaaagaaggtggaagctgtgcgcaagtcgctcggtatctgataaacaattcgattcttgctatgagagagggtgcaggtggcgcaggctgcctgcacccctttttcatatacctgcctgccctttcggggaggcgtttcaggcggggaggtgtttcagaaggctaccttcatcccggttttccatacccattcccaacgcttgtagattaggttgaaccgccgttcgatgcccgtgcttatctgcacattccgaccgatgtcgtaggagaatccgctgccgaaatacagcgggcttacctcccccggcaatacattcgacttgctttcgctacggctataccctgcatagacatggtagccgaacttcggagcgataacgaacccgaaatcagtctcttgctgcaaaagcatccctgcctttttcgtatatactccggtagcagagatgtctaaccgcccgttatgcagggaatagccggtacggagcggggtattgtaatacatccgtgtaccgttcagccggaaccggggcatcgggcgtattttccggaggtttacggggcggggtagaagttcttcgacgggcagaatgggtatgttgcccgtggcggcaggtgcggagaacagtaagtctatctcttgctttacggtgggattaacggatatgtccgcctctccgttcaggattttcttcagtttaacggagtcgttcttgctccacgccgtctgcccttgcaccgtcggggagaaaacggtacacagtattgccaatagtatatattcctttttaatcatttgtccgcttcgtcgagcccggtttacaggttagacgcagcgcggtgcggaatgctgtaagggaggataagaaaaaagttaaaggagaggcgggaagggtgtttttcccgctccgttaagtttcttttatattctttatgcctgccggcaaatcattttccgtcgaatgctgttcttatatgcgacagaggtcgacaagttaacagatagtattacagattgcggttgcacgccgattggttgatgtgaatgagagtcgtttcattcgtagttgttcgtttgtaagcgcgtgtcctccgcaatctgtttttttaacctttgatttccggcttttcattctcatccgttttctatccaccagtcaatcagtttcctggcgatactcagcttgcggggtatttccggcaggttatctttggagtagaaggcgccggagctgagctcgtcgtcctgcaacttgatttccccgctttcatagtctgctatgaaacctaccattaagccgctgggataaggccagggctggctgccgaagtaggtgatgttcttcaccctcagccccgtttcttccatgacttcccggtgtacgcattgctccagcgtttcgcctgcttcgaggaagcctgccaccagtccgtggaaagtgccgcggaagttccgggcatgtaccagcagtatttcttctcccttccgtatcagtacgatgattgctgtagacacgggaggatacatctcgttgccgcatgccgggcatttcttcatgataggggtgtgctgctccgtgggagtgccgcatacggggcagaaacggctgtgcccgtcccagtagagtatctggaacgcctttcccgctgcctggtaatctgccagcggcaggcagtcgtaggaagcccgcaagcctgtcattgcccattccccggtttcggataccggctgtccgagggcgaatgcctttacttgtcccccgtcgggcagggttacttcgtgtatcttgcatcccggagcgggtgtcacgggcgggtatgcgccgtagggtatgctgtatctgttttctccgtttgcagtgtgctctgccttcagcagcaactggtctttaaaaaagacgaaccactgcgcgggctgttctatttttgtagttttcattgctgtttccgtagttttcattctctttatacgttatgctgatatcgttttacggtttgctgttatagcgtgcttttctcccccggcgtatcttcttgcctgatgtagactgtagacctgcttatcccccggcggcgcaggatgccttgcctgacgaacccgttcagctcatcgatagctgcatgcctcgtcagcccggtcagttggatatactcgctcttggtaatgcatacgttcttttgcaggaactgcatcagcctttcctttctcgtttcttcggtggtctttaccttcttcgatttctttgtcggcgagtgtgtcctttccagcttcatcgcctgccttatcctcttgcggaatgtactgctgatgcgcaggtgcacgttctggaactgtacggactcagacctgattttctttttctcatcgtccgtttcctgcgtgcatttcagcgaggtgctgaaaaagcccagctcgcccagttccacgatattgccgttggcaagcaggtcgcaaagctcgtcgatgcaggcatccaatgccgcccctattatgttcttgggcaggtgttggaaggtggctacgcgttccacgaattcttttttcgtataggtcgctttggggcatatacgggcgtggagagattttttgtcccctttcccgttgggagagggagtttcgtaaaggtcatagtatgcactcatcaggtaatttgttgccaggttaccgcaatgcacagtttccggcgttgccgtatcttatccctgcccttgcaataaactgttgttaggttactgaaaattaatcgtccgataatcgtctttctttcgtccgatatatatatccttttcgtccgacatatgttggacgaaaagaaaacatatgccggacggaaaattcttacccggcaaagatatagtttttagtgatagggagaaagtttatcggaagaaacttatgagtggaggggcatttacttttatgaagtctggctactaccggaattgtctgtggataaaaaacggggaaggcgggctgatgttcctgaaaggctttccgatgattggtgcggtaactggctgttccggactttttgagggtagctacttttacgctatataaaaaatcccccgttgaggacgagggaacctaatgttttcacaacggaataatccttattgtgatttgcttcattttagtatggcaaatgtagtaaataattctggaataataaagaatatatggaaaatagttttatctttgcattatattaatacctttatatgagaaacaatcctgttttaatttatatttggctacttattataggttatggatgtgtgagcactttatgtgttcattttgtaaatatatctactgcaatgatttatacagggtatggaatattaatcctttggattttatatacattagttcttgcaaataaaaaaaggaaggataaaacatttataagcaatggtattttaataggagcagtaattgttatagctattgcttttgggttgttgtttcagaataaagaattgattggaaaccatattagcaaccatcatagtgcatattacatatcaagctgggttgtatttattttattcttgattattaattggatatatgtccaacagcaccttaaaaaaacacacaataaatagggacatttactgaatgtccctatttatctctttttccctgcttatcggttctaaggttcttttttagggacatttagaaaatagtataaaattagccaaccaattcatacacaaagtgttgcgaattagttggcttttttgtatctttaggcatccccccgcaaataaggggtagctgcttttacgctacataaaaaatcccccgttgaggacgagggaacctaatgttttcacaacggaataatccttattgtgatttgcttcattttagtatggcaaatgtagtaaataattctggaataataaagaatatatggaaaatagttttatctttgatagtaatattcaaaaaatgatactatgaagactgtacttggattggacttgggaactaatagcattggttgggctgtgataaattctgtaattagcgagcaggcagaacggatttggatagaaatggcagggagcaggattattccgatggatgccgccgtgttaggagattttgataagggaaattctatatcgcagactgccgaaaggactcgtttcagaggggtgcgtcgtttgcgtgaacggcatttgctgcgtcgtgaacgtttgcatagagttttgaaaatcctcggatttttaccggaacattatttaaaggaaattgattttgagaaacatcccgggaaatttttagctgatgcagagcctaaattgccgtgggtaaagaacggacaggggcaatatgtgtttttgtttcagacagcgtttaatgaaatgttggcggattttgcaaagtaccagccttcattagtggccggcggcaaaaaagtaccttacgattggacgatttattaccttcgtaagaaggctttgacagagaaaatcagtaaagaagaattggcttggatattgttgaatttcaaccagaagcgtggctattatcagcttaggggagaggaggaggaagaaaatccagggagagtagtcgagttttatgcgctgaaagtggtatcggtagaggcaacggatgagaaaaaggggcaggatgtatggtacaacgttcatctggagaatggctgggtatatcgtaggagcagcagggttccattggattgggaaggccaggtaaaggagtttatcgtgactactgacgtaaatttggacggttctccaaaacttgataaatacggtgaagtaaaacgttctttcagagctcccaaagaggatgactggatgctgataaaaaaacggactgaagcggatattgccaatactggaaaaacagtggggtgttatatttatgatacgttgttgcaaaaaccgcaacagaagataatagggaaattggtgaaaaccgtggagcgtaaattttataaggaagaattgcgcttgattttgcaaaagcaatgtacttttcatgccgaattgcgggataggagtttgtatgcgtcgtgtgttaaggagttgtatcccgttaatgagatgtatcgaaggaacatagctaaccgcgatttcccttatttgttgatagatgatatcttgttttatcaaagaccgctgaaaagtaaaaagtcgctgatagataactgtccttatgaggagaatgaatatacggacagggaaacgggcgaggtcaaaaaggctcctttgaagtgtatcgctaagtcgcaccctctttttcaggaattcaggctgtggcattttctttctaatatccggatatatcagagggaaaaggaagtggacggaggtttgcataccgatgtggatgtgactgcggatttcctgaaaacggaagatgattacgcggctttgttcgagtggctgaatattcgaaaggatatcgaccagaagagtttgctgaaatattttggattgaaaaaggaggtggataattatcgctggaattatgtcgaggataagtcgtatccttgtaatgagacgaggagtgccattcttacccgtttggaaaaagccggtgtttgttctgacttcttgtcttgtgagcgggaagttgctttgtggcatattttgtactctgtaaatgataaacaggaaatagagaaagcgctgaatacttttgcgggtaagaatggcttgaatgcggattttgtagaggttttcaaaaagtttccgccttttaaagccgaatatggtgcttattctgctaagacgattaaaaaattattgcctttaatgaggtgtggtatatactgggatgtgtctttgattgacgataagacgaaggaaagaatagaaaaaataataacgggtgaatatgatgaaaaaatacgtgccagagttagggaaaaagctgtggacttatcggatatagcttgctttaagggacttccgttgtggttggcttgttatattgtatatgaccgtcattccgaagagaaaaatatagcgaaatgggaaacgccggcggatatcgatgcttatctggcttctttcaagcaacattcattacgtaatcctattgtagagcaggttgtaaccgagacgttaagggttgtccgggatatatggaagcgtgtcgggaaaattgatgagattcatgttgagctgggacgcgaaatgaaaaatccggctgataaacggaaaaggatgaccgcacaaatgttggaaaatgagaatgctaatttgcgcataaaggcattacttgccgaatttgcaaatccggagtatggagtggaggatgtccgcccctattcaccgggtcagcaagagatattacggatttatgaggatacggttttgaatgccgaagaccagattccggcagatatcgatgctatactgaagaaattcaataacagtagattgccgtccaagtctgaatttttacgttataagctatggctggagcaaaaatatcgctcgccttatacgggtgagttgattcctttagggaagttatttactcctgcgtatgaaatagagcatgttattcctcaatctcgttattttgatgattcgttttctaataaggttatatgtgaatcggctgtgaataagttgaaagataatcagttaggatatgagtttatcaaaaatcatcatggtcagaaggtggaagtgggatttggcaaagtggtcgaaatattttctatagataattatgagaggtttgtaaaagaacagtatgccaagtttggtgcaaaaatgaagaagttgttgttggatgatattccggagcagttcattgagcgccaattgaatgatagcaggtatataagtaaggtcgttaaagggcttttatcgaatgttgtccgtacaaaagataagaatggggaatatgagcaggaagctgtttcaaaaaatgtactggtttgtacgggaagtgtaacggatagattgaaaaaagattggggtatgaatgatgtttggaatagtattgtatttcctcgttttgagcgtttgaatactttgaccggtactcaatgttttggacattgggaaaataaagggggaaagagagtgtttcagacggagttgcctcttgaatatcaaaaggggttcagcaagaaacgtatcgaccatcgtcatcatgccatggatgcgatagtgatagcttgtgctacgcgtaatcatgtaaattatctgagtaacgagtctgcaagtaaaaaggcgaaaatctctcgttatgatttgcaacggcttttgtgtgaaaagagcaggacggatgccaatggtaattataaatggattataaagaagccgtgggatactttcacacaagatgcaaaggaggcattggataaaattgtggttagcttgaaacagaatttgcgtgttattaataagacgactaacgtttaccagcatttcgatgccggtggcaatcgcgtttatgagaaacagaaagccggtgacagttgggctattcgtaagccgatgcataaggatactgtttttggagtagtaaatttaaggagggtaaagtatgtgcggttgtccgttgctttggatacgccggctatgattgtagacaagaaagtgaaaaataagatttttgaattgcagtcttataagtatgataaaaaggggatagaaaggtattttaaggaaaatatatctttatggaagggcttggatatagctaaaattgctgtttattattttacagagaattcttctgagcctttgtttgcagtacgtaaaccgcttgactctacttttaatgagaagaaaataaaagaatctgtaacagatactgggatacagaaaatccttttggaacatttatattctaaaggggggaatgcggatttagctttttctgcagagggcttagaggaaatgaatagtaatcttttacaactaaatggtggtaagaaacatcagccgatatataaagtgagagttgctgaaacgcgtggaaacaagttctgtgtaggaactgcggggaataagaatactaaatatgtagaggcggcgaagggaactaatttattttttgctgtttatttaacggaagataataagcgtgtttatgagactgttcctttgaatattgtcatagaacgagagaagcaaggacttattccggttccggatgaaaacgaaaatggagataagttgttgttttggctatcacctaatgatttagtgtatctgccgactgaagaagaatgggaaatgggaagaatagatgaaccgatagataggggaaggatttataaaatggtttcttcttcaggtaatcaatgtttttttattcctcaaaatatttcgaatgccattattccgactaaagaattgggagctaataataaagcagaaaaggcatggagcggtgaaatgataaaaaatatttgtattcctattaaagtggataggttgggatatattgtagaaataaagaaggtaatggggaaatgaataatataaaacttttccaggacaagaaaattcgctctgtatggaatgatgaggagcaacaatggtatttttcaattgtagatgtggtagaggcgttgacggatagcgctgaccctaagcagtatataaagaaaatccgttcaagggatgaggctttgcgttcgaactggggtacaatttgtaccctggttcaaatgatagcggaagatggtaaaaagagaaaaatccaggctgcaaatatgaaagggttattccgtatcattcaatctattccttctcctaaagccgagccttttaaactttggctggcacaggtggggtatgagcgtgtacaagaaatagaaaatccggaattagcccaagaacgtatgaaggagctttatgagcagaaggggtatcctaaagttggattggcaaacgtttacggggtattgccattcgtcagaacttgacggatgaatgggaagaaaggggaattgcggagaaaagcgattatgccattcttactgctgaaatttctaaggcaatatttggattggctccttcggactataagatgtataagggtttgacaaagaaaaatcagaatcttcgtgaccatatgtctgatttggagttgatttttacgatgcttggtgaacgtgtcactacggaaatttctcagaaagagaaaccggatacgttcactaagagcaagcaagtcgcgcaacggggtgggaatgttgcgggagtagcccgcgaacaagctgagaaagagttgggtagaagcgttatttctcctgataatttcttgtcggattctgaaaaggaggatgatactttacgattgccttttgaggagaatgatgagtaaatagtctataaaatctaaatgctatgattaagaaaacactttattttggaaatcctgtttatttgtctttgaggaatgctcaattagtaattaggtttcctgagatagtcaagaatgatgttttacccgaagggtttaagcaaaaatctgaagtgaccaaaccgatagaggatattggggttgtggtattggataataaacagataaccgttacttcgggtgtactggaggctttgctcgaaaataattgtgcagtcataacttgcgatactaaaagcatgccggtcggtttgatgcttccgttatatgggaatactacacaaaatgaaagatttcgaaaacagcttgatgcttccttaccgttaatgaagcaactttggcaacaaacgataagagcgaaaatagaaaaccaggcagtggtattgggtgaatgtgctggggaggaaataaagtgtatgaaggtttgggctgctgatgtgaagagtggagattcggataatttggaggctcgtgctgctgcttattattggaaaaatctatttaaaatagagggttttacgagagatagggaaggtattccacctaataatttattgaattatggttatgctatcttgcgtgctgttgttgcccgcggattagtagcaagtgggcttttgccaactttggggatacatcatcataatcgttataatgcttattgtttggcggatgatataatggaaccgtatcgcccgtatgtggataggttggtatatagtatagttcaaaataacggtgcttgtactgatttgactaaggatttaaaggcacaattgttgtctatttctacattggaaactaatatttcgggaaagcgtagccctttaatggttgcagttggacaaactaccgcttcgttatataaatgttttagcggagaattgcgcagaatatcttatccggagatgtaatggatcggtttagtgaatatcgtattatgtgggtacttgtactatttgatttgccaactgaaaccagaaaggataaaaaagcttatgcggattttaaaaagaatttgcaaaaggatggatttacaatgtttcagttctctatctatgtccgtcattgtgcaagtagtgagaacgcagaggtacatataaaaagagtcaagtcttttttacccgagcatggaaacgtgggaattatgtgcattacagataaacaatttgggaatatagaactattctatgggaagaaaacgttagatgtaaattccccggggcaacagttggaactgttttaaaaagaaaaatcccgccgaacagcgggatttttctttgaaaacagtattctttttattattctaatttagggacattcagtaaataatataaaatcagccaactaattcatacacaaaatattgcgaattagctggcttttttgtatctttaggtattcccccgcaaataaggtttgaaggccaaaacggg

SEQ ID NO: 1326 - DNA, 16819 bp, synthetic construct
  misc_feature 1..16819: note = Synthetic
  source 1..16819: mol_type = other DNA
agccaataaacgtgcggctgaattaaagaagaggcaggaagcgagggctgcagaagagcgtaaacgtgcttatatgaacgagttaaaacaacgcgagcaagctcgtttggagttgcaacgtacgaaagagaaagatttagctgctcgtttgaagaaaaaacgtcaggctgagaagcaaaaacagatagaaattcgtcaggctcaacgtgaaaaagagatagcgcgtaaagaggaggagcgtgcaaaagtaatggccgcaaaggagaaaaaacgtgcgaagatgcaacaagatattgagcgtcgaaaagaggctagtgcacgtatgaaggagcgtcagaaaaaggagcgtgagtctgaaaaacgtttgttggaatattatgatcgacagaaagagttggaggaacaacaacgtcgtatggagcaagaaaaatctgccgaagataaggagttagaggctcttcgtaaggagcgtgaaaaggtggagatagagacgatgaagttagcgaagaagattgtgaaagggaaggagaaagagcgtgctgccgcagataaaattaaacgaaaagaggagcgtgctaaagagaagttggaagagcagatgcgtaaagactctattaaatttgcagaggaggatgcgttggatcttgagcgttatgcagaggaggatgcggatgatgcttctttggaattgactagtaagcagcgtaaattgttgaagaagatacaggaaaacagaaagaagaaagaggaagaagctcgtcaagattctatgttgttgattaatggtgactttgatatgatgacgggtgagcgtgataattctgatttaactccggagcagcgcgaaaagtttgacgtcaaagaggaacctgtcgctgaagaagagtttggtatggaagaggaggatatggcttttgaaatcaatgattctacaggattggagatgattccggacgatctatattcagaaacagactccacagaaggtgaggttgaagaggttaagagtatgatcgactctactttgttgcaacaacaaattgcagagttggagatggagcttcagaatattagggatattaaagagttacaagaacaaaaaggacgtaaaggtgaaaccatcttgttgaagattaaaatccctaattgtcgctatttgaatgatgtctattatgtgcgtgacaagtttgagttccgatatgaatacaacttcttcttgcactattttgatcatcgttatttccatcgtaaacgtttttatgatcgtgtagattctactcgtattgtggctaagcatgtgatgaagttggtgggtaactcaaaatatcgccataccgactttaataagattgcggattctgttggtacaattttgccgaattatccggttgtcgagtatctggattcggttattactcaacttaatttagagtatttggcaacaggtgagattaaaattaagtataggaatacacgtcaaaaatctatttactcgaagttgaaaccttctaagatcaaacaagagggttctttgggtgatattaaattttacaccggaaaccgccgtcgtatcattgaggagttggatgcatcacagtttgactctttggtgattgccgattctttgtcaatcgaggaaaaagcattggcagactctttgaatacgattataaaattgaaagaggctcaggatagtattcaatttgtacaagacagtttggaatctttggtggatagcatgatattgcgagggccggagagggatagtattcataataaattggatcaaatcttgtggggtggaggcgaagaggattctacaggaacggatgatgaaatggatgagtttgatccattggaagagttgcaatatgaattgcctgcacagccattgtcatacgataatttagagcagatgattcttttggcagagcaacagaaaaagaataaagcgagcggaaaatttagttcgggagtggtgttgcctccaatttcgatggataaaccggatgagaatgcacgtccgtttggtggcggtgaagtgccaacgttgtcacttccgaagctttctcaggagccaccgaagcaggagaaacaagcggcagctacaccttctccggcaaagaaagctccggcaaagaaaactccggcgaagaagggcgcgaaaccaaaatatgagccaactccggatatgccgtatgaagaggcgaaagcttcctcatcagcaggagatttgcctcaagaagatttggtgatgagcagaatcaatgagttgatgaaacaaaaacaagagcgtgaagctatagagagtgcggcagaagagacagataaaaagcagaagcgcaaaaagaaaaagaagaaagaagaagaggcatcctctgatgcaccttcagaagagagtggagattttattccgtaaacaatagaaagaaatttagaaggtaaagttatgaataagacgttacagaatttaattattcgagcattatcgggagccgtttttgtggttcttatgttaggtgctattggtttgtcatcattctattttggagttgttttctttatttttacctttttagggttgaatgagttctacactcttacttcgaccattcaaggagtgaaagtaaataaatggttggctatattgggaggattaatgctttttgttctctctttttgtgtaggctttggttattgctcaccacaatggtacgcattataccttatatatatacctatattatatatacccgaattgtatcgtacagagggaactcctattcaaaatattgcagtatcgatgatggggcatctttatgtagctttgccgttttcactactttgccttatcgagccgattagtaatgaattggttttggctttttttgtcttgatttgggcatcagataccggtgcttatttggttggagtttgtataggtaagcacaagatgtttgagcgaatatcaccaaagaaaacatgggagggtttttttggaggattagcctttgcattaggatttggttactttttttatcatatcaattgggtggaacttccgcaagcaaatctattattttggatgatactctctgcattgattttcattgtaggcgtctttggtgatttggtggaatcttcgtttaaacgctctttaggagtgaaagattccggaaagttgatgccgggtcatggaggtatgttggatcgttttgatagtgcctgcttggctgccccaattcttgctgcggtcttttttctaatgttgaatatggtaaattgaatttgttatatttttgtttatttgaggtaatgtattacctttgtgtctgaaaaaatttagtcgtatgaatatacataaagaagggaaaggtattttgtcaaagttattagcggccattatgatggtgaatgcagcagcattcctattcttttgggatgctaattcttctgcagttttgggttttggagccttttcaattgtagtttttttattcttcgtgaacttttttcgcaatccggtacgtgttttcgaaaacttcgaagatggtatgattgttgctcctgctgatggtacaatcgtggttatagaacctactatagaggatgagtatttgaatgaaaagcgtatgcaggtttcgattttcatgagtgtattcaatgtgcatgcaaattggttcccgaccaaagggaaaattgtttattatactcacaatgatggtcggtttatgtctgcgaacttgcctaagtcaagtactgaaaatgagcgttcgacagttgttattgatacatctaataataagcgtatcttggttcgtcagattgccggtgcattggctcgaagaatcgtaacttatgcaaaagagggtcaaaactgcaatgtaaacgaacaaatgggattcattaagtttggttctcgtgttgatatgtatttgccaatggatgctgagattatggtgaatatgaaacagcgtgttgtcggaaatcaaacgattattgccaagatttaaatttttctgattatgaatatagtgaagcacatacctaatacaattacatgtttgaatcttttctcaggatgtgtttcctgtgtaatggcttttgaagagcagtattttcttgctgctctttttgtatttttggctgccgtttttgatttttgtgatggtatggctgcccgtctccttaaagcctattcagacattggtaaggagttggactctttagcggatgttattagttttggttttgctccgggaatggtgatcttttcttggttaaatcagattggcaattgtgaatatttatcctatattgcattccttattccaatcttttcggctttgcgtttggcgaagtttaatgtggatgagagacaaacatcctcatttattggattgccaacaccggcaaatgccatctttatggtttcaatgattgccatgatggatccttctgttccggttcccggttgggtggatatgtcttggttctcatctattgtaggaaatatgtgggtaatcattgccttggttatattgttctcctatttgttggtttgtgaacttcctatgttctcactgaaatttaaaaatctctcatggaaagataataaagcacaatttatccttatcggaatttctctattgttgctatctcttttccaactgttggcattccctttcattattttgacctttatcgtgatgtctattatcctgaaaggacgttgattcacttaaggtaaaaggattttcaaagtgaaatatgtttaacaaagctactttgttttctaataaatcataatctctccgatatgaaattttttaaaacctttttggcttgtcttttagccttattcttgttctcatttttagcattcgttttgccgattgtggtattggttgttatctctttcatttcaacatctcaaacatcggaaattccgcaaggaagtgttttgcaactcaatttgacgggtgagttgaaagatcgtcaaacgttggaagatatgcctttcaattggttgaatgagtcggactacaatgtctatttcatggatgagttgtcagaggtgttaaagaaagccgccggagatagtcggatcaaaggagttagtttgtcgatggagcagttttcggcagggtttgcatccgtttctgaattacgctcattattagaggagtttcgtaagagtggcaagtttgtttatgcctactccggcgcatttagtcagaaagattactatttggccactgcagccgataccatttgtataaatccggttggtacactcgatttcaaaggaatttccacctctactcgtttctataaaggattgttggataagttgggagtggagatgcaaattatcaaggtgggagcctataagtcctttacagaacaattttcgtctgattcgatgagtgcagaaaatcgatcacaatcagaaattcttactcgttccatttggaattctatcttggaggagatttcggaggctcgaaattgctctgttgaagagttgaatcactatgcagaccggatgttatattttgattatccggacgatttgattaataagagaatggtggatgtggtttgttaccgagaccagtacctggaacttttaaaaagccgttcgggagccgaccaattggagttggtgaagtataaggattacttggcagaaatgagtggtgttgagctattggagagtgtgccgatgggaaaccgtttggcggttgtttttgcagagggtgagattgataatggtacatcagaaggaattaattcagataagtttgaaaagatgttgtcgaaaattgctgatgatagtgcgatacgtgcggttgtcttacgtgtcaattcaccgggtggaagtgcttatggtgccgaacagatttggcgtgctgtgcagcgcgttcgtcagcaaaaacctattgtggtgagcatgggagactatgcagcatccgggggttactatatctctgccggtgccaactatattgtggccaacccggcaaccatcaccggttctatcggggtatttagtgtgattccgaacttggattcattgtcaaaaaaaataggaatctctatggagtctgtcaaaaccaatgaaaatgcagattttgggaatagtattgcagtgcctttgagcgatgatatgaaacaaaagttgcaagaccacaccgagcatgtttatgacattttcttgcgccgttgcgccgatggacgcaacttaagcatagactctgtgaagagtattgcagagggaagagtgtggagtggtcaatctgcgtatgaattgggtttggtggataaattgggaactttgaatgatgctattgctttagctgcaacaaaagccggtttatctaattataacatagattattatccgaaaaaaatagattttatgtctgaattgaatgatttattcagcgtgacacaaaaaaaattagatttcggtgttgttttttcaaaagaaaacgctatatttgagcaaattagatgtatagatcgtcaacaggctcttatccctgtgcgatttgaaatcagataatagcggatgaatcaactttgaaggaggtagtacaagactgaatttaggtagatctctgaaaattaggtcgagatgatttattaaaggtggattttataaattaggtcgtttaattttaaacgttattgtaggtaaactctcaaaatcgtctattcctaaagttgattttattttgtgcgaagccatatttctgcttttgcttcattgaaaaacactatttgcaattggtagaggtagcttattatttcggcataaatgtgctgttaccgagatttttcactttcataatttctaatgcctatgaaaaccgaaagatcgctgatagtaaaattgttgctttggcccttctcttccctttatggaattggggtcgggataaggaattgtctcttcaattggggcgttcttccctcagaaacgtttgaggtgccggttgtttctgtcggaaatattacagtgggtggaaccggtaaaactcctttttcagaatatttgattcgtgtcttgaaaggcaatttcaaagtgggattgttgagtagaggttataagagaaaaacatccggctacctgttgcttacaagtaaatctactccacaagacgttggagacgaaccatttcaaattaaacgtaagtttccggatattatggtggcggtggatgccaatagacgcaggggtattcggagtatgctttctgagttgaaagataagccggacattattgttttggatgatgcctatcaacatcgatatgtaaaaccggatgtctcaattttgcttattgattataatcgcatgattacagatgattctcttttgccgatgggcgaattaagagaacctgtgcatgcgaaaactcgtgctaatatcattgtgataacaaaatgtccgcaaaatctgaaaccgatagaattcagaattacgagagaaaagttaaagttatatccctatcaatctttgttctttacgacgttggcgtatggtgatttagaaccactcttcccggagtctgtaatttgcccgttaagaaaagatttgattaaaggatcgtattcagctttggtattgactggtattgcttctccattgccgtttgaagagcatgtgagaagttttttgaaagagatggtttcggttaattatccggatcatcatagtttctcggagtcggatctcaagcggattcaaagtgagtttgagactattcctgacaagcataaattgattttgacgacagaaaaagatgcggtgcgtttgatgaatgatccatctttccctgcacaactgaaaaaacatatttattacgttcctttttatattaaatttttacgagaggagggagcctcatttgacgagaagttgtttgctcatttagagcggaataaggggttcagcaggctgatatttaatagtaaacattgatttgtattgatttgataaattttgatgatatggatattttgaagaaaatagaggagagttgctcctatttgatgaagagaactgaggttcgtcccaaggtggcgattgttttaggaaccggtttgggtaattttgcagagaaaatagacgttgtggatactattccctatcaagagatacctcactttaagcaaagcacagtacaaggtcattccggctgtttgattttcggacatatagagggtgttccggtgatggctatgaaggggcgtttacactattatgagggatatacaatgcaagagataacatttccggtacgtgttatgaaggcttttggggtgcagactctgatggtttctaatgcagcaggaggtttgaatccggagtatgttccgggtgatattatgattataaaagaccatatcaatctctttccggagcatcctttgcacggaccaaatatcgaagagttgggaacacgtttcccggatatgagtaatgcgtatgacaaggcattggcaaaacaagcgttggcaattggtgaagagagagggtttggcttgaagtgcggtgtatatgttgggacgcaaggcccaacattcgaaacgttggcagaatatcgctattttcgcattataggaggcgatacagtgggaatgtccactgttccggaggtgatagttgctaatcatgccggaatggctgtatttggcgtttctgtggtttctaacgtaggattggatgccaacctaagcaacgtaactcatgaagaggtacagcaaaacaccattttggctcaagataaattatcacaactctttacagagatggtgaaatgttgcggataagagacaattgaatttgcgattttttttatgattggagtccttgtcatttgtcaaggacttttttgcagaatgagtactttttagttaggaatcaatgataacccgggtagcttgacatattgacactcctaaattcacaacttcagttctaatgatacaatcatttcagtagtgtcaaataatctttgtagtaggttctttcccgttttttataacgtagtttaaacgcataaaatcttacagtgcctgcgtagtcaccttttttatgatgtacggtggtggaattgccatgaccataatttgcgtaactaatcatattatgttcagatgttgaaacgtcgttaatatatactttttttgcatataatttaatgtttctcactctgaatttactatccaaattaatcttgcaatcgtacatatatcctttatatgcacacttaaaacagatagcctttaagatctgtttcagagatgatttgtttgctgtctgcgaataggtaacatagatatattcaaaatcgctttttacgaaaatggagtctgtttcaagacaatttgtcggatagtttacatatctatacatatacaaattattatcttcaaggctatagtaattttataatttctactattgtagattaattgcaaatcatttataatttttgggggctattgaagttttataatttctacttaaaaattcaccgatttttagtgctataaatataggttgtttttttagttgtttatggactattttagctcgtaaatacataaaaaaagcgagcaaatatattttatctgctcactcttctgctttatttcttgttttctatataatgtttgattgcattattgataaattccgacttctttttaatatctgataaatacgtccaaacttcctcgcttgcactgaacgttaccgcttttactccttgttttttgcgtcccgcacctagacgagaaccgccccaacttttcttttcttccatatctttgtttttttgtaaaaaaaatcccaccgatataggacgatgggaacctaaatgttttcacaacggaataatccttattgtgaattgcttcaaatttgtattgcaaatataaaggaaaattaataaattgcaagagtaaataaaaaaatattgccatgaaaaaaatattaggtctcgacttagggacaaactcaataggctgggcggttgtgaatgcggaagaaattcatgacgacaaagaagacggtaaagtaacgctgaaaccggtctcgatagaggcagcgaatagccgtattattcctatggatgcgtctatattaggagattttgacagaggaaattcagtttcgcaaacaaaagagcgtactggatttcgaggtgctcgtaggttaagggaacgtgcattgttgcgcagagaaagattgcatagagttttagatttgatgggctttttgccagaacattattctgcaaaattaactcgctatggcaaattttctgatgattctgaacctaagttagcttggaggaagaatgactctggtgaatatgagtttctttttaagatgtcgtttgaagagatggtccatgaatttaagcaagttcatccagaactaaagagtattccttacgattggactatttactatttgcgaaaaaaagcactttctcatgctttgaaaaaggaggaattagcttggattcttttgaattttaatcagaaaagggggtattatcagttgcgtggggaggatgatgagattgatttgaagaaagaggttaagttttattctttgaaagttactaaggttgaagagacagaagatcgaaaaggtgatgacatttggtataatgtatatttagaaaatggctggatatataggagagcaagtaaaattcctttgaattgggaaggaaaagagaaagaatttatagtaactacagatttgaatgaagatggaagttacaaacttaataaagatggcaatgtcaaacgttcatttagagctccgacagaagatgattggaacttgttgaaagttaaaactgaggcagatatctatgatagcgggaagacggtgggttgctacatttttgactctttaataaataatccgcaacaaaaaatcataggaaaattggttcgtaccattgagcgtaaattctataaggaagaactacgtttaatattagaaaaacaaaaagagtttatttctgagttaaacgataaagagttatacgagaagtgtttggacgaattatatgctaaaaatgaaggccatcgaagcaatatattaaatagagattttacatatttgtttattgatgatatattgttttatcagagacctttgaaaagtaaaaaatcgttgatttcagattgtccatacgaatctcataaagataaagatgggaaagtgtatcctgtgaaatgtattgctaagtcaaatccgatatttcaagaatttcgcctttggcagtttgtacaaaatctaagaatttttcaaagagaaagggttgttggtgatggacagttagatttgtttggtaatgtttcattaagaaaacttgaggagaatgtcgatgttacaaacgaacttttgaggtgtgaagatgattatgtgaaattgtttgaatggcttaatgatagagattcaataaaacaagatacattgcttaattcttattttaaattcaaaaaagagaagggtaaagataaatatccgtaccgttggaattacgtcgaagataaagaatatccttgtaatgatacgagagcagtgatgttaagtggattgaaaaaatgtggagtagcagtaagtttcctaagtaaagaacaagaatattcgttatggcacttactctattctattgatgataaaattgagattgaaaaggctttgaaaagttttgctaaaaaaaataatttgtctgaatcttttattgatgtatttgcaaaaataaaaccgtttaagaaggagtatggttcgtattcggaaaaggcaattaagaaattgttgcctctgatgcgtatgggtaaatattggagtgctgacgcaattgatgaaaaaacaaaagaacgcatcgaaaaacttattataggcgagtatgacgaaaatattagtaacagagtgcgtaacaaagttaaggatttgagggatatttctcagtttagaggtcttccgttatggttggcttgttatgttgtctataatcgtcattcagaggctaaggatgttgtgaaatgggaaagacctgaagatattgatgcatatttgaaatctttcaaacaacactctttgcgtaatccgattgttgagcaagtggtaaccgaaacacttcgtacggttcgtgatatttggaagcaagttggacggattgacgaaattcatcttgagttgggtcgtgaaatgaagaattctgcagataaacgcaagacaatgtcggagaacattcaaaagaatgaaaatacaaatttgcgtataaaggctatattagcagaactgaagaatcctgattatggagtggaaaatgtacgtccatattcgccatctcaacaagatattttgaagatttacgaagagtatgcattagataatttaacaaaagaagataaagattttgaatttgtaagcaaagtgtctaaaagtgcgcaacctacgaagagtgaaattattcgttataaagcttggcttgagcagaaatatcgttctccttatacaggtgagattatacctcttgctaagttgtttactccagcttacgaaatcgaacatgttatcccacagtcacgttattttgatgattcttttagcaacaaggttatatgtgagtcagaagtaaataaactaaaagacaacaaattagcctatgaattcattagtagtaatgaaggtagaatagttacgttagcagacagtaaaactgtaaagattttttctgtaggagagtacgaggattttgtaaaaaaacattttaaagggactaaaaagaacaaattattgatgtcggatataccggatggctttatagaacggcaattgaacgattcccgttatataagcaagtttattaaagggttgctttctaacatagttcgtgaagagaatggaggcggagagtatgaactggaagccgtatctaaaaatctaatatcttgtactgggggtgtgactgaccgccttaaaaaagattggggtatggatgatgtgtggaacagaattgttcttcctcgttttgaaagattgaatgaattgacaggaacgtataactttacagcagtcaaccaacaaggtcatttgattcctaatatgccattggaacttcagaaaggttttaataagaagcgtattgaccaccgccaccatgctatggatgcaattgtaattgcgtgtgcaactcgaagtcatgtgaatttgttaaacaacgagtctgctcgttctatgtacaaagacgaatgttccaagtctgatgattttgacaagaatagttcatatcgttatcacttgtccaaaaaacttagacgacaagaggatgttgtaattgaaggtaagaataggaaggtgtttaaagaattcattaaaccttgggatactttcacttcagattcacagagggttttagaaaatatgattgtaagtttcaaacagaatttacgtgttataaataaaacagtgaacaagtttgaacactatgacgaaaatggtaaaaagaagatagtaaaacaggttaagggtgatagttgggcaattagaaagtcgatacataaagacactggctggggtgagataaatttgcgatttacaaaagaagtatcgttgaatgaggctctgaaaaatcctaaatcaattgtcaataaagacttcaaacgaagagtacaagagttgcttgcacaaggccatgatgccaaatacataaagaaatatgtagaagacaaccaagatgtttggtcggacattgatatcaagaaaataaaggtttactatttcacaaaagatgcgaataaacgctatttcgctacacgtttcttgagcgatttggttggttatatgtctggcataaaagattctgaaaaggctatctcaaaaatagaaggcataacggacactggtattcaaaaaatattaaaagcacacttgcaggcaaaaggcaataatcccgaaattgctttttctgctgatgggattgatgaaatgaaccgcaacattgtcgaactgaatggtggcaaacctcacaaaccaatatacaaggtgcgccgttacgaaagtggcaacaagtattctattggacaaaaaggttgtaaagccaagaagtttgttgaggccgaccaggggacaaatctgttcttcgccattttcagttctgaaaagttgaacaaggagtctggtgagatggaaagtgtgcgttcatatctcaccattccgctcaacgtgatgattgattgtcagaagaagttcggttcgaagtggcaagctaatattgaaacgtttctaaaagaatgtaagttggtttctgatgaggttaaactgttgtttatcctttcgcctaatgatttggtgtacttgccaacgaaggaggatttgaaaaatggagtaaacttgattgataagagtaagatttacaaatttgtcgattcgagtggaattcaagcaaactttgttcctttttcagtttcaaaagccatcttttcaatgacaaaagataaacaaaaaaaagcttttggagaagaggcttattgcattcagaacgaaatcggagttggaagtagaccatcaaaaaatcaagttgcaataactggagaaatgataaaagaaatatgtttgcctcttaaggttgacagactcggtaatatcattagtttgggatattagtagaatccaactgtgtatagtttaaatattgggactgttgtaaaaattgtagctattccaattctatagggagtaagagtcggatttgtttttgtgctttagaaaagaagttgaactaattataaacttgtaacttatgataaaaagaactctctattttggaaatccggcttacctaagtacgtctaacgagcagcttgtaataaaactgcctgaggtggaaacgaacgactctttgccagactcttttaagaaagagacggtgcggagtgtgcctattgaggatataggagtggttgttctggataatagccggataaccattacgcatggggtattagataaattgttggcaaataatagtgctgtgattacgtgtaatgcatctcatttgccttatggactttttttgccattggatggtaataccacacaaaatgagcggtatcgttgtcagttagaagcttctgtacctctttgcaagcagttgtggaaacagaccatagaacaaaagatattaaatcaagctaaagtgctggaaaaagttatgggggagcctgccaaaaatatgttggcgtgggcagccgatgtccgaagtggtgatagtgagaataaggaggcaagagcggccgcctattattggaaaactatttttcccaatcttcctaactttgttagagggcaggagggagaccctcccaacaatttgttaaactatggttatgctattttgcgtgctgtagtagcaagatcattggttattagtggattgttgcctacattgggaattcatcaccataatcgttataatgcctattgtttggcagatgatattatggagccctatcgcccatacgttgatacagttgtgattgatttaatgaaaaattacgcaattgatgagatttcgcaagaggtgaaaattgcattgctaaaaattccggatatggaagtgatgataggaggaaagaggactaagttgatggttgccgtttcacaaacaacagcctctctttacaaatgttttacaggagaattgcgtaaaattttatatccggaaatggaatgatggagtttagcgaatatcggattatgtgggtaatggtattttttgatttgccgacggagacaaagaaagatcgtaaaaacgctgcggagtttcgtaaaaaattgttgcaagatggtttttcaatgtttcagttttcaatctatgttcgccattgtgccagtcagcagaatgcagaagttcatataaagcgagtaaaagccattttgccggagtatggacaagttggagttatgtgtgttacagataaacaatttggtaatattgagctatttagtggaaaaaaagtagctgtgagagaaccagaacctatgcagttggagttattttagagtatttaatacattaaaaaatcccgcacttaagcgggattttttacattagaaacactgaatttttcaattctaaagttgattataagtctttgattattagtgtgatgtgtatagtctgctgtttctaataactcaaagatacaaatttgaaagcaattcacaaccatcttttttctctaactcaacacaaaagcgctgtttctaataactcaaagatacaaatttgaaagcaattcacaactattagtcgcaaattagtcgcactaattgtgctgtttctaataactcaaagatacaaatttgaaagcaattcacaactgcaacgaaaagcgaatttcggtaacattggctgtttctaataactcaaagatacaaatttgaaagcaattcacaaccataaccgagttaggatcacagcatacagagctgtttctaataactcaaagatacaaatttgaaagcaattcacaacccaacagcgaattggacaattagttgcccggctgtttctaataactcaaagatacaaatttgaaagcaattcacaactattagctgcattgtaattgctttgagcggctgtttctaataactcaaagatacaaatttgaaagcaattcacaacccgggtcaccgattcttgattttttttgagctgtttctaataactcaaagatacaaatttgaaagcaattcacaaca

SEQ ID NO: 1327 - DNA, 16797 bp, synthetic construct
  source 1..16797: mol_type = other DNA
  misc_feature 1..16797: note = Synthetic
aatttttcttataattatcatttacagtcccccagttggtaaaatagaaaaagccataaatgttggtatgtcatgagccagaattcgcctacgctcctaccctcccgtgaaacaggtgccagtccctcatgtctcaataacaccataaacagggctgagatcctcttgtccagcttcacaatgatgatagctctcgtctgggaaaagtgctaccactgttgtaagtccaaagaatactgtgattagaccacaaactaatctgcttacatatttaattatcttcttgttcatcttgatgttgcttaattcatcatcatacatataaactctacctggctatgacaatcttgacagattgacaatggtcccattctgcccattaaattttcccaagtccacttcggtgacgaaaagcaaatccaatctaattcctctgatggttttccacatataggacatggaagatgattcggaacagccttaattttgtcgtccatacacttttttacatcctcccaagggaatatctcgctcttctccgcagaccctttatcatcaggatgaatatcatctggtgagttaaaaggcaattgggctttcaagaatccttctattatttttttcataatttctacagaaaggggttggataactattttctatgtcccaaaaataatcaaatacactcatattattcttccagaaatgcgtttttaatacattcttttatttccttttcgtaatcttctgtgactttcttgcaaaagtcaggtcttacgtagcaatggcaaaagcctgaacatttcccaaaatctttgcattgcaacaccattttatcaccctcagacttcacttctttggcaggctattctctttctgtatcagttctctgatagccctgtcatagtcactctcatactgcagcatctccaacttacgatatttttcaaattcagcaattgccttctttttcgcctcttcatgactgatagttcccttgcccaccagcaattgtctgccagagagcgtcatcagactatccagtttctcaatccattccgtcatcctcatcggaatctgttgcaaagcctgaatttctgcaaagtccaaatactgtgataccaacagattcaagtacgtcagttcttctgctgtcagataattcttcgcaatctgcacatcctccttggtgatataatcacccttaaaattagtcatgcccaccatcggcttctctgcatccacacgctcatatatcacctctgccgccgtatgctgatgggcagcgtagtgcagtttgttctgaacggtagcaaagaactttcgagtgagattggcgttgggatcgtagtcgatgcttgtaatgaaaatgtctgtcacctgctgatacaagttgcgctcgctactgcggatgtccctaatgcgttgcagcaactcacggaaatacctattacccttccctttcagtctgtcatcatccagcgtaaaccccttttggataaattcacgcaaatgttgggtagcccactgacggaagcgagtagccacctgtgacttcacacgatagcccacagcaataatcatgtcaaggttgtagtggtacatatttcgcttcacacttcttttaccctcttgtcgaactatcaaaaaatttttgcgagttcgttctgggtcctgctcgttttctgcataaatctgattaatgtggtagctcacgtcctgtcgagaagcatcaaatagctccattatctgctcctgaagtagccacacatcttcgccctcaaatcttacattgactcgagcaattccgttttcatcctgataaataaggaaagcctcattcctcttctctatttcgtttgccatatcatttataacgattatattccttgttcaattgtctgatgctcagatgcgtgacagagtacctgtccctagtgtcacaggaaaaggcgagatgattactcatcccaccttgaatgttttcacaacggaataatccttattgtgatttgctaaaaattagtggtgcaaagataaagtttttctttgaaactcccaaatatatcagaagaattttgtacttttggggcaaaaataactaaaagcagagatttatgaagaagattcttggccttgatttgggcacaaatagtataggatgggcagtagtaaatgccaatgaaatggcccgtgagaatgacacaacataccttaaacctgttggcatcagttctgcaggcagcagaatcattccgatgtctgctgacatcctgggtgacttcgacaaaggcaattctatttcacaaacagccgagaggacaaagcaaagaatgatacgacgccttcgtgaacgtaatcttctccgccgagaacgactgctgagggtattaagcctcatggattttttgcccgagcattatgccaataagatcaaccgttatggcaagttcatggatgatagtgagccgaaactaccttggcgtatgggtcttggaggaaagatggaattcctgttccaagagtcttttcaggagatgttggcagaattctcccagtgtcagccggaacttatagcaggcgggagaaaggtaccttatgactggactgtctactatttgcgcaaaaaggctctaactcaaagaatcaccaaggaggaacttgcttggattctactacagtttaaccaaaagcgtggctattatcagttaagaggtgaagaggaagaagaggacacttccaagaaagtggaattcctttcgcaaaaagtcataagagtcgaggctactggcgagaggaaaggggacgatttgtggtataatgtttatttggagaatggcatgatataccaacgtccaagccgcttcccgttagactgggaaggcaaaacaaaagagttcatcgtaaccacagaccttgaaaaagacggctctcccaaaaggaataaatatggtgagataaagcggtcgttccgtgctccaaaagaagacgactggacattgctcaaaaagaaaactgaatatgacattgaacagagcaataagacagtgggctgctacatatacgacgctctattgcaaaatccatcccaaaagattataggaaaacttgtccgtaccgttgaaagaaagttctataaagaagaactgaggaaaatccttgaagtccagcaagagttaattcctgagctaagggactccaatttgtatcaaagatgtatagaagaactttacccctccaacgaagctcatcgcaacgtcatatcaaaacccgactttgtccgtttattcgtagatgacatcctgttttatcagcgtccactgaagagcaagaagtctcttattgacaactgcccatacgaatcgcgttttgacaaggaagggaatatgcatcctgtcaagtgtattgccaagtcaaatccactctttcaggaattcagattgtggcagttcgtccagaatctgcgtatttaccagcgtgaaaagaccgttagcgacggtcagctagatctgtttagcaatgtgcccacaggcaagctgcaaacagatgtggacgttactgccgaaatactcaaatcggaagaagactacgtcaagctcttcaactggctcaatgacaggggtactataaaacaagacaccctgcttaacagctacttcaaaattaagaaggagaagggtaaagacaggtatccctaccgctggaactatgtcgaggaaaaggaatatccatgtaatgagacgcgagccacaatactttccggtttggctaaatgcaatgtcagcaccgatttcctgactcgtgaaaacgaaatggctttatggcacattctctactctatcgaagacaagactgaaatcaacaaggcattaagttcgtttgcaggcaagcacaaccttgcagccaactttactgaggtctttagcaagaccaaacctttcaagaaagactacggctcttattcggaaaaggccatcaagaagctgcttcccctgatgcgaatgggcagctattggaatgaaacggcttttgatgctaacactcatgacagaattgagaagatcataacaggagagtatgacgagcgcatcaagaaccgagtcagggagaaagccattagcctgaccgacatcagtcatttcagaggattacccgtttggcttgcctgctacattgtctataatcgccactctgaagccaaggaaatagaaaaatggaagaagcctgaagatatcgaccaatacctcaagaccttcaaacagcactctttgcgcaatcccattgtagaacaagtgattacagaaacactacgcacagtcagggacatctggaagcaggaagggcaaatagacgagattcacctggaacttggccgcgaaatgaagaatcctgccgacaagcgcaggcagatgacggagcgtattcagcagaacgagaataccaaccttcgtataaaagccatgctcatggagttcatgaatccagaaatgggaatcgaaaatgtccggccttattcacccagccagcaagacattctgcgcatctatgaagaaaacgctttagacaatcttagcagagacgataaagaatacgactttgtatccaaggtttcaaaaatggctcagccgtctaagtcggatattatcagatataaatgttggctggaacagaaataccagtccccttacactggcaagatgattcccctgtccaaactgttcacgccagcctatgagatagaacatgtgattccgcagtcacgctattttgatgactcgttcagcaacaaagtcatttgcgaatcggaagtcaacaagctcaaagaccgtcagctcggctacgagttcatcaagaatcatgcaggggaaattgtacagctcagccaaggtggtactgtccagattcagtcggttgaggcatacgagaaatttgtaaaagactactatgccaacaaccgaacaaaaatgaagaaactactaatggatgacatccctgacggcttcattgaacgacaaatgaacgatagccgctatatcagtaaagtggtaaaaggcttgctctccaacatcgtccgtgagaaacaagcaaatggagagtacgaagaagaagctgtttccaagaacctcatctcctgcaacggctctattaccgacaggctgaaaaaagactggggcatgaacgacgtgtggaacagcattgtcctgccacgcttccagcgactcaaccaactgacaggcaaggactgctttacgaccttgaatcgcgagggacacgagattcccaacatgccgctggagctacagaaaggatttaacaagaaacgtatagaccatcgccatcacgcgatggatgccatcgtgatagcgtgtgccactcgtgagcatgtcaatctgctgaacaacgaggcagcacactctaagcataatgccaacaggtatcaactgcaacgtaggttgagacgattcgaaaccgtcaccatcaacgggaaagaacgcgagattgcacaggaattcttaaagccctgggacacctttgctactgatgcatggcaagcactaagcaacatcattgtcagctttaagcaaaatctgcgcgtcatcaacaggacaatcaaccactatcagcattacgatgccaaaggcagaaaaggtttcgataaacagcaccatggcgacagttgggccgttcgcaaatccatgcacaaagacaccgtctttggcgaagtcaacctacgcatgaagaaaacggtctcactgaacgaagcagttaagaagcctgaaaacattgtcaacaaggaattcaagaagaaagtacgagagctgcttaccaacggctatgacgctaagttcatcaagaaatatatagaggacaacaaagacatctggtcagacatcaacctgtccaagatagaggtttactatttcacaaaggacgagaaaaagaggaacggcgagcccaaggagcgatactttgcaacccgcaagcctcttgacacaagctttgaccaaaagaaaatcaaagaaagcgtaacagacacgggcattcagcagattctccttgcccacttagcatcgaaagaaaacaacccagagcaggcattctcgcccgacggcattgacgagatgaaccgcaacatcgttgctctcaacaatggaaagtttcaccagcctatcttgaaagttcgcgtctatgagaaggcagaaaagtttgctgtaggtcaaacaggaaacaaaggcaaaaagtttgtggaggccgccaaaggtactaatctattctttgcattctttgaaacagaaagagagaacaaagtaagtaatcgtaaagaagttgtccgctcatacatgaccataccattaaatgtcatgattgattgtcaaaagaagtatggagcacgctggcgcaacaatattgaggcattcttgaaagacaaagacatagtggagacagaagctaaacttttgtttattctatcgccaaatgatttggtttaccttccaacgaaggatgaactacaaaatggtatattgtcaatagataaacaacgcatttacaagtttattgacccaggtatgaatacaggaaactttataccttactccatggctaaggccgtattctcttctaagttcacagaacaaaagaaaaagggcatcgttttctccattcaggatgaaattggattgggcagtcaaggatctaagagtccacgtgccactacaggcgagatgattaaagaaacctgcattcccatcaaggtcgatagattaggcaatatacttaaaataggatacgaataaactgtgttagcctatgattaagaagaccctttgtttcagcaatcctgcctatctctcgttgcgagatgcccagttggtgattaaactgcccgaagtggaaaaagcagctaacctgactgaggaattcaaaaaggccaacgagttgacgcgccccatagaggacataggtgtcgtagtgctcgaccacaagcaaataaccatcacacaaggagcattggaggctttgcttgaaaacaactgtgctgtcatcacttgcgattccagccacatgcctgtcggtttgttactgcctttggttggcaacacaacgcaaaacgaacggttccgcgaccagttggatgcttccctacccttgcgcaaacagctttggcagcaaaccatacaatacaaaattcggaatcaggctgccgtacttgctcaatgctctgatgcagagacaaaatgtatgcaggcatggggcaacgatgtacgcagtggcgaccctgacaacttggaggcacgggctgcggtttactattggaaaagtctgttttgtcatattcctgattttattcgtgaccgtgaaggtgttgcacccaacaacctgctaaactatggttatgccatcctccgtgccgttgtggcacgttcgttagttgcaagcggacttttgcccacattgggcattcaccatcacaatcgatataatgcctattgtttagccgatgacatcatggagccatatagaccatacgttgaccggcttgttgtagacatcatcgaacaatatggaatcgacgtagagctttccaaggatataaaggccgaactgctaaccattcccacgcttgatgttgtcatcggtggtaagcgcagccctcttatgattggtgtgtcgcaaaccaccgcttccctttacaaatgctttagcggtgaattgcgtaaaattgcttatccagaaatgtaatgatagcagaacggtttagcgaatacagggtcatgtggctattagtactgttcgacttgccaacagaaacgaaaaaagacatacgcgaatataacaaattccgaaaaggtctcattcaggacggctttaccatgttccagttctccatttacgtacgccattgtgccagcatggagaatgctgaagtccaccgcaaacgggtaaaggctatgctacctgagtttggcaaggttggcattatctgcatcaccgacaaacaattcgggaacattgaacttttctatggttccaaacctcaactcccaaatgctcccggtcagcagctcgaactcttttagaaaaggagatttccacctgtccgatggagatctccttttcttttgcaccattttttattttctaattttctccgtaaacaactgatattcagttcattcttgcaatcgagttgttcccacaggtgcaaaggtactaattttttagcaaatcacaacggcatataggcggtggccatcataccaacgttgttcccacaggtgcaaaggtactaattttttagcaaatcacaacaggccgcaagcaacgcccttgttaccgtttgttgttcccacaggtgcaaaggtactaattttttagcaaatcacaaccgttatacccaccgcacccgtgaggaattggttgttcccacaggtgcaaaggtactaattttttagcaaatcacaaccagttttgccatagtcaaaaataaaaaagtgttgttcccacaggtgcaaaggtactaattttttagcaaatcacaactgcaacaagcttttcctccatccattcctcgttgttcccacaggtgcaaaggtactaattttttagcaaatcacaactagcaggtcgtgggggtcgcgggctttgccgttgttcccacaggtgcaaaggtactaattttttagcaaatcacaactgagttaccttcatcgtagtgctttgctcggttgttcccacaggtgcaaaggtactaattttttagcaaatcacaacagtggaaagagacggtactcaatccgtaagttgttcccacaggtgcaaaggtactaattttttagcaaatcacaacgtgaaatggtatgtagccccgaaccgtgcagttgttcccacaggtgcaaaggtactaattttttagcaaatcacaactttaattgtcaagatatagcatgcggcacagttgttcccacaggtgcaaaggtactaattttttagcaaatcacaaccaaatatacgcaatataagcaaccacgttagttgttcccacaggtgcaaaggtactatttttttagcaaatcacaacagtaagacaccatcctcaatgtcattagtgttgttcccacaggtgcaaaggtactatttttttagcatatcacaacgatatactacgtactgacacttcatgaagtgttgttcccgcaggtgcaaaggtactaattttttagcaaatcacaactgtcttgaaccatgtgcgctgtgcatcgcggttgttcccgcaggtgcaaaggtactaatttctcggcaagccacaacgcttaaaggctgggggcggggtgttgtggggagggcggtgctattattatatctcagaagatggcggcatcctacatctttcctgtggcaagttctctgtcaagataactgtagatgtaaacagggctctggaaatagaggcccgttgctgggtccgtcaattttgcgtatgtctcagagttatagacagtgtcaagcgcttcgtgaagcgacaagccacgttcttccatcagcataagtacgaggtctcgtacagtgcattcgttcatatagtctattgtgctcataggcgcctcagcatttgaatggctttctcgcttccgaagaaatactgaaaagtgatacccttcatgtatttcaggcgttcgagaaaggtttccatgttgatattctgctcaatgacattacggatttgagccccaaccttgtcatttgctataggaccatagactacatcgtagtcatgaatgttttttgcattcttgttctgccggttggcgaggatgaacgtagcccagtctctggtataaccgtcgaaacgcatgaaccgtaaagttccatcgtccaggcgtgcttcgtcgaactcatagcgttgaacgatggactgaccaccgaacaattgtaccttgaagttggccattgcctctgcttgcatctctgactctgacagatagaatccgcaaccgaagtccttgccgcgctgggattgtctcaggtcaatagcctggaaatccgtgtttgttccgtgatagagtttcatgctagcgcccctccatgacgttggcagtaacccgccatattttgtaccatatcctcaaaactctgtgtatgagcaacgttgtactgctcatccagaaagtcgatagccttgtagcggttcaggtagcgataagcctgcactgctgacagaccgaaacggcgagcgaactcgctgatgaagatgacgatatattcagccttattttgagtctcctgtgacatgatggtttgttttaatgttacacctgtattttagaaaatggccgcaatgcgacgaatctgctttagcttctccataaacgactcgttgcgctcggcatcactcagcgagctgatgaagtccttgaagtaattcttgtatgccaatatgattctttcacgattcatggatacaaaagtacaaaaaagttttcatatcaagtaacttttatgaagaaaaattgccaatttgtgaaaaaacaccggggacgggtactgtttcgttgtttgcgctggtgcaaaggaagtgacagtttgtaacgacactataggtatttgggacaaaaagaacagataatcggccacaagtggcccccgaaactttacaaagtgtcagttgacggtgtttttaacattcaaaagacaaggcaatgaattggaggtaatggagaaatgattaactttgcagtccataaaaaaggtttgttttatggacaccaagtatattttcgtcacaggcggtgtcgtttcctcgttgggaaagggcatcatttctgccagcataggtaagttgctgcaggcacgaggctacaaagtcactatccagaagttcgacccctatatcaacatcgacccaggtacgctgaacccctacgagcacggcgagtgctacgtgacggaggacggtttcgagaccgacctcgacctggggcactacgagcggtttacgggcatccgcaccacccgtaacaacagtattacgacaggacgcatctaccagacggtcatagaccgcgagcgccatggcgactatctgggtaagaccatccaggtggtgccccacatcacggacgagatcaagcggaggatgctacgggaggggttggacgagagcttcgacttcatcatcaccgaggtgggaggcactatcggcgacatagagagtgcgccgttcatggaggctatccgacagttgcgctggcagctgggacgcaacgccgtatgtgtgcacctgacgtatgtgccctacctgaaggctgccgacgagctgaagaccaagcccacccagcactcggtcaaggagttgcagggcatgggcatccagcccgacatcctggtgctacgcacggagcgccacctggacgaccacctgcgcatgaaggtggcctcgttctgcaatgtcgacctggagtgtgtggtgcagagcgaggacatggcgagcatctacgaggtgccggtgagcatgcagaagcagggactggatgctgccatcctgcgcaagacgggcatacctgtaggtgagacacctgccatgaagccctggcacgactttctggacaagcagcgcaaggcaacccgcgaggtgcacattgcactggtgggcaagtacgacctgcaggatgcctacaagagcatccgcgagagtctgaacctggctggcatctacaacgacgtgaagaccaagattcatttcatcaacagcgaggagctgacggcaggcaatgccgccacgctgctggacggcatggcgggagtgctgatctgtccggggttcgggcaacggggcattgagggaaagatcattgctgccgaatatggacgcacacacgacatcccaaccttcggcatctgcctgggcatgcagatgatggtcatcgagtttgcgcggaacgtgctgggctacgaggatgccaacagcagcgagatgtcggcagacaccaagcaccccgtcatcgacctgatggaggaacagaaaacggtgacgaacatgggcggcacgatgcgactgggagcctacgactgcgagctcacggaaggcagccgggtgtacgaggcatacggcaaggagacgctgatcaaagagaggcaccggcaccgctacgagttcaacaaccagtatcaagaggcatacgagtcggcgggcatgaagtgtgtgggcaagaaccctgcagcccatctggtggagattgtcgagatacccgacaagcgctggtacatcggcacgcagttccaccccgaatactcatcgacggtgttgcacccccatccgctgtttatggactttgtgaaagcatgtacaaaatagacccatccccccgacgaacgatatggagcaactgaaacatgagtgtggtgtggcgatgatacggctgctgaagccactgagctactacgagcaaaagtatggcaccagccgctacgggctggacaagctctacctgatgatggagaaacagcacaaccgcggtcaggagggagccggcatcgcctcggtgagtctggacaacaaacccggaacggaatatatgttccgcgagaaggcggaaggaaagaatgccatcacggaaatcttctcaagggtgacggacgagatgaagggtgagctgctgatggggcacctgcgctactcgaccacgggcaagagcggactaacgtttgtacaccccttcctgcgccgcaacaactggcgtgccaagaacctctgcctgtgcggcaacttcaacatgaccaacatcgaggaggtcttccagtttctgacctcacaggggcagtcgccacgcatctacggcgactcctacatcacgctggagctgatggggcaccggctggaccgcgaggtggagcgactctactccgaagccagaaaacaggggctggaaggcacggacatcactgcctacatagaccagcatgtggagatggccaacgtgctgaaaaccacaatgacccactttgacggaggctacgtcatgtgcgggctgacaggctccggcgagatgtttgccgtccgcgacccatggggcatccgaccggcgttctggtaccaggacgacgaggtggtggtgctggcctccgagcgtcctgtcatccagacatgcttcaacctgcaggccggggacatccgggaactggagcccggacaggcgctgatagtcagaaggaacggcgacagcgggctgcaacagatcatccccgcccaggaacagagtgcctgttcgttcgagcgcatctacttcagccggggttccgaccgcgacatctacctggagcgcaaacggctgggcgagcaactgactcctgccatcatgcagtccatcagcaacgatgtaaccaacaccgtattctcatatatccccaacactgccgaggtgtcgttctacggcatgaccgacggcatccgcaagctcaatcatgacgtgcgcatagagaaagtagtctggaaggacatcaagctgcgcaccttcatctctgacggtgccgagcgcaacgacctggcagcccacgtctatgacatcacttacggctcgctgcgcccccacgaggacaacctggtcatcatcgacgacagcatagtccggggcacgacgctgaaggaaagcatcttcaagattctggaccgcctgcatccgaagaagatcatcatggtcagctcgtcgccacagatacgctatcccgactactacggcatcgacatgtcgcggctggaagagctctgtgccttccgcgccgccatggagctgatcagggagcggggcatgcagcagctgacggacgagacctaccggaagtgcaagacagcgccgctggaagccaatcacgtccgagccgtctatgcgcccttcaccatggaggacatcaaccgcaagatagtggagatgcttcgtcccgaaggcatgcaggcacccattgaactggtgttccagagcattgaggggctgcacaaggcatgtcccaaccacccgggcgactggtacttcaccggccgttatcctacacctgggggaatacgcctctgcaacgaggctttcgtaaactatgtagaatctcaaaaaaagtaatatattatgtgtggaatagtagcaatcctaaacgtcaaggaacagacagcagaactgcgtcagaaggccttgaagatgagtcagaaaatccgccaccgcggtccagattggagtggtatatactgcggcgggagtgccatcctcgcccatgagcgactgagcatcgtcgaccccgagagcggcggacagcccctctatgcgcccgacaagaaacaggtgctggccgtcaatggcgaaatctataaccaccaggaaatccgtcgccgctatgccggacagtacgacttccagacgggcagcgactgcgaggtcatcctggcactctatcgcgacaagggcatcggctttctcgaagagttcagcggcatctttgcctttgtgctctacgacgaagaacgcgacgagttcctcatagcccgcgaccccatcggcgtcataccgctctacatcggttacgacagcgacggcaccgtctatgtggcatcagaactgaaagcactcgaaggccagtgcgaacgctatgagcccttcctgcccggacactactactggagcggcgaggcctcgatgcagcgctactaccaacgtgactggatggagtatgacaaagtgaaggacaacccggccagcgtcgaggccatacacgatgcgctggaggatgccgtcaagcgtcagctgatgtctgatgtgccctacggagtattgctctccggcggactcgactcctccgtcatctctgccattgcccagaaattctccgagcaccgcattgaggacgacagcaagagcaaagcctactggccccgtctgcactccttcgccgtgggactgaagggtgctcccgacctggacaaggcacgactggtggcagaccacataggcaccgtacaccatgagatcaactacaccatccaagaaggacttgacgccatacgtgacgtcatctactatatcgagacctacgacgtcacgactgtccgtgcctcaacacccatgtacctgctggctcgcgtcatcaagtcgatgggcatcaagatggtgctctcgggcgaaggtgccgacgaaatattcggcggctacctgtacttccacaaggctccgtctgccaaggacttccacgaggagaccgtccgcaagctctccaagctccacctctacgactgtctgcgtgccaacaagagcctgtcggcctggggcgttgaggggcgcgtgcctttcctcgacaaggagtttctggatgtcgccatgcgcaccaatcccgaggcgaagatgtgtcccgggacaaccatcgagaagaagatagtccgcgaagcctttgccgacctgctgcccgaggctgtggtttggcgacagaaggagcagttctcggatggtgtcggctattcatggattgacaccctcaaggccgtaacgacggcagcggtttccgacgagcagatggctcacgccgcagagcgcttccccatcaatccgcccaagaacaaggaggagtactactaccgcagcatcttcgctgagcacttccccagcgactctgccgcccgcagcgtaccctcggaagccagtgtggcttgctctaccgccattgccctcgagtgggatgccgccttccgcaacatgaacgacccctctggccgtgccgtcaaaggcgtccatgaaatggcgtattagcaattaagcgacaaaatactgatgacattttggctgttcatacatctttagtataaaaaaagtatatacttaaagactatgaacacaaaagaattggaactgttggcggagaaaaaccgcaaacggttggtggaggtggtgtatgccgccaaagctggccacattggtggcgacctgtcgtgcctgaacgtgatgacggcactgtattttgacgtgatgaacaatatagaccctgcgcagcccaaggctccacagcgcgaccggttcgtgctgtcgaaaggccactgcgtggaggctctgtatgtgacgctcgaggcgaaaggattcctgaaacccgaagtgctggacaccctgggcaagtttggctccatcctgagcggacaccccaccattgaggttcccggcatcgaggtaaacagcggtgcactgggacacggactgcccatcggtgtaggcatggccattgccgccaagatggacaagcagccgtggcgtaccttcgtcatgatgggcgacggcgagcagggcgagggctccatctacgaggctgccatggccggcggcaagtacaagttggacaacctggtggctatcatagaccgcaaccacctgcagatcagcggtgacacggaggacgtgatgcccatcgactccatcaaggagcgctggagcgccttcggctgggatgtcatcgagatgaacggcgactccatggaagacatcgtgaagactttccacagcattgactacacgaaccagaaaccacacttgctggtgtcgaacactaccaagggccgtggcgtgagcttcatggaaggcattgccaagtggcaccacggcgtgctgaacgaggagcagtgccgtgacgccgtgaaggagatagaagcaaggattgcatccctgtcaaaataaagaaccatctgaataacaaaatatcccaaagaactatgatagcttgtagaaaacaatttaccgacacgttgctggaactggcacgtgaggacaaaaatatcgttgc

SEQ ID NO: 1328 - DNA, 16772 bp, synthetic construct
  source 1..16772: mol_type = other DNA
  misc_feature 1..16772: note = Synthetic
cgaatgcacgggtatattgttctttatccgtttcttcggaaacaaaaggcgagagttcactctgccggcttttgcaggtaagcagggcatctgcacattccagtgaagacagtgcttcgctgatttcgctccagtcgtatgcggtgacatccggacggataagtaccaagggatgttcctccgatatccggaaaggagccatgacaaatccctttttttcattcagttcctgaatatccgctaattgttccacatcgcctgaggtttgcaataccaggtagcattcgtctgtccaaggtaaccggtagagggcgaaaccgaggcggctgtgtgtcaggcaatctaataaattttgcgtatgtatatctggtagattcatttctttttcagtatgaaattaacgacacgaacagtagaaaccagttgtccctgtgggctggtgatatctatattccatatatgcgaggatctgccgcggtgaatcagtttgccggtggcgaatactttgcctccgacaggcacggccgacagatgatttccacttacttgtactccgcaggcatattcgtcttcccggcatagcgacatggagccatgccctgccacaatctcggccagagccaatgacgcgccaccgttcaacatgccaaagggttgtgaagtacgatggtctacaggcatttcggcatgtaccgtatcttcggtggagggtagaaaccggatgcccagatgttccgccatcgaattcgaataatcaggtttgcaggttgtttcttctatcatttgtatgtctgttcgtttctataaggctacaaaaataggaaaattttagatgaaaatgtcgttaatgttgttcttttaagaacaaaaacattcgggatttgtttctagtttcggaatatatttcttattttgcaaaaagaacttgtacaaatgcaacaacgaataaataaaataataatttaatacttatgctcattacgattattatccttgtactgtccgcagtattttttgtaaatggcaagatacggtcggatcttgtggctctttgtgctttagtggctttgttgatttttcagatattgacgcctgacgaagctttgtccggattctccaattcggttgtcattatgatggtggggctgtttgtagtcggcggagcgatttttcagacgggacttgctaaaatgatcagttcacacattctgaaattagcgggtaagagtgaattgaaattattcttgcttgtaatgttggtgacttcggctatcggggcttttgtgagcaacaccggtacggtggctctgatgttgcctatcgtggtcagtctggcagtcagtgccaacatgaatcccagtcgtctgcttatgccgttggcgtttgccagcagtatgggaggtatgatgacactgattggtacgccgcctaaccttgttattcaaaatgcgttgacttcggccggtttccctccgctttcgttcttctctttttttccggtagggattatttgtgtggcagtgggtactttggtgttgcttccgctcagtaaatggtttctttcgaaacgggggaaaaacggggaagacaatgttcattcgggcaaatccctgaagcagttggtgaaggaatacgggctgtccagtaatttgttccggttgagggtggtaggtgattcccggctgcatggaaagacgattatagagttggatatccggcgcaagtatggattgaatatactggaggtgcgtcgtggggatatgtcacaacatcgcttcctgaagacaattactcagaagctggccgaccccggtacagttcttcagaaagaggatattctgtatgtgacaggggattttgagaaaataaagttgtttgccgaagattatctgctggagatgctggacgagcatactaccgaagaagcgaaaaactctgccaattcattggatttttatgacataggtattgctgaaatcgttttgatgccttcctccaatctgataaacctgacgataaagggggcgggctttcgtgataagtttaatgtgaatgtactgggtatccgccggaagaaggaatatttgttgcaggacttgggcaatgagcggattcatagcggggatgtgttgctggtgcagggtacatggaacaatatcgcccggctgagcaaggaagatgccgactgggtggtactgggacaaccgctggctgaggctgcgaaggtcacgctggattacaaagcaccggtggctgcggttatcatggtgctgatggtggcaatgatggtgttcgacttcattccggtagctccggtgacggcggtgatgattgcgggtattttgatggtactgacgggatgtttccgcaatgtggaggcggcttacaaaaccattaactgggaaagcatcgtactcattgcggccatgctgcctatgtcgctggctttggaaaaaacaggggcttccgaatatatttcgaacagtctggtcagtgaacttgggacatacggaccgttggcgttgatggcgggtatttatttcactacttccctgatgacgatgtttatcagcaacacggctaccgcagtgcttctggctcctatcgcgatgcaaagtgcaacgcagataggggtaagtcccgtaccttttctctttgcggtgacactgggggcaagtatgtgtttcgcttcgccattctccactccgcccaatgcgctggtgatgcctgccggacaatatgcctttatggattatgtaaaggtaggtctgccgttgcagattattatgggcattgtgatggtgctggtacttcctttgctgtttcctttttaagttgtttataatatatgattccgatgacgtccgctataaaccatccgataggaatagaccaccagattccgatgaccccgatggcaggaatgccggcaagccaataggaaagggctacacgggttcccaacgataccactgtgagcactacggacattcccggcatacggatggcacgataatatccgtacaacaggaacaaaatcccgattccgcaataaaacgctccctcgatgcgtaaataactgataccgatgttcagaatttccgtttcgtgggggcggacaaaaatcagcatcaatggtttggcgaataaaaagaccagaatggaaatgaccagagagaagagaacggtggtaatcaaggcacttttcactcctttgcggatccgttcctcttttctcgctccgaagttctgggcaataaaggtggaaaaggcatttccgagttcctgtaccggcatataggcaaacgagtctatttttattgctgccgcaaaggcggccatgactacagtgccaaaactgttgaccaatccttgtaccatcagaatgcccagattcatcaccgactgttgtacacaggtcagtgcggagaacgaagtgatctctttcaggcagtgacggtcgaaatgcaggtcgttgcggtgtaatctcagttcgggatatttcacgtagacatatcccataattcccaaagcggatactccctgtgcggctaccgtggcgatggctgctcccttgattccccaatccaactgcaagataaagaacaaatccagcccgatgttcagtacaacggaaaccgccagaaaccaaagaggagtgacggcatctcctatggcacgcagcaatgctgcatagaaattatagataaaggtaaagccgattccccaaaagataatccacaagtaatcatacatcatgccataaatatctttgggaatctgcaataacctgaggatgggatgaatccagacgaaaaccgctatatttagaatcaatgttactgtgccgatcagcagggcggatacatagatgctacggcgtagggaatccgtccgtccggctccatattgcaaggaaaaaacggttccgcttcccatagacaatcccagcaggatggaagtaaggaaaaccatcagcgtgtaggcggaaccgacagcggccaacgcaccggaacctatacattgtcctacaatcagcgtatcggctatattgtaacactgttgtagcagtgagcctataatcataggcaaggtaaaacgtagcagcgtgccggtgatgcctccctgcgtcaagtctattttagataacatgatgcgtgtctgttctattctatttcctgtttattttgaaatttattgcgaaggtagggaattaaatatcaaacaacaatagggattgtctatttaatactcggaatgccctttctccttaaaaagagttaatctgaaaacattttccataggaaactttttattataggaaatatcatgtatgtttgcataagttttccgttggaaaatattaaatcaaataaaatagttcaattatgaagtatatagtaataggaggcgtagcaggaggtgcaactgctgccgcacgtatcagaagaaacacggaacaggcggaaatcattctgttcgagaaaggagaatacatatcgtatgccaattgtggtctaccttattatataggaggtgtgattgcagagcgggagaaattgtttgtacagactccggaggctttcgggaaacgcttcaaccttgatgtgcgtatccggtctgaggtaatggccatccatcctgccgagaagacagtggacattcgcacttcggacggggaaacttatacggagagttatgacaaattattgctttctccgggtgcgtcacctgttcgtcctcccttgccgggcattgacaatgaaggaatttttacactacgtaatgtgaatgataccgatgccatcaagagttacttgcagcagcatcaggtgaaacgggcggtaatcatcggggccggattcatcgggttggagatggcggagaatttgcaggaagccggtgcggaagtggcggttgtcgagatggcaaatcaagtcatggctcctatcgatttctctatggcatcgttggtgcacgagcatttgttgcagaaaggggtgcgcctccatctggaaaaggcggtggcttctttcgaacgcacggccaatggattggaggttgttttcaaatcgggcgagagactgccggccgatatggtgttattatccatcggggtacgccccaatacttcgttggcggcagaagccggactggagataggggagatgcgcggtattaaggtaaatgattacttgcagacttccgatgagcatatttatgcggtgggtgatgctatcgagttccgtcatccgctgactgacaggccgtggttgaattatctggcaggtccggccaaccgtcaggcgcgtattgtggcagataacatggtctatggaaataaggttacatacgaaggggctgtcggtacttccattgccaaagtttttgatatgactgtcgctgcttcgggccttccggcaaagcggttgaaacaggcgggcattgattatttgtcggcaaccatccattccggttcccatgcgggatattaccccgatgctttacagatgtccattaaaataaccttctctcccgtgaacgggaaattactgggagcgcagattgtggggtataacggagtggacaaacgtattgatgaattttcgcaagtgattaagcataacggaactgtttatgacttgatggctttggagcaggcatacgctcctcctttctcttcggcaaaggatcctgtagcagtagccggatatgtggctggaaatatactgaacggaaagatgcagcctctttattggcgtgagttgcaggctgccgatttgagtaaagttacgttggttgatgtccgtactcctgatgaatttgcactcggcgctttgaaaggggctgtcaatatacctttggatgatatgcgcgaaaggatgaaagagattcctcaggataagccggtctatttgtattgtggagtagggctgagagggtatctggcttctaatatattgttgcagaatggttttggggaagtaaagaatttaataggaggtttaaaactgtataaagcggcaacggctcctctgcccgaaccggaagctttctcggattccggatcttcaaatatgtgtcattcgtctgcctcttccgtcattccttctatgaaagcgataaaagtggatgcttgtggcatatcttgtcccggtcctatcatgaagctgaagaagagtatggaagaactggcggatggcgaacgtctggagattgtcgctacggatgccggttttccccgcgatgccgaagcatggtgccagactaccgggaaccgttttgtctcagtaaaatcaggagtaggaaagtatgaggtaattgttgagaaaaatactccgcaatcttcttcctcggaagtttgccgggaggataaagggaaaacttttattctgttcagtgatgacctggataaagttttagctacttttgtactcgcaaacggtgcggcggctacgggaaaaaaggtgaccatcttctttactttctgggggctgaatgctatcaaaagactggataagcctgcggtgaagaaagatatctgggggaagatgttcggcatgatgctgccttccagttctttaaagctgagattgtctaaaatgaatatgggtggaatgggagccaggatgatgcgatatatcatgaataagaaaaacatcgactcactggaatctctgcgtactcaagccattcagaacggagtggaatttattgcttgccagatgtcgatggatgtaatgggtgtgaagcgtgaggaattgctggatcatgtgactattggcggagtggcaacctatatgaaccgtgccgaacaggcgaatgtgaacttgtttatttaaatttgcatggagaaaataaaatcaatatgtgtcatgagagagctgttcaaggctctctctgaacttgaaacccgcttgatggaacaatatggtgtgtcattgaatgaggcaatggcactttgttgcattggtggcgatacgctgatggccagtgtgatatcggaaaaaactggcttgtctgcttcgcatacctctaaagtcatccgttccattgaagagaaagaattaatcgtccgtaatttgggggataaggataaacggcagatgcattttactttatccgataaagggcgtgaatgtttggaagcgttgaaagcaaatgaaatagaaataccggaactattaaagccattgtttaaataaacccttctcttttccatttgtttattccggatatgaaactggagaaatggaaaaacaagtggaagaagtggagcaatctgcgcaaatggcaaatatggaaactgaagctgattgatgcccgtttgtatttcgtgagcatattcgtggggctgcttacgggactggttgctgtgccttatcactatcttctttggtatttctttgatgtgcggaaaacttttttcacagcgcattatccgtggtattggcatatattgttattttttatcttatgggggattttgatctttgtcgcctctttggtaaaacgtatgccattgatagccggaggcgggattcctcagacacgtgcggccaacaacggtcgtatccgttatgagcatccttttaaggaactggtggccaaattctgcggaggggtgttggttctcagtgcggggctgtccttgggacgtgaggggccgtctgttcagatagggtcttatatagggacacttatctcccgttggggacatattctgaaaggggaacggaaacaattgctggctgccggagccggtgcgggtttgtctgccgcttttgccgctccgttgtcttcttctttgctggtaatagaatccattgagcgttttgatgcgcctaaaaccgccattactactttgttggccggtgtggtagccggaggagtggccagttggatgttccccacaactccttatcatctgattagtgcggtcgttcccggtttatcttttatccgtcaggcggaactttatattatcttagccgcccttatggctgtcattgcaaagttttattcgctcattgttcctttttttcaagaaaggatgcctgccatgaaactctccattcctgtcaagatgttgtatttattggtcatagcttatgccatttcgttaacagagacgaatctgacaggtggcggagagcagtttttgatgatgcagggaatgaatggaactcatgatatccggtggcttactatcatgatacttattcattttgtttttacgctgttttctctttcttcgggtttgccgggaggcagtttcattcctactttggttacgggaggattattgggacaaatctttgggttggtattggtacagcgtggatggatagggtatgagaatgtgagttatatgatgctgatcgggatggtggcttttttggtggctgtggtgcgtacccctttgactgctattgtcctgataacggagattaccggtcattttgaggtgttctatccttccattgtggtaggtggattgacttattatttcaccgaattgttacagataaaaccttataatgtattgctgtatgacaggatgttccgtagccataatccggagtttcccgaagaagctggtgaccgctatcatctttttgtcgagataatggacgggtcttattttgatggaaaggaagtggacacactggctttacctaatcattgtatcattcgtagcatataccggaatcgtaaaaacttgtttccgcagggacaaacctttattccaggtgaccaagtggagatagaaatggatgcgcaggacatagaaaaattatacgaaccgttagtcagtatggcaaatatctattaaagaatgagtataaaaaagcccccgttagaggacgagggcaacctgaatgttttcacaacggaataatccttattgtgacttgtttcaaattagtattgcaaaactatgaaattaatacgtaagtaacaagtattaatcggaataattggataactttgaagagttttgatagaattgttgtattatgaaaaatatagtaggacttgatttaggtaccaatagcataggttgggcagtagtgaatggaaacatcaatgatgatggaagtgaacaattggttaagatacaggcttctggaagtcgcatcatacctatggatgcagctatgataggagattttaataaaggtaattccatatctcaaactgccgagagaaccagattgcgtggaattcgtcgtttaagcgaacgatatctgcttcgtagagaacggttacatagaatccttgatattctaggatttttaccctctcattttgctcgagatttagatagatatggtaaaatagtcaaagataaggaacctaaattggcttggcgtaagaatgaagcaggtcagtttgaatttatattccaaaattcatttaaagaaatgttggaggactttaaactaaatcatccgaatctgataacggatgataaaaaagtaccttatgattggactatctactatctccgtaaaaaagggctgacttctaaaatctcaaaagaagaattagcttggatattgttgaattttaatcaaaagcgcggatattatcaattgcgtggtgaggaagaggaggaaaacaagaataagcaggttgagttctatgctcttaaagtgattgcagtagaagattccggagaaaaaaaaggaaaggatacttggtataatgtacatttggaaaatgggtggatatatcggcgaacgagtaatatgccgcttgattgggttggcaaaactaaagagtttattgtaactacggatttagagaaggatggaacgcctaaaaaagataaggaaggaaatataaagcgttcatttcgtgctcctaaagaagatgattggtcattggttaagaagaaaacggaagcggatattgatcagactcataagactgtaggtacctatatttatgatacgcttttaggaaatcctagtcagaaattcgtggaagattggtgagaaccattgagcgtaaatattataaggaagagttgaaactgattttggataaacagaaggaattccatccggaattgcaagatagagcattatatgctgcttgtgttgaagaactatatacaataaatgaagcacatcggaataatattggtaatcgggattttacttatttgtttttagaggatatactcttttatcagcgtcctcttaaaagcaaaaaatcattaatagacaattgtccttatgaggagaaccattgccttgataaggaaacaggagagataaaattttttcctgtaaaatgtattgctaaatcacatccgttgtttcaagaatttcgtttgtggcagtttatagtaaatctgcgtatttataggaaaggcttggcacaagatgtggatgttacaaatgagttattgaagactgaagaagattacgttgctttatttgactggttgaatggtaaaaaagaaattgatcaaaaggcttttctgaaatatccgccttttggactgaaaaaagaggtagagaattatcgttggaattatgtgcaagacaaatcttatccatgtaatgaaacccgttcattgatgttggcgaggctggagaaatgtgatatttctattgaattcttgacaaaagagaatgaggaggctttatggcatatattatattcggttgaagataagaatgaaatagtaaaagctttgcagaaatttgcggataaacacaacctgaatgcttcttttgttgatgttttccagaaattcccatcttttaagaaggaatatggttcctattcggcaaaagcgattaaaaagttattgcctttaatgcgtatgggaaaatattggagtgaggattccatagataaaggaacgcgtgaacggatggataagataataacgggagaatatgatgagaaaatagaaaatagagtaagggagaaagcaattcatcttgctgatatttcagaattcaaaggtttgcctctttggttagtgtgttacattgtttatggccgtcattcagaatcgaaagaaatagccaaatgggaatctcctgctgatattgattcgtatttaaagtcttttaagcaacattcattgcgtaatccgatagtcgagcagattattattgaaacactacgtgttgttcgtgatatttggaagcaagtgggaaatattgatgaaatacatgtggagttagggcgtgagatgaagaatccggctgacaaacggaggaaaatgacacagcaaatatccgaaaatgagaataccaacttgcgtatcaagtatttgctcacggaatttttgaatcctgaatatgaggttgaaaatgttcgtccttattcgccaagtcagcaggatattttgcgtatttatgaagagggtgttttaaatagtgtctccaatttaccagaggaaatatcggatatattgaaaaagtttacagaaaccgacttgaagaagcgtccttcaaggtcagaagttttgcgttacaagctttggctggaacagaagtaccgttctccttataccggtgaagtgattccattgggtaagttgtttacacctgcatacgaaatagagcatgtcattccccaatcacgctattttgatgattcttttagtaacaaggtgatttgtgaagcggaagtcaataagcttaaaagcaatttattgggacatgagtttatagtgaagcatcatggggagatagtggagcttcctttcgggaaaaaagtaaagatcttcactgtggatgaatatgagcagtttgtgaaagataactattcgcgtactcgtggtaaaatgaaaaaacttttggtggatgatattccggaggagtttgttgcccggcagttgaatgatagtaggtacatcagtaaagttgtaaagtcactcctttccaatattgttagagaaaaaggagaggaagaagcgatatcaaagaatgtgattccttgcaccggaggagttacggatcgtttgaagaaagattggggagtgaatgatgtttggaataaaattatacttcctcgtttccaacgtctgaatgagttgaccggtacaaacaaatttaccactatgagtctcaataatcatgagattccggcaatgcctttggaattgcaaaaaggtttcaataagaaaagaattgatcatcgtcatcatgcaatggatgccataataatagcgtgtgcgaatagaaatattattaattatttaaataatgaatcggcaacagctaaggctgaattatcccgatatgatttgcagagactgctgtgtgataaagctaagactgatgataacggtaactataaatgggtgatcagaaaaccgtgggcatcgtttacccaagacgtacatggggtattggaagatataatagtcagttttaagcaaaatttgcgtgttataaataaagcgaccaatcacttcttgcattacaatgaagaaggtaaaaagatctttgtgaaacaggaaaaaggggatagctgggctatacgtaaatccatgcataaagatacggtatttggagaagttaatttgcgtaggataaagactgtagctttaaatgaagcaatgaaaaatcctcaaagcatcgttgtgaaagacttcaagagaaaattattggaacttttgaatttaggatttgatgcgaagagaataaagaagtactttgaagataatagggaaacttggagtgatataaatctttctaaaataacggtttactattttagtaaagatactaaagatcgattctttgctactagaaaaccgttggacactagttttgatagaaagaaaatagaaaataatattactgatacgggtatccaaaagatattgttacgtcatttggaattgaaagataataatccggatatcgctttctcaccggatggtattgatgaaatgaatcgtaatattattcagttgaataatggaaagtatcatcagcctatcattaaagttcgttggtatgaacaggctgataaatttgcagtaggtcaaacaggtaataaatcttctaaatttgtagaggctgcgaaaggaacaaatttattttttgctgtatatgagtcgaatattctagatgaaaagacgaatactataataaagaaaagaaattatgctaccattccactgaatgttgcaattgaacgacaaaaacaaggtttatctgttgcgccagaagaagagaatggtaatgaccctatttttgtattgtcacctaatgatttggtttatcttcctactactgatgaattagctaatggcgtggttgctcaacctttggataaggaaaggatttataagatggtaagttgtacgggaaatgaaggacactttatacctgcgagaatagcgaatcctattttacaaacaatagaattgggtagtaataataaggctcaaaaggcatggacagatgaaatgataaaagaaatatgtatgcctataaaagttgatcgtttaggaaatatcttagaatcaagtagtttacataaaaaataatatataaaccttcagaatacgatactatgataaagaaaacactttattttggaaatccagcttatttgtcattgaggaataaccaattagttatcaagcttccggaagttgagaaaagtacctctctgccggattctttcaaagagcaatcggaaataacaaaaccgattgaagacttaggcattgtagtattggatcataagcaaattactatcacttccggtgtgttggaatctctattggagaataattgtgctgttattacttgtgatagtaaaagtatgcctgtgggattgatgcttcctttgtatggaaatacgactcagaatgaacgttttcgtcaacaattgggcgcatcattaccattgaaaaagcaactttggcagcaaacaattaagactaaaatagataaccaagcatctgtattgagagtttgtgtaggtgaagaaatgaaatgtatgcgaatttgggcgaatgaagtgaagagtggtgatccagagaatttggaagcacgtgcggcagctttttattggaaaaatttgtttgcagatattgttggctttactcgtgacagagaagggatttctcctaataatttattgaattatggctatgctatacttcgtgctatcgttgctcgtgctttagtgacaagtgggttgcttcctaccttagggattcatcatcataatcgttataatgcatattgtttggctgatgatttgatggagccatatcggccttatgtcgatgaattagtattcggtttagtgaaattgtatggtgcagatttggatttaacaaaagatataaaatcacgtttgcttgttattcctacactggatgtacgtattggtggtaagcgtagtccgttgatggtagctgtcgctcagaccacagcttctctatataaatgtttttgtggagaaattcgtcgtattagttatccagaacgataatggaccgttttagtgaatatcggattatgtgggtgctagtattatttgatttgccaacggaaactaagaaggacaagaaagcttatactgattttagaaaaaatctacaaaaggatggttttacaatgtttcagttttcaatttacgtccgtcattgtgctagtagtgagaatgcaactgttcatataaatagagttaaatcttttttgcctgaatatggacaagtgggaataatgtgtatcactgataaacaatttgctgctattgaacttttttatggaaagaaattacaaggtgtaactactccgggacagcaattggaattattttaaaaataagaaatcccgtttcaaacgggatttcttattagaaaacaatttcgtttttaatttctgaatacatgcttaactaattgataattaggttgtaatatgtattcagttgtttccaatggttcaaagatactaatttgaaagcaaatcacaaccttgatcatggaggctacactgtcatctagttgtttccaatggttcaaagatactaatttgaaagcaaatcacaaccatcctcggaggggaacagtgatgttggtagttgtttccaatggttcaaagatactaatttgaaagcaaatcacaacaggatacagatggggctttgacagacaaaagttgtttccaatggttcaaagatactaatttgaaagcaaatcacaacaccgcaatgggtacctatcagttcatacttgttgtttccaatggttcaaagatactaatttgaaagcaaatcacaacagtttctgaccatgctgtacggcaatatcattgtttccaatggttcaaagatagcaatttgaaagcaaattacaactatggacgtgatttatgtctttgttggtcacggcttcatttaagaaatattgttcatcgcttgttattgttgtaaaaagccttacattcgcgcacagcgatactgaagcaccgccttaggtgtttcttcttatcgtttattttttaattttttataggcggaatttaatagcaatatgatgttggcattgtcttcttcctttgttcttgtaatagtaaaaatatgatttattttattggtatacaactttttatacataatactactaaaaaagaaacactttaagtgccttcgtggcagcctcatgattcatttgaaaatatttgtatcctcaatccctgaataccgcagaacgagcaggggaaatttcaaacacaaacttgaagatatattcatgcttatcatattgatgaggctcagtaagtgtattaccagagctgaaatacttgaatttggcaaacatcacttgaaacgcttgcaggcgaaagggctattttcgtatgggttacactcggaagctacgctttgccgtgtatccaaagcatagacgatgaaaagatggctgattgaatgtctgcttttgcagaggttttccgcaaggaaatatccgattcggcaactgacatcatttgcattgacggcaaggccatgcgaggtactttgtacaagtatatttggaacacggcaggattgagttaaggatatgccgtatataccgtggggaagaactgattgttgacgggggaaaatggaatggaagtttgatagaaatactcacatctacggagaaaaaatctgatggcaggagtacatctgaacaatgactgcaattaaccaatagaaagttggacgcgaaaatgccctcatgccctcacttttactctaacttgtttataatgagatgtttattagtggtggtagcatcagtgtcagtgagggcattgctctcactaatggatacttaaaaataaattattttaactttgttgtataatgcaaagtacctttgttgctggtttttggggaaatattcagtctatgaagaatacatccgaatcaattcatcttattgattgacagcctgtcacgtgtatgtctttgcaggtgattgaaaattttcatgggcggtcatccattcttccctcttctctgtagtggcggaataaaagtgacatttaaataactgttccaaaggcgaaatttactcaaatttggtgttgttttgccgcaatacctcctctttttcatcattcaacccctaacgttcgttcttataaagcaactgcatggcttgtgcatcgggttggtggtagtctattgtgtgcatatttccctgtctcttagttgttttctcccttttcttttcttactttttataggttataattgcttagtcaccttggtggtta

SEQ ID NO: 1329 - DNA, 16757 bp, synthetic construct
  source 1..16757: mol_type = other DNA
  misc_feature 1..16757: note = Synthetic
tatatcctaaagtatgctccaatccgtggacaggaaatggtgtgaatacttcttctattctaacaccttcgcctcttactttctctacagctgccattaagacatcctcgtcatcataaacacctaatatgtagttctttccttgagccatagtttatttattcttttctccggttgctttaataatacttttcacctctgccatattgattaccggaaaaaactttgcgaacaagaagaacgcagtgaagaacagaccaaatgtgaacacatagacccctatatcgtacagggtcggataaaacatcgcccagcttgacggtaaaaaatctctatgtagtgatgtaacaataattacaaatcgctcgaaccacattccaatgtttacaatgattgaaataatgaatgtagccgcaagatttgtcctgatttttttgaaccagaacaactgaggtgaaatcacattacatgtcatcatagaccaatatgcccaccagtaaggacctgtcgctctgttaataaatgcatattgttcggccgctactccggagtaccatgcgataaaaaactcagtgatgtaggcaataccaacaattgaacctgtaacgataataataatattcatcatctcaatgtgttggattgtgatataatcctccagtttatatacttttctggtaactaataataatgtcagtaccattgcgaaaccggaaaagatagctcccgccacaaaatagggagggaaaattgtggtgtgccatccggggattactgatgttgcaaagtcaaaagacacaatggtgtgtacggaaagcactaatggagtggccagaccggctaaaaccaatgaaaccgtttcgtagtgagcccaagtcttggcacctcctgtccatccgaaacttaatgcgccataaatcgcttttgaaattttgttgttggctctatctctaattgtagcaaaatccggaatcaatccaatgtaccagaaaactaatgagacagagaaataagtagagattgcgaaaacgtcccatagcagcggcgagttgaaattcacccagagagacccgaatgtatttggtaaaggcaatgcccagtagaaacctaaccacgggcgacccatgtggagtaccggaaacattgccgcacatataactgcaaagatcgtcattgcttccgaagccctgttgatagacattctccaacgctgacggaaaagcaatagaacagcagatatcaaagttccggcatgaccaataccaacccaccatacgaagttggtgatatcccatgcccatcctactgttttgttcaatccccacattccaatcccatcccagagggtgattgctaccgcatatcctcccactaatagtaaacccagagagacggccatcgccaacatccaggtaagtgtcggcttctgctctaccctgccggcaatgtcttcagagacatcacggatcgtcttaccacctgtaaccaaagggattctgacttctgcttcggcatgaccctgctgatgaacaaattctttttctttttcaggaactaatgaaattgtagcgtctgacatttatgcgtctattttttcgttttcgtctttatttctcactttcgttaaataccaaacatttggcattactcttaattcttccaaaacatgataagctctaggttctttagactcaacactcttttcattgtattgaagatcaagtgtcctagagatgttactttcagggtctttcatatctccgaagatcaatgcatcggatggacaagatttagcacaagcagtttggatttcgccatctacaggtcttcttctttctttcttagcctctaatttgcctgactgaattctttgcacacagaatgtacatttttccatcacacctcttgctcgtaccgtcacgtccggattcaacaccattttgccaaggtcgttgttcatagtcatattcttattgaacttattattatcatggtacttgaaccaattgaatcttctcactttatatgggcagttgtttgcgcaatatctcgtaccgatacatcggttgtaagtcatttgattaagtccttcggtgctatgagtcgttgcagcaaccggacatactgtctcacaaggtgcattattacattgctggcacatcatcggctggaacgtaacttcaggattttcaacttcagcaagttctttttgcttcacttccatcagatccgaacctccaaactcctttagttcattttctgatcgggagctgtaatacctgtcaattctaatccagtgcatctctcttctattcaacacttcttctttgccgacaacaggaatattattctctgtctggcaggcaatggtacacgttccgcaaccggtacaagagttgagatcaaccatcataccccagtggtgattcggatattcatggcctttccaaagtgatactgcgtatggtttcaacttctctcccgtagcagcagaaattttaggcatgtatcgacccgcttgcggattcttttgataagctcccaatacagtttcctgaatgactgtttccctccctgaatacgtttgacttgtctgagtttgagcaacctttttaatctccccagttagatccaaagaagctcccgataaattatagcttaatccatcagcagacgaagaaaccagatcgtaagcattgattccaatcccattacctacattacctgcttttgttctcccgtatcccaatgctaaaccaaccgttccgtaagcctgaccgggttgagggatgaccggagcaatgaccgacttaccatttacagtcagcacagctactttgtaatccatgtcccccccttcaacaatccatcctttttccattgcttctgcaagagaaacagtaaagtagttatcccagcatgctttagtaattgggtctggcatctcttgcagccaggggttatttgcctgcacaccgtctccgatggaatagttagtataaagtgcaacctccatgccaccggtatttgattccctgatgtttccggcagcaacggttggatctattgatatagttacttccgaagtttcagcttcaacctctagtacaccatcatgaagacttttcttccaaaacatttcaaaatcacctgcggcctgatcagcccatccttctctgatgaagtcataataagaagtagtattatccgaccataccaaaaaggactcttgagcctgtctggtattgaagatattattaattgtcggctgtgctaacgaaagatgaccggtcacggcttcaaaatcattccaggattctaggaaatggctatctggcgtgatgtacttcacggaagcggaggtctcatccattctatcagaagttgagatagtcgtttttacctttcccaaactgctaattaatgacgggccatttacatgatcgtatgcaggattacagttgtagaagattaccgttccaacctgaccggcttttatatcacttattagttgggtaaaagctttgtcactaccctttctcgtatgaatagcttttgaaagatctatagtggctccgtatgaaccaagcaggtcgttgatagcaatcaccatcaattgttcgtttacatcatttgatcctgaaataaccaatgacttaccttttgatttccaaagatcattagcagctttctctaataaacttgttgtatcctttgtattccccactctaaccgtatttgctccggctttttgagcaattaaattgtaaagattagcgatgtatgatccttgttgggaaggtttaattggctttctgtagtctgcatttgatcctgttaatgaaagatttgactcaaatacatagagccttgacatgtcttttttgtccggacctaattttcttgttgctgcaaactgcttgttgttcaaaacttggtttggccatgatcccaagaagtcagcaccgaaagaaacaatcgtttttgccgccgagaaatcatgaaccggaagcattctacttcccgttgctgattcataagcatccaaaatgccgctgaaggaaaccgcatcgtattggatatgctccacattcccgtatttcgcattcagagttttaatcgcccttaaagtacttgggctacagttagaatatgataagatggatattttccccggatttgatccaagttctaatttgattttattgtcaatagtattccagtccgtatcctctccatcaacctttggattttgcaatcgttcctgatcataaagagaaagaacagaagcctcaatttgtgttgttgtacccccactgatcttagaaagattgttcccttcgatcttaatcggcctaccctctcttgttttcaccactatacttgaaacgtcattgcccattgcataagtagatgcgtagtagtttggtattccggggtctacatcaaccggtttatttacataaggaattgcttttcgaacgggtgcctcacatgctgcaagcgaggctgctgccaccccaaatcccatcatcttgagaaagtctcttctggagggctcaccgttctcaccttcatttattggcaagtatccgggaaattcttttgaaatacgctccttaaattcaggggtgttttctaattgctcaattcctttccagtatgttttagtttctttcatttttcttttagatcaactgattgagaattaatagtgacactttgagcattccaacccgcctatatcctctactctcatcggtttcctgctttgttccgaatggaactttaccaacttgttgtagtaggcattatcttttgcattaacggcagtttctctgtggcaattaatacaccatcccattgttagtgttgaatactgataaacaacctccatttcctcaataggcccgtggcatgtctggcattcaatttccgcaacgtttacgtgctgggcgtgattgaaataagctaagtcgggaaggttgtgtactctaatccattctataggttttgtatcggttccgtaagtttttgttgacggatcgtaatcaatcgctgcatagattttttgaatttcctctgattctgttttgatctgcgtgtggcagttcatgcaaatgtttggagaaggaatatttgctgatttggattttctaactcctgtatgacagtactgacaatctatttcatattgtccggcatgtaattcgtgtgaaaaggcaataggttgagttggctggtatccttgctgcacacctatggtaaaggctccgtctattaaagtttttaacaccatgatcgttactacaaagacaaccagtccgagaaaagagttactcttgacaaggccggaaagtgtaaagccctgattgacaatatcctcagcctcttcatcaagatctttctcttttagatattttgtcagggtcttgatcgcaactcccaatgccactaaagcaaccaggaggataacgattaaaatgatgatgatcgccatcaaataagtagaagaaaccgaatctccccccccttcaactcttgtagaagcaactgctacttcttcaaccggcggacctgcatctgtttcggatttgatatatgcaatcaattccatcacctgctcatcagtaaacggataagccggcatcacggttggttgatactcttcccaaagtgcaactgcctgctcatcaccggaagcaatcatcgcttgcgagttcttgatccatgactggagccattcaatagatcttctttcatatacattgtttaatgccggccccagtcttacttcccatatctgatgacattgcgtacagtttgccttgtaagtcgcttctccggctgcaatgacttcctgatccgtaggaatgtcttgagctaaggaactcgaaagtgaaatgaatccaagtgtcaggaagagacctatttgggttagcgtaagtattggttttaccatgtattttgataacttgaaatcaaacacatacaaaattaatattgagaggttgtatttcaaagatgggtactaatccctctttacagcattcaaggtattttatgtaagcaattgtttttcagattattaagtgtaagaaaaatactcataatattattatttagaatgattttaaataatatcagtcattgattcttcaaacccttcgtaagattattatcattttgcactttactcctagccatgttctcttttctcttgatgctcatttccaccctcttatttgatttgcttgtttcacgtattcggtatgaggtccatcatttattgcaggtggcaaattgattatcggcttcaaatctttaatgaacttttccattcctgaatcatgtccaatatctttcaaattttgcattttcttttggtaactataaaccctgtagtaaaattcaaaaataaattccttcctcattgattttattacagataggtttatagttgccttattttttgtaggttcatcactcacgacccttttttactgaagagtaaacataaatcagagatggctgctgcgatgttatcgtggttattgaaaaccttgaaggtttctacccttgcccgtccggcttgtggattcatctttatattcttctaccgctgattgcgcagcggctccgggggttcttgcagcgcgttccaggattgtttttgtttattgagcagctattttttattggaaatctactacattttagcgataccgattaatgaactgttgacttgataggtttaaagcattatttttgagcatggtttttgagaagacaattgaggaagtaataaatgagaattatgtttatgccagagcactacattatttaggaattgacttttttgagaactcctccagaaagttggtagaagtctgtagggagcgagggttaaaccaacaacaagtgataaaaaacttctatgaatttgattcttcagccagatgctcttttaaagagctttcctcctatccaattgaactcttggtagagtacctcaagcatactcatcatattttcattaaagaaaagcttccttatatcgttcacctggccaaaacatacgagaatcctgcacttcgagatctaatgccggaatttgtagaagacctgattcgacatatttacgaagaagaggataccacttttaaatacatacatgcccttaatgaaattaacaaaggctatgaaaaggcacccatttccagattaatacattttgaagacttttcattgaaagatgagttagcacatcacgagggagaagatgaattaggggccattcgaaccctttttgatttattagagaataacaaccttcacggaagagtccttttaaatgagctaaaggcttttgaccgagaaatgatctaccatgcggctatcgaaaatcaaatactctttccaaaggcaatttcacttgaaaaggaagttctgaaaaaaattacttcactaagtaaactcaactaatgtctcgcatactagcgattgattatggagccagaaggacgggtttggcagtaactgacccattacaaatcattgcaaatccgcttgacgtggtgcctactcacgaattggaagaatacttaaaaaattatttctccattgaaaatgttgaaaaagtagtgattgggatgccaaagaatacgaacggttcggataccgatgcgactgttttggtccgggcatttgtaaatcggttcagaaaggtatttatagatatgcgactaattttacatgatgagcgattcacttccaggcttgcttttaattcaatgatcgccggaggtctgaagaaaaagaatcgtcagaacaaaggaactgttgataaggtgagtgcaactatcattcttcaatcttatttagaaagtatctcatgatttttccaatcgtactgtacggggatccgattttgaagaagaaagccacagctattgaaaaaggcaatgatgctataaaagaatttgtggagagcatgtttgagaccatgtatgaggcacagggagttggccttgctgccccgcaggttggtcattccattcgattgtttgtgacagacaccgcaccaatggaagaggaaggggtgaatggattgaagaaagcattcatcaatccaacaatgttagaagaaagcggtgaagaatggacatttgaagagggatgtcttagcatacccggagttcgggctgatgtgaatagaaaaacaaaaatcaggctcaaatactttgatgaaaactgggaggagcatgaggaaatatttgacggaaagaaagcaagagtgattcagcatgagtatgatcacatagaaggcaagttattcacagattatctctcctcttttaagaagcggctcatcaaaggcaaattagcggacatcagtaaagggaaaacggacgtaggatattgtgtaaaagttccaaagtagtgcaggatttatctattgctttgattcaaactgatttacactgggagcaggtagatgctaaccttgctatgtttgaagagatgatttggagtatggatgcagatgtagacctcatccttctgcctgaaatgttcacaacaggcttttccatgaacgctgaaaaacttgcggaatctccgggtgggaagaccttcagatggatgcggcagatggccaaagtgaaagatgctgcaatggcaggaagctgcatgattaaagagaaatcacacttttacaatcgactttattttgtttatcctgacggcagcgcagcgcattacgataaaaaacatctgtttacgctggcaggagagcataaagtctatactccgggtaaggaaagaaaaatcattgagtttagaggatggcgtattaaacctttgatttgttatgaccttcgatttccggtttggggtcgatccgaaaaaaaagaagaccgggactatcaatatgatctgttaatttatgcagccaactggcctgatgcaaggattggagcgtgggataccttgttaaaggccagagccatcgaaaatttatcttatgttgcaggaataaatcgaaccggcatggacgggtatcccaaagaataccccggacattcatctgtttatggctacgacggagaacaattggctttctcagacaaaaaagaagagattctttatgtaaacctgtcttccgaaaatcagcatcagtttagaaaacgatttaattttcagtatgatgcggattcattcattctcaaataagtccacccctattattataatgtcatcctcaaacactttttattagattgagttcatggttaaacttccgtttattctttggataagtgagacgaatcagcctatatttaaggatatgaaaaatgaagatagaatcgttgaactactagcggaaagccttcgaagacaggacaggcaggaagatatactaaagaaccaaggagatgtgctaaagaaacagggagatgtactaaaaaaccaaggagatacactaaagaaccaaggagatacactaaagaaacagggagatatactaaagaaaattttagaaactcaggagaagttagtagaccagtttcatcgaatggtggatcagtttcatcgaatgaatgaccatttgctcacttaagcaggaatatactaaagaaaattttagaaactcaggagaagttagtagaccagtttcatcgaatggtggaccagcttcatcgaatgaatgaccatttgctcactaagcaggagaaaatagaagacagagtctctaggcttgaagataaaatttttggaaaatagctgacatttaaaccatcaatgccgaccccctcccccaacccggaaatagaacatagcaaaaagataactacacttggagagagccttcgggtaataaaaaagccccgcagatgggcgaggcagccaaatgttttcacaacggaataatccttattgtgatttgtttgtaaattgtacggcaatattacacaaggtttttaataaataaaaaaagatgaagaaaattctcggattggatttgggcactaacagtattgggtgggctttggtaaaacatgattttgataataaagaagggaaaattgagggactagggagtaggattattcctatgtctcaagatatgttgggaaattttgatgcaggacaatccatctctcaaaccgcagagagaacaaagtacagaggtataaggaggttatatcaaagaactaaccaaagaagagagagattacatcgtgtattgaatattcttggttttttacctgaacattatcggcaacaaatagactttgaaaaacgacggggtcagtttaaaagcaaacaagaatctaaactcaactacaagccttcatggaatgaggagaaaaagaaaaatgattttcactttttgtttcagcagtcctttcaggaaatggtcaatgaacttagaatatcccagccacaacttttcaggaaaaagaaaaatggagaagatgtcaaagtcccctatgactggactatctactatctgagaaagaaggcattaagtcaaaaaattagtaagcaggaacttgcatggatcattcttaatttcaacccaaaaagaggatattatcagctaagaggtgaagaagaggaggaagcatctgataaaaaggtgaaaacctttgagattctacaggttgatcgacttgaggactcggatgaaaaaatcaaaggatctaatgcaaaactttatgatgtctactttaaaaatgggtggaaatacgacaagcaaattgtcaagaccgaagattggaaagacacaacaaaagaattcatagtaacctccacaacagataaaaatggtgagaccaaaagaacgtttaaaaaggtggattcagaaaaggactggatcgctattaaaaataaaaccgagcaggatgtagatgagtccggtaagcatgtaggcgtatacatctttgatgaactgcttaaaaatcctcaccaaaagatacgaggcaagctgataaggacaatcgaaaggaagtattataaaaaagaactggaggcaatactaaatgaacaagcaaagcatcatcccgaatttcagaataaaaggctctatcaaaactgcttggatgagctatacccgagaaatgaagatcaccaaaataatatcaaaaaaagggacttgaaatacctgctcattgaagacattattttttaccaaagacctttaaaaagtcagaaatcaaccatttccgactgtcaatatgaaacctatacctataaaaacaaggatgatatcgtcagcgaaacatcggtgaaagcggcacctaaatcccatccgttatatcaggagttccgactttggcaattcatacaaaaccttagaatttatcaaaaagagggaaaggtagatggaaagataaaactggatattctgattacagaaaattgctttaaaacagaggaggaatgggtagacctttatgaatttttagcgctgaaaaaagaggtaaatcaaaagcacgtaattgattatctggtgaaaaaaggcaagattaataaggcagaaaaagacaattacaggtggaactatgtggaggataagacatatcctgctggagaaacaaaagcacaaattttaaatcggctttataaagtaaaagggatgacttatgctaaaagttggcttactaaggacaaagagtttgctttgtggcatataatttactcggtctctgataagcaacaatttgaaaaagccttaaaaacatttgcccaaaagcataatgatttgcatacagattcatttgtagaggcatttaaaaagtttccaccatttaaaaatgaatatggagcctattcggtcaaggcactgaacaaactgctgcctttgatgagacgagagaaatattggtcagaaaaagatattgattcggacattctaaatagaatagataagctgctatcgggcgagtttgacgaaaaaataagagacagggtacgagaaaagaccattcaactgaactctttagaggatttcaaaggactacctgtatggctgacctgctatattgtttatgatcggcattcggaaagcaaagacatatctaaatggaagtctcccgaggatatagatgcttatttggaatcttttaaacaacacaacctaagaaatccaattgtggagcaggtagtattggaaacgctgagggtagtaagggacatttggcaacattacggaaagggcaaagaggattttttctctgaaattcatttagaactgggtagagaaatgaaaaatcccgctgacaaacgaaggcgaattacccaaaaagtgagcgaaaatgaaaagaccaattaccgtatcaagcaaatattgactgaattgatgaatgacggtgtagcagttcgtccccattcgcccagccatcaggagatactgaaaatatatgaggagggagtatatgagaattcccctgatgattacaaaacagtaaaaattaaagatattaatgaaattagaaaaaataatgagctgtctaaaaaggatattgaatgctataaactttggttagaacaaggctatgtgtctccttacacaaagagaacgattgcactttccgacctatttagtgaaaaatatcaaattgaacatatcatccctcagtccagatattttgatgattcactaagcaacaaagtcatctgtgaacgtgctgtgaatgatgagaaagacgatcagaccgcctacgaatttatcaaaaataaggctggaagtataatagatctgggtcagggagaaggggtgaaggtcttatcattagatgattatgaaaatcattgcacaaaatactttttaggaaagaaactgaaaaatttgctctcggaagaggtgcccgaaggattcataaaccgacagatgaatgatagccggtacatcagtaagttcattaaaggactgctagctaacattgtgaaagaggaggatgaaaaggaagctatttcaaaaaacttgatgcccgtcgcaggtgcaataactgataaactgaaaaaagactggggtcttaatgacaagtggaatgaattgatggctccccggttcaagcggcttaatgaacttacaaaaagcgatgattttggctattgggataaagaaatcaatgccttccgttgtaaggtgccggatgaagtagccaaaggatttagcaaaaaaaggattgaccatcgtcatcatgcaatggatgcacttgtgatagcatgtactacaaaagatcatatcaattacattacctctatcaatacagaaaggaagaattacagtttagtcagcaagctacgaaatcaaaaagagataactactgtgaaaggaaagaaaaaaacagcaccaacatcttacaaacttccttgggaacactttactatccaagccaaagaagcactggagacgactgtggtgagtttcaaacaaaacctacgtgtaattaataagacaactaataaaacatggcaatgggtgaaagaaaatggccaatggaagaaaaatcttgtaagtcagaacaaaggcgacagttgggctatcagaaaaccactgcataaagagacagtttcaggtaaagtgcttttaatgagaggagagcaagaaaaagagatagaggctacagccactaggatagaactttctgataaattcacccgaaagcaacttaataaggtaactgatacaggaatccaaaaaatccttgaaaatcatttatcaaattacaaagatgaagatggtaaagagcagttcgattcagcctttggagtgaagggtatagaagaaatgaataaaaacattataaaacttaatggtggtaaacctcatgccccaattaaaaaagtaagaatctatgaggtgggcaataaattcccgatctctgaagaggcatcaagctcaaaaaataaaaaatacgtggaagcggctaaaggaaccaacctcttctttgctatttattggaacgaggagaagcaaaaacgtgaatatgaaaccattccgctgcacaaggttattgagcatcagaagcaggtagcacacctgccaaaatcggaacgtacacccatcccgacagaccatgaaaaaggtgtttttatatttagtttatctcccaatgacttagtctacgtacccactgatgaggagcgaagtaaccctaatttagtcaatttcgataagctgaataaagtgcaggctgaaagaatctacaaaatggtaagtagtaatggcaatcagtgcttttttattcaggtgtctgttaccaaacccattgtaaataaaaaggaatttttagttatgaataaaatggaaaaatccataggagatgtgatggttaaggatagatgttggaaaataggtgttgaccgcttaggcaatattcaaaacaaaatcatcatcaaaaactaaaaccattcacgaaatgaacaaaacagctttgtctcagtcaaaaacaacctcggaacagacaaggataaccccgtatcaggcaaggataaccccgtatcgggcaaggacaaccccgtatcggacaaggacaaccccggattgggcaaggataaccccgtatcgggcaaagacaaccccgtatcgggcaaagataaccctgtatcgggcaaagataaccccgtatcgggcaaggataaccctgtatcgggcaaggataaccccgtatcgggcaaggataaccccaaaatgattaaaataaacaacaaaaacaacctctgaacgtttaaaaggaattattgagtaatttcataaagttttaaaataagaaggtatctttaactaaacatataataatcatgaggcaagtacaaatcaaccgtctggagatgtaccagaccacgcttgactacctggacgcacataatgctgtctggaatgcggtacccatcatagggaaatataaaaacacgctttcggagataaacacagcaatcaaagcagcagcggctgagcaggccgatgcgcaggtttttatcgggaagtctttatcggcattgaaaaagaatatcgctgcgaagatggacatcctggatgacatgctggaagcgtatgccctggatacggacaatgcggaactggcacagcaggccgataattctactactgattattttgacttgcccaatgaagacttcgagatcaaagtaaagcaggtcatcggtctgctggaaacgcacctgaaagcaatggccgactatgggatgtccgaagagcagttgaaggatgtaaaagcggattatgaccagttcctcacttcacgcggcaagcctcgcagctatcaggtagccagcagagtggctacgcaggatatagaaaccctcttcagagaaggaacaacagcgaccgagaagttggacagggtgatgaagcgctacaagcgtgccaatgccaacttttacaacgggtatgtagctgcccggaaggtcgtggataattgaacccgacagatatcgggaacacttgaaaaacttttggaaaggttgaaacttctcaaaagttaacttcaagaaaaaatggtacttcaaaccttcaaggttttcaaaaccttgaaggtttcaaaaccttgaaggtttctatcggcctcctgccataagatatcaaagcccaagctacctttgagatatgaatccggtaaaatcaaatattgcaaaccgcaccctcttttgccatgacaacttggaggtgctaagaggcattaattcagcatgtatagacttgatttatcttgatccgccttttaacaagaaaaagacctttaccgcacccattggcagcagtgcggagggtgcgtctttttctgatattttccgtgaagaggatgtaaaagaagactggctaaaagacatcaaggaagaccactacgctatccataagttactcagtgcgattaaagacattgaaggaaaatcttcctacaacttctgctaccttgcctatatggctgtccgtttgatggaatgtcaccgggtgctaaaagacaccggcagtctatatctgcactgcgaccctgtaatgagccattacctgaaattattgcttgactgtatcttcggtgaaaagaaatttaggaatgagattgtttggtgctataaaagtggtggaacaagcaaaagatacttttccagaaaacacgatattatttttttctattctaaggaaagtgtttacaactttaatcttgagaaagaaaagtcgtatggacaaacaggaggaggtcaaagcggtaaagtaaaatactatcaggatgagaaaggagcatattccatagttggagcaaaagattggtggcaaatatctatgctttctaccacgcacagcgaacgcactggctaccccacccagaaacccctggcattgttagagcgcatcattaaagcaagctcaccacaggacggaatggtcttagacccgttctgcggctgtgctacaacgtgcgtagcagcagaaaggctgaaaaggaaatggatagggatagacgtatccgtcaaggcttatgaactggtaaaagaacggttaggaaaagaggtagaaaataagggtacgcttttctacgagaaactggtcaggtttaatactgaccctccgatcagagatgacaaagatgcttactcccccaacagaaaatacgtttacatcataagccatccgcaatacgaaggggaatacaaggtaggcattgcttccaatgtaaaaagccgtttaaatagctatcagacggctgatcccgaaagaagctaca

SEQ ID NO: 1330 - DNA, 16733 bp, synthetic construct
  source 1..16733: mol_type = other DNA
  misc_feature 1..16733: note = Synthetic
gaaatgaaactgcctgtagaggaaggggataccgcaggaaagcacaaacttctcgccgactacggaaaatccatctacagttcgatcaccgccggcgaccctgatgccatctgggttacacaaggctggacattcggctaccagcacgatttctgggatccggaaagcctcaaggcaatgctctcagaagttccggacgacaggatgataatcatcgacctcggcaatgactatcctaaatgggtatggcacaccgagcagacatggaaagtccagcagggcttccacggaaagaaatggatatacagctatgtgccgaatttcggaggaaaagtcctcccgaccggtgacctggacatgtacgccacagcatcggcagaagcgcttgcctcagaatatgcggacaatcttgtcggcttcggcagcgccccggaaggccttgagaacaatgaagtagtctatgaactgcttgccgacatgggctggacgaaagacagcattgacattgaccgctggctggaaggctactatcgcgcacgctatggattcagcgacgaaagaatgagggaagcttggaaactattgcacaaatccgtatatagttcactatattcatacccgcgtttcacctggcagacggtagtgcctgaccagaggagaaagagccgccacgacatcaatgatgacttcggaaaggcagtggaaatattcctgagcctttcagacaaatgcaaggactcccctctctatttcaatgatgccatagaattcgcatctttgtggctgggcgaactcgctgacagacattatgaaaaggccctgaagctcggacgcaatgaaaaaggcagggaagaattaagaaagaccgtcgccatactctccgacgtggaccgcctgctcgcatcccatcctctccacaggctagacagatggattgctgacgcaagaaatgaaggcagcagcatcgaaaaggatcatagggaggccaatgccaagaggctcatcaccacatggggaggatggcaggaggactacgcggcgagattctggtccggactcataaaggactattacattccgcggattgaaatccatttctccgaaaagccggagatgatggaagaatggaaagaggaatggatcaacaccccttatcacagcaatacgaaaccatttgactctcctctggaggtcgcaaaagaactcatagcaaatgaaaagtagcacatccgggatggcgtggatatcacgcgcagccatcattttcacgacattgacatttgtcgcttcagctcttgtcggctgcggcacggacaaggcgacacagaccgtatttacagaaaaagaacaggtcaatgccgtgaaaggcctcattgaccgtgtcacttccggcaggtcagcagacttcatcgtccgtcttcttccggaacgtcaggacagtctcgactacttcgagttcagcgccgaaaacgggaaaatcatacttggcggaaacaatggagtaagcatcgcaagtgcgctcggacagtatctgcgcgacttctgcggattccacctgagctggtgcggaagcaatacagttctccccgaaagcctgcctctgccggaggaaaaggtgacgaagacttcaccgtacaaatggcgttactacctgaactactgcacattcaactacagcatgagctggtgggacttcgacagatggcagaaggaaatcgactggatggcattgaacggtatcaatatgccgctggccatcaccggtcagaactccatctggcgcagggtttaccacaagctgggccttactgacaaagacctcgagtcgttcttcagcggtcctgcatatttcaactggttctggatgggcaacctggacggctggtgcggtcctctgcctcagagcttcatggaaaagcacgagcagctgcagaagcagatcctctatcgtgaaaggtcattgggcatgactccgattctgccttcatttacaggccacgtgccccctgcattgatcgaaaaattccctgacgtgaaggcgaagaatacgcagtgggtaaatttcccgaaaacctatgtgctggacccttccgaggaaatgttctccgaaatcggaaagctgttcctcgagacgcagacagagatttatggtacaaaccattattacacagccgatacctttaatgaaaacataccgccgacagattaccccgaatatctgaaaggggtaagcgccaaggtttaccacgcgatgtcggaggtggatccggaggccgtatgggttatgcagggatggatgttccatcacgaaaggcatttctggcatgaccctcagattcaggcacttctgtctgctgtgccggatgacaagatgctgattctcgacctgtggagcgagagattcccagtttggaaccgtacccatgcctattatggcaaaccttggctctggtgcatgctacagaacttcggacagaacataacattgtccggaaacgcgacttccgtggccaacgaccctgctgctgcattggcagactcaacttccggaaggatgagcggcatcggcctgactccggaaggcatcggacacacccctatcatctacgcgctcatgctggaaaatgtctggaacgaaggcaggcctgtggacattgactcatttataaagaattatacgacaaaccgttacggcaagctctctcctgctgcggtcgatgcctggaagggcattttcgccaccgcgttcgagaacaatgtgaacaatggcggtcacgagtccatcatctcaggacgtccgaccttcgtggagaaccctaagggctgtacgaataccaacaaatgttatgagcggacagacctcgtaaaggcctgggaggcactgtattcatgcattgatgaactttcagggagcgacggctacaggtacgacatcgtagatatcacccgtcaggtgctcgccgactatgcttcggtgattcagcagaagttcgccgcaaactataagaatggtgacatggaggcgttcaaggccaatgcagaggctttcgatgccctgatttcggatatggacacgctgctggccacaagaaaggaattcctgctcggcgtatggctcgaaagtgccaaggccatgggtacaaatgccgaagaatcagcgctctacgagaagaatgcacgaaatctcctgggcacttggggcaacaaggactgcaagcttttcgactatgcctgcaagcagtggtccggtatgatggacggctattacaggcagagatggggtctgttcttcgaggatgtcctcgcaaattggggccacttcgaccagaacgagtttgcccagaaatgcaaggactacgaatggaactggatttccgacacgacatgcttccctaccgagaagagcggggacgaaatcgaggtcgtgaaaaaactctggaacaagtacaatgcagatttgaggcatgaataatctacagccaaacggacgtctcgcatcactggatgcgctcaggggtttcgacatgcttttcatagcaggtctcgcctacctcatcagagccatctgctgtctgttccctggcggagaatcctgctggctggaagcacagatgcaccatgtggcatgggacggtctgacacatcacgataccatattcccgctattcatatttatagcgggagtatcgtttccgttttcctacgcaaagcaagtaagcgtcggcaggaccaagggccagatctacttgaaggtattctggagagcagccatgctggtatttctcggcatgatatgcaacggactgctgaaattccagagcggaccgcacaggtttttcagtgtactggagcgaataggagttgccggaatgctggcttccattctgtatatgaatttcaagccttgctggcggatagtcatcgctgcattgatcctggcagcctatggggcagtcagcttcattgtggctcctgatgcgccggcagggacatcgccgcactgtgtcgagggcagcatcgccgcgtatatcgaccggaccttgttcgcgggccgtatatacaaggaaggcgtctatgagcctgaaggtctgctgagtacgttcccggctgtagttacggcaatgctgggaaacttcaccggcgaatatctgcggctcagcaagcacagcggaaacaagaagtgcctgtatatgctcgcagcagctgtggtcatgactgtcatcggactggtctggtcacattggcttccactgaacaagaagctgtggagcagttccttcacgcttgtcgtgggtggttattctgtcgctatgcttgcgcttttctattggataatcgatgtcaagggctatcagaaatgggcttttccgctgaaggtggtgggcatgaattccatcgccatcttcctgctgcccaagttcattgacctgaaatatactgtcaatttcttctgcggcggactgtgcaatctcgtgggagagggctgggacaaggtgctgttctggtcggcttatctgctgctgaattatctgattctgcacttgatgtacaaaaaggacatatttatcaaggtatgaaaaaaatagtcatcgcttgtgattcctataaaggatgcctgtcatcctctgaggttgcccgggctgctgccgagggcgtggccgaggtgtatcccgactgtgaaatcgtccgtctggctgtagctgacggtggagagggcactgtggatgcgctcgtggacacattaggaggccatctggaatgggctgaagtctctgacccgctgggccggcctgtcaaggcagtttatggggtggcaggagatctcgccatcatcgaatcagctgctgcctgcggacttacgcttctgaccaaagaagagcgcaatccgctgattaccaccaccagaggactgggcgagctgatattggccgccatcgacaaaggctgcagacgcttcctcatcgggctcggaggcagtgctaccaatgacggcggaatgggaatgataagcgcagacgggtttctggaaagggcccgcggcctgtcgtttacggtagcctgcgatgtggatactccatatataggaaaaaatggggcaagccgtgttttcggtccgcagaaaggggcttcggaagaggatgtggaagtgctggaggaaagactgcgcggatatgcattgaaaatactggctgacaccggcattgacgtaagcaatatggaaggagcgggtgccgcaggcggtcttggtggggctttccgtgcgtatttgggagcggagctgaggcgtggtgtggacatgattctggaccagatcgatttcgaggaagtcattgaaggggcagatcttgtcatcaccggagagggctgctcggattaccagacattgaagggaaaaactgctgccggcgttctcgagagagcaagacggatggggattcctgtcgcgctcgtgagtggcgccatcagagacgagcagatgctcctgaaaggcggtttccatatcatcgaggccgtaagcccacaagggatgagcctggctgaagcgatgcgtccggaaactgccaaacacaatatttacgaaactgtcaaacgtttactgctcaatgaatagcgcaattgcagttgcaatcggtcttacgcttgcaattattctgatactcaagaaatgtcaccctgtctatgctctgattctcggtgctgtagtcagcggtcttatgtccggatggggtttcgacctgacaatcaaggaaatgttttccggcgtgcgggacatctcccctgccattgtcaggattcttgctgccggcgtgctgaccggtgtgctggtcaagaccggcgcggctgacaagatagctctgaccatcgtggagaaggccggacggcgcaatgtcttccttgcattggccttgtccgtattcatcctcaccggcgtgggcgtatttatcgacgtggctgtcatcacggtggctccgattgccataatgatcggcaaggagatgggcttgtccaagggaaaagtgcttctggcactgatcggtggcggaaaatgcggaaatatcgtctcccctaacccgaacaccatcattgctgcggagaactatgacgcgccgctgtcgtcagttatggctgcgggcattgtcccggcactggtcggaatggccgcgctgattttcatcatattgccgatgctgccagacaagggcttttcggatatgaaggatgcggagggaaccgactgttccaagactgatttgccgtcatttatggcaagtatcactggcccgcttgtggctgtgctgctgatggtcctgagaccggttttcggcatctccattgacccggccattgctctgccggcaggcggtcttgcaggggttctggcgacgcgcaagtggaaaagcacgctggagagcatgagttacgggctggagaagatgtccccgattgcggtgctcctggtgggtacgggtacgattgcaggcgtcatcaaagcgtctgctgtcaaggacctgctgattagcctgatttcaggatgggacggcggtgcggcactgattgcgcctgtttcgtcgatcctgatgagtgcggcttcggccagcacgactgccggtgccacgattgcatctgcttcattcgcgcagactgttctcgctgccggggtcaatgctgtctgggcggcggccatgaccaatgctggtgccaccgtcctggaccatcttcctcacggctcgttcttccatgccacaggcggttctatcggaatggagctcaaggaaaggctccggctgattccttacgaatcacttatcggacttgtcctagtaagcatgacgggtgtcatgatgctgataatggtttaacaaagtgctggaatgattatgaaaagaatttgttatatgttgctcgctgctgcattgttggcagcgggctgcacaaaagaggataacggaggcccgatcgaggagctggtaatcggtatcagcagttccgaaagcaaggttaccctcggaagcgaaaacgcagaacagttcagcctcctgtggtccgaaggtgacgaagtcgctgtaacaggcgatgcaggccaatccgttttccgtctgaagtccggtgcgggttcgacaagagggacatttgaatacaaaagcggtgctcgcggccacaatgtaatcaaagatgtcatcttccctgccaccaatgccggaaacgttcctgccacacagaattacacggcaggaactttcgacccgtctgccatgaacctcacgtatcacaatccgtccggcaccaaagagcattcggtaatgctcgaatgcaagtcgagtgttctgtgtttccagatgaaaggcatcgacaagctgagcagcatagcagtctctttcaagaacggcaagacctacaccctcaagacgctgaatgcgccggtcctcgacaaatccaaggccgcgccattctacattgtcgtaccttcgcaaaagtctgaccgagtggatgttacattcacatcagcgtcagggtcaatgaacagaagcctcctgtccaaggaattcatgtctggacatgtccaccgcttcgcccagctcgaattcaaggctgacaagaagtacaggatcatgtcctacaatatcggccaatgctctcaaggcggaaattccagcaccaagttgatcgccgatgtcaccagggagctcaaggcagatgtcgcggtaatgaatgaggtcagaggcatacccaatgacgcgaactctattgccaagtacttaggttgggaaaagcattatgaaagcgcaaggctcggtatgggcaacatgattacctacaacccgaaaactctgaagcttataggcagtccgacctccctcaaactgaataaactggaatcttcaactgtcaaatataatgaggacagagtttgcctgttcacggaatttgaggactttatcctattaggctcccaccttcagaaagacgctttcacggttcacgccaagaagattaccgccaaggtcaaggccgagtacgcaaagaaaggcaaaccggtgattttctgcggggacatgaacaccagaccatactcagtagagttgaaggacttcacatccgaatggagagtgctgtccagaacggaccagtccacattctacaatcctgaccagccggacaacctgatctgcatcgactacatcttcctctggaaaggcggccctgatgtatgggtaacagaagcaaaggtatgcaagcaggtatcatgctgcaccatcactgatgcctcagaccacttccccatctatgtagatgtcaccgtaggcaacagcagcctcccgcttttagaggaaaaggtgtcgctcggctcgtataatgttgtagctgagaactatcaatgataaacatttgaccattcttaccaagttcgtctcttgtgtatctccttggcgaattgaaagaaagaagcaccatcagtcatactgccctacgttcagatttctccggtcatagatggcgcgattctatctatgatcttagttctcaaataagcggcgctcattaagcgggaaggacacgacttcgtggtcaaggctcgcgtactcagaggctttccttaagtttagtaacctcttccagggacaagtcggtcgccttcgccacgacctcacaaggagttctcaactgaagcaggttaatcgctacttccagattacgttcctcacgaccttcttcgcgtccttccgcgcgtcctttcgcgagtccttcttcaagacttgtcttcttggcgtactcgatttgattgtgggtgtcacgtgctgttgtcatggcctttacgtaattttgtttgtcaatgttgtcaaggctggcgtactcggcgacgtcgaagaggcggctgaagatcctgtcccgcagcgctgccggtctttccaggagcttcgacaggttcttcaggatgtagagccacttgtcgaaatcagtagtcaattcatccacgcccttgctgaacttctcgacctcgatgaagacgaacttcagcttgtccgtcatcgtcttgccggtcgtcgcctcacgcaacagatacctgtgctcgatgaggtcgtcgtcctcgtacctgaagttcagcactccgaggaaatacaccccgtccagcttgtagtcccactctttcttgatgccggtctcctcatcccgctgcgccttcttgccctgcttcatgatcgggaaggaagtgtagtacaatgccctctcgaaaaagtgcttctgtgtcgcacactgcatttcaacaatgaactcctccccattcttcgtcctgcagatcacatcgaacacagccttcctgtcgtcttccatgattcccagctgctcagccggaatataggtgatgtcttcaatctcatgttccggaaagatgactttcaggaattcaatgagaatgtccttgttcacttcgcttccgaagagccgtttgaaggaccagtcgaccatcgggtcgatgtacctcgccttgatcttttcatccataaaggtaaaattttttagttgttaaacaaaatttggacacaagattcaaactcagttatcggtttctcgtgtcaatcaaggctacaatagtatgcaaaatttttccgaaaaacgtgtaaaaagacgctgccaatgaaaatttttacgatttttaaatgtttgatacgattcttaaatcttttatttacaattcttaaatttttagtcgatgcgcgatcgatgatttcgctgtaaatttccactgaccgaagtgatcaataatgaccgaacagcagcaaaagcccgctctgctcaggttgcttcttaaaagtaaagccgatgctttccttttctctcagttttcattatatttgtgacaggccatctgaaaaaaaagaaggcgaagaagtgttatcctctccaccttaaatgttttcacaacggaataatccttattgtgatttgcttcagaatggcacaaatttaaaaacaatacactgaataaacaataaccgacatgaaaaaagttttaggtctggacttaggcaccaactcgataggttgggctgtgatagatacgaagcagaatgagaatggggaagaagtgtttgacaagatagtttgcgctgacagtagaataatacctatggatcaagcgacaattggagattttaatagaggaaattccaaatctcagacagcggagcgcaccagatgccgtggagttcgacgcttatatgaaagaggacatttacgtagggaacgtctcaatagagtactttctgtattagggtggctgcctgataattatttgaagagtttggatagatacggcaaattcatagctggttcagaacctaaacttgcatggagaaaaaattctgaaggaaagtacgagttcctttttgaaaaggcttttcaagaaatgcttgaagattttaaagctacaaaacagcaggttgttgcagatggtaagaaagttccctatgattggaccatatattacctgcgtaaaaaagcattgaccgagcggttgtctaattttgagttggcgtgggtgcttcttaattttaatcagaaacgtggttattatcagttgcgtggtgaggatgaggaggagaaatctggaaagattgaagagtattattctctgaaagtagttgagatagaagatactggagaacgaaaaggctctgatacgtggttcaatattgtgttggagaacggctttgtttatcgtaggccgtttcatgaggctccggactggattggcaaggtgaaggatttcattgtcacgactgatgtggatgtgaacggaaatccaaagatggataaggaggggcaagtaaagcgttccttcagaatgcctaaggaggatgactggacattgctgaaaaagaaaacagagtgtgatatcgacaactcccgaaagacggttggcgaatatatttatgacgcactgctgcataatccagagtcgaaagtgcgaggtagacttgtccgtacagtagaacgtaaatattatcgtcgagagttggaattgattctggataggcaggtggccctcaatcctgatttgaaagatgaagaattgtattccaaatgcatagaagccttatatccaagtaacgacgcatatcgaaacagcatctcgggaaggggcttcaagtatctgtttgtcaatgatatcattttttatcagcgtccgcttaaaagtaagaaatcattgatagatgattgtccgttggaagagagatactatgtacttccaaatacaggagaaaggaaagtcgagcatatcaagtgcattgccaagtccaatccgtatttccaggaattcagactatggcagtttctttccaatttgaggattatcgagcgggaacgagttgctgatggctcgataaaggagaacattgatgtaacttctaattttatcgatgggaatgaatcgttggcggatttgtttgcatggattaatgatagggaaagcattgaccagaaatcacttctggcgtatccgggctttaagttaaacaaggctgatcagaaaaggtatcgttggaattatgtcgaggataagtcttatcctgccaatgagacaagagcgggactgttgcttgccttggacaaggccgatgtctctagggaatttctgacttcagaaagggaatatgagttatggcatgtcctgtattctgtcgaagataagaatgaaataaggaaagcactttcatcttttgctaaaagatatggccttcaaggagattttgtcaatgtattcgcaaagatgaagccttatgaaaaagaatatggttcttattccgagaaggcgattaagagaatgctcccacttatgagggcgggccgatattggaaagaagacaatattgatgaagcgaccagatgccggatatcgaggctgttgtctggcgaatttgatgaaaatattcataatcgggtaagagagaaaactatagcattgcagtcaatgcatgattttcagggattgccagtatggttggtctgctatgttgtatatgatagacattccgaggctaaagacattgacaaatggtcgtgcccagaagacattgatgcctatcttgcgaaattcaggcagcattctttgcgtaacccgatagttgagagcgtcgtgatggagacgttgagaaccgtccgcgatatttggaaagcagaaggtcggattgacgagattcatattgaacttggaagagagatgaagaatcctgctgacaaaaggaagcgcattacggaacaggctcttgaaaacgagaatgccaatcttcgtgttcgtgcaatgctcaccgaattcatgaaccctgagttcaatgtggacaatgtccggccgaattctcctgggcaacaggaaatattacggatatatgaggattcagtacttggcgatgggcaagatattcctgatgatatcaagtccatattggataaattcaataaacaggaaccattgaaacgtccgacttcttccgaagtcctccgttacaaggtgtggctggaacagaaataccggtctccatatactggggagattattccgcttggaaagctgttcactccggcttacgaaatagaacatatcatccctcagtccttgtattttgacgattcgttcagcaataaagtcatttgcgagtccgaagtgaataagctgaaggataagagcttgggctatcagttcatcaaagaacatcagggcgagatagtgacattgagtggtgacagacaagtaaaaatcctatctgtcgaggcttatgaaaagttcgtaagggaccactattccgagaaaaagaacgtggcgaaaaaacgcaatctgttggcagaagatataccggagagtttcattcatagacagctgaatgacagccgttacataagcaaggtggtcaagacgctgttatccaatgtcgtacgtgaaaaggatgaggagcaggacatatcgaaaaatgtaataacgtgtaacgggcaaataactaccagacttaagaaggattgggggatcaatgatttgtggaaacagatcatgttgcctcgatttgaaagactggacgacatgagtcaagacgaatcttttgttgctgtcaatgccaatggacagaaggtgcctgtgattccgttctatcgacagaaagggtttgaaatgaaacgtatagaccatcgacatcatgcgatggacgctatcgtgatagcctgtgcgacaagaaatattgtcaattatctcaacaattcttctgcatgccgtgattctaaagagaaacgttatgatttgcaaagagttgtatgcgaaaaagttcatcctgattcttcaggaaactattcttgggttataaaaatgccttcggattattttgttggtgaagtccattctgcattgacaaggtgcatcgtgagtttcaaacagaatttgaggataatcaacaaatcatcgaactactacgagaagattgaaaaaggagagaaagttcgtgttcgtcaggagaaaggtgacaattgggctataaggaaatctatgcacaaagatactgtattcggagaggtgaatttgcgaaaaatcaagtcagtgtctttgaatgaggcattgaagaatcctggcagaatagtccgcaaggatataaaaaaactagtttgcccatgcagtgatataaaagcaatgaagatgcttcttactaaacacttcccggaattgacgaaacttgatatttattactatacgtctgaaaccaatgataagtattttgcgacgaggacgacaatctctcctgattttacgaaagagtttatacaaaagagtgttacggatacaggaattcagaacatcttgttgaagcatctggatcaatgcggaaataaacctgatgtagcattttcaccggacggcatcgacaagatgaatgcgaatatcatcgaactaaatggaggccgtcctcataaaccaatattcagcgttcgaaaatatgaaaaaggtgataagtttcctgtcggggagattggatgcaagacaaagaaatttgtagaagcagctaaagggacaaacttgttctttggagtatatatatcatcagagggaaaacgctcatatttttcggcaccgttgaacgaggttattgcccgagaaaaggcaggtttgagtcctgtaccggaaaagaatggagaagacaggcttctgttctggctgtcgcctaatgatttggtgtatgtgcctacagaagacgagctggaacggggttatgtggatggagagttggataggggtaggatttataagatggtgtcatcttcaggcagacaatgtttctttacccctgcttctgttgctgttagtattgttgataaaattgaattttcagctataaataagatggaacgtgcaattactggagaaatgattaaagaaatctgcatcccgattaaagtggaccgtcttggacgtattgtgaaattcaatggcaagttaagatgattaaacgcactttgtatttcgggaatccggcgtatctgtcgttgaaactcaggcaactggtcatcagaaaacctgaggtcaagggcgatatgcctgagtttgaagaaaacggagttccgaagagtattgtcaagaccattcctatagaagacattggcctgatcgtcctcgactgcccgcaaatcactgtcacacaaggacttttagaagcattgctggaaaacaattgtgctgtggtcacctgcgacaaatcacatcttccgaccgggctgctgctgtcgctatacggaaacaaactgcaggcggaaagatacgccagtcaggtcgaagcgtcattgcctctcaaaaaacagctttggcagcagactgtccagtgcaagatccggaaccaggcggcaatgctcaaatatgctaccggcgaggatgccaagaatatgattttgtgggtcaatgctgtgagaagtggtgatcctgacaatatcgaaggtcgcgcggctgcgtactattggaaaactctcttcacggacaatcctcacttcaccagaggagacgatgatgtggtaaacgtgatgctgaactatggatatgctattgtaagggccatcgtagcaagggcattggccggggccggacttattccgacgttgggaattcaccatcacaacaggtatgacgcgtactgtctggcggatgatattatggagccgtaccgcccttatgtggacagattggttttggatattgtcaatgagagcgttcctgaaacatttgacttgaacaccaaacgaaaattgctggaactccctgtaactgaagtagttatagatggaattagaaaacctcttatgttggctgtaagtcagacggttaattccctgcagaaatgttttgccgggagcatacggagattgtcttatccggacatgtaatggacagattcagtgaatatagaatcatgtgggtgctggtctttttcgatcttccgactgacaccaaaaaggagcggaagaatgcggctctattcagaaagcgtctgatagaggatggattcgtcatgttccagttttcaatctatatgaggcattgtccgtcttctgaaaatgctcaggtccatatcaatcgtgtaaagtcttttttgccggacttgggacaggtaggaatcctatgcattacggacaagcagttcggaaatatggaactgttctcggagcacaagcctaaggaaagcgaagacatctatatccagctggaattgttctgattcaggagatgactttccagcggacacgccagattccgttgttgaagtcatggctgattatcttgaactcaccgacctctgaggtattcgatacatgagcacctatgcacgcacaatcgtcgtagtctccaatgctgactatgcgtaaagtatcagatgcgtcatccggcaacttgctcagatccacaatcgcggcggcatcttctttcgaaacgaaatgtatcgtcacgggcaatgcagcagtgataatttcattgaccttcgcctctattgctgtcacttgttcttctgtgggacaggcagtgaggatgtagtcgcatttgcttttcttccgctcgacatgggcattgcgtgaacgtgggcagccgaacatgttgaccatcgtgcggttaaggatatgctcagcagtgtgcgccggctcgtattctgccttgttatgggcattcaatatcggttcttccataaattcaatgattttttctccgtttcatttccgatttctgcgaagatagcaatttttctttgcctgacttctcgaggatacaggttgttttgttcgtcgaggcgacaaagtgcgaaaaaccataactgcgattcgcttctactctcaggacaatatgacggaatcagatactgacagaattaaaaaaaacaatcaggcacaaaaaatccggacagaaatctgccggatttttttaatcgccaaatggcgtttaatccattacacctcaatcacttacagcaagtacgttgttgctggtgtaaagttaaaaattctgaaagcaaatcacaacttaactcctatgattttgaggactttattagttgttgctggtgtaaagttaaaaattctgaaagcaaatcacaaccgctgtgaacttgttcacgttttacaagttgttgttgctggtgtaaagttaaaaattctgaaagcaaatcacaactggtaaatcattcctaaaagacacttagttagttgttgctggtgta

SEQ ID NO: 1331 - DNA, 16676 bp, synthetic construct
  source 1..16676: mol_type = other DNA
  misc_feature 1..16676: note = Synthetic
tcgggcatggcatccgacaaggacctggaggaggcgcacgaacgcctgctcacggcaaaggcagagcagcggcggctgcgcgacgtggcacgcatcaacggctacggcggcaaatcctcagccacactccttgccccgatctcgggccacgtgatagccaagcgcatatacaacgactcatacgtgggcgacgacaacaacgacgaggcggcattcgagattgccgacctgcgccgtgtgtgggtcatagccgacgtatacgagagcgacatagccaagatacggcagggagccgaggtcagtgtcgccacgattgcctatcccgatgccgtgttccggggcagaatcgacaaggtgtacagcgtgctcgacagccagagcaagacgatgaaggtgcgtgtggaactcgacaatcccggcggaaagctgaagcccggaatgtttgccagcgtgggcgtgagccttacggcaaacggcaggcgcatggcggcagtgccgtcgcaggcagttatattcgaggacggcaaggactacgtggtggtgctctccagagggaaataccaccgtcgccaggtgagcgtggcgcgcgcctccggcggctacagcttcatcgcctccggtgtggagccgggcgaagaggtagtggtaaagaacgcattgttatacttcaacgcatcagccaatgaataagttcatagatttcatcatagcattctcgctcaagcgccggcacctcatcctctttctcactctcctcaccgtggtgataggcatcgtgagcttccgcagcacaccggtggatgccttccccgacgtgaccaacaccaaggtgacaatcatcacgcaatggcagggccgctcggcagaggagatagagaaattcgtcactatccccattgagatagcgatgaactcagtgcagaagaagaccgacataaggagcacgacactcttcggcctgtcggtagtgaccgtagtgttcgacgaccacgtggacgacgagttcgcccgacagcaggtgtacaacatgataaacgatgccgacctgccggacggtgccgtgcccgaggtgcagccgctgagcggacccacgggcgagatattccgctacacgctgtcgagccggcagcgcagcgtgagagagctgaagacgctgcaggactggctcatcgagcgcaagctgcgcagtgtgccgggcgttgccgacatcgtgagcttcggcggcgaggtgaagaccttcgaggtgagtgtcaaccccaatcagcttgccacctacggcataagcagtctggagctctaccaggcgattgccaactcgaacgtgaacgtgggaggcgacgtgatagagcgcaactcgcaggcgtatgtggtgagaggcatcggactgataaacgacatacaggagattggcaacatagtggtgaagaacgtgagcggcacaccgattctcgtgcgcaatctcgccaaggtgcaggagtcgtgccagccacgcctgggacaggtggggcgcggcgacgagagcgacgtggtcgagggcatagtggtgatgcgcaagggcgagaaccccgagaaagtgattgccgcgctgaaggataagatagccgagatacaggatggcgacctgccggaagacgtgcgtatcaatgccttctacgaccgcgaagacctcgtggagctgagcgtgaacacggtgttccacaatgtgcttgaaggcatactgctcgtcacgctggtggtgttcctcttcatgcgcgactggcgcagcacggtgatagtggctgccgtcataccgcttgccctgctctttgccttcatctgccttcatctgaacggtatgggagccaacctgctgtcgatgggggcaatcgacttcggcatcatcatcgacggagccgtggtgatggtggaggcaatcttcgtggcgctctcgtcgcaggcgcgcagcataggcatggaggcgttcaacaggcgcagcaaggctggaatgatacgcaccacggcacgcggcaaggcaaagtcggtgttcttctccaagctgataataatcacggcgctgctgcctatattctcgtttcagaaggtggaggggaagatgttctcgcccctggcgttcacactgggcttcgccctgctcggcgcactggtgttcacgctcacactcgtgcccgtgctctcggctatgatgctccgcaggaacatcagcgagaagaagaaccgcttcctggacttcgtctaccgccacttcgaccgcttcttccagctctgccaccgcaacagccgcaaggccatcgccgtggcggtggcagtgatggtggcaggcatatcggcattcgccctgctcggctcggaattcctgccacagatgaacgagggcagcatctacgcgcgtgccacactgccgcagagcgtgtcgctcgaagagagcgtgaagctcgccgaccgcttccgcacagtgctgcgctcatttcccgaggtgagccaggtgatgacacagacgggacgccccaacgacggtaccgacgccacaggcttctacaacatcgaactgttcgtgaagatgcaccccgaagaggaatggaagacggggcgcaccagggaacagctcgtggaagacatggaacggaggctgagcgtatacccgggcatcgacttcaatttctcgcagcccatatccgacaacgtggaggaagccgtgtcgggagtgaagggagccatcgtggcaaaggtgtacggcaaggacctggacgagacggaacgcatagccacacagatatacaaggtgatgaagcccgtgaggggaatagctgacctgggcgtgataaagaacaccgggcagccggagctgcagataaacatcgacgaggcgcggctggcgcgctacggcgtcagcaaggacgatgtgcagagcatcatcgagatggcaatcggcggcaaggcggcatcgcaggtgtacgaggaggagcgcaagttcgatctcgtggtgcgctacgacaagcccttccgcgacaatgccgaggcgataggcaagataaaggtgcccaccgacgacgggcagatgatacccatcagtgagcttgccacgataaagaccatcaccgggccgctcatcgtctaccgcgagaaccatgtgcgctactgtgccgtgaagttctcagtgcgcgaccgcgatatgggcagtgccgttgacgagtgccgcgccaaggtggcggctgccgtgaagctgccggagggatgccggatagagtggagcggcgacttcgagaaccagaagcgcgccaccaaccgtcttgcccaggtggtgccgataagcatactgctcatcttcggcatcctgtatgtactcttcggcaatgcgcgcgatgcggcgctcgtgctgagcaacgtgccgttcgcggcagtgggcggcatcgtcatactgctgctcacgggcttcaacttctccatctctgccggcataggcttcatctgcctgttcggcatctgcatacagaacggcgtgataatgatcatggacatcaagcatttcatacgccaccgccatccgctcggcgaggcagtggagatgggcatgcactcgcgcatacgctccgtgctcatgacggcgatgatggcaacgctcggactgctgcccgcagccctcagccagggcataggctcagagagccagcgcccgctggcaatcgtgattataggcggactgacgggggcaacggcattcacgctgttcatattcccgctcatcgttgaggctgtatacaggagagtgaacataaagaaaatatgatggcggagagtataatgcacgataggaggaagttttgcgccttccgttttgtgccggttggggtttttcgctaaatttgcagcatgaagaagatattgatggcagaggacgaggagaacatctccgacttcgtggggcgcgggctgagaggcttcaactacgaagtgaccgtggtggacaacggcaccgaggcgtggcggctcctgcaggagggcaaccgctacgacctcgtgatgctcgacataaggatgcccggaatgtcggggctggaggtgtgccgcaggatacgcgccgccttcggctaccgtctgcccgtgctcatgctcaccgcgctcgacacgaccgacgacgtggtgaccggactgcagagcggtgccgacgaatacatagcgaagcccttcaagtttatcgagctgctcgcacgcatacaggcactgctgcgccgctgcgaatatgcacgcgagagcgcggaggcagtgtgcggcagcctgaggctcgcccctgcccaccacaaggcatggcgcgacggcagggagtgggacctcagcataaaggaatgccggctgctgctgtatatgatggagcacgagggcgagatactctcgcgccgccagctgctgcgcgatgtgtgggagaaggatttcgacacgaacacgaatgtcgtcgacgtgtacgtgcgctacctgcggcagaaaatcgacgaaggctttgaacataaaatgatacagacggtcgtgggcaccggctactgcttgaagaaatgaaaacaggaaacaaaatatcattgctctattcggggataacgatcggactggtcgtcatcacggcactcatattctttttcggagcgtcgaactacacgcaggacatatacttcagctatctcgaagagaaggcgcatgccctggcagaagagaaattctcggaagacgaactcgaccccgtgaaataccgcaatgtggtgatacgccggcagaactccatacccacatcccgggaactcttcatcaaccttgccgacagtgccgcagcgcggaaacagctgcagcgctatctcgacagcgacgagatagaaaggctgtacgccaaccagacaataaacttcgaggagcggcaggaagtgggcacggcattcatctactacgacaacacgggcaccttcgccgtgattgtgctgagccgcaacccgttcatcgacgacatcaaccgcatgctgctcctggggctgctcgtgctcgtggtgctctctgccggagtgctctatctcatcagccgcctgtacgcactgcgcgtgttcaaccgcatcgacagcgactatcaggcagagaagatgttcgtgaacaacgcatcacacgagataaacaatccgctcaccgccatacagggcgaatgcgaggtggcgctgatggcagaccgcacaccacacgaataccgcgatatactggagcgcatatcgaaggagacgaaccgcatagtggacatcatgcgcgaactgctgcagttctcgcattcgcgcagcggcagcatcgacagggcggcgatgcagcgcgtgcgcctttcggaggtcgtgggggcggaatgcagggacggcgtgaggcttgaggtggctgacgacttctgcgtaatggcagacagggagctgctgcgcatagccgtacacaatctggtgagcaacgcagtgaagtattccgacggcagcaatcccgtcaccgtcactgtctgtcgcccacatctcacagtggaagaccgtggcatcggcatccccgaagccgacctgcgccatatcttccagcctttctaccgcgcctcaaacgtggggaccgtttcgggcaagggcgtgggacttgccctctccaagagcatactggagcgtatgggggcgagaatcagcgtggcttcggactggggggtgggcacggtattcaaggtgacgttcagtcagactgtgtaacagtcagaaaagaaaaccccgtttacgaagtgctaccggcacggtagcttttcataaacggggcttttctttttccagtatggcgtatttcttgttcttatatatataatacggtgggcactcccttgcggctatgccactccgaagatgtaggcaaggctgatgaggctgatgcttatccacagcagcacaccctggatgagcggacgtatgcccacgctgcgcagagtgtcgcgggtaagcgaagcaccgatgaagaagagcgagagggtgatgagatgcttggcaagcttgttcacggctccgctgaactctccgccaatggcggcggcaccgtcgccgaggagcgaggcgttgctcagcacgtaggtgttgaagatgattgccacgatgaaccagacgatgaaccgcggcacactgctgtaccagggcttcttcgtgccgctgtcggcagcgatggtggagcggaagaagaagggagtgacaagggcgagaaccactatccacagggcgcgcgtaagcttgattgtggttgccacctcaagggcgctcacgccctggcttgccacaagctcggggtgcatctggtcgtaggcggcaccggctcccaccaccgacgaggtgtcgtggatggctattgccgcccacatgccgaactgcttcatcgtcatgcccagggcgtcgccgatgtaggggaagacgaagagggctatgccgttaagtacgaacaccacgcccagcgcaaccgacatactctctgccttggctctgattatggggcccacggcggctattgccgaaccgccgcatatagctgtgccggagctgagcagatagctcgtctgcgagtccaccttgagcagcttcctgccgaaaagccatccgagggcgagggtgccgaacacgcttaccaccgtgaacagcattccttcgctgcccgaggcgagagccttgtcgacgttcatgccgaatcccagacctatgacggagtattgcagcagcttcttcgacatggtcttgttgaacgtggggaatgccctgcccagcagcagggcgaaggcgaagccaagggcgagggcgacgggcgacgacacccagtgggctgcccaggcaaactgtgcgaggttgagcccgaacacttcttcggcaaagccgagcagcagcgacgcgcctatgacggcgactgccgcgatgtagcagatttcgtttcttttcatattctgtgtatttcctgtttgttcctaaacaatgtgcaaaggtaataattatcactgtaaagggataagaaaagaatgaattcatttcgttctcctctcaataaatattatctttgcaccgaatatttaaatagaaggatattatgaaaaggtattttgatttttttgtcgttgcaatagccaccgtgataggcatggggctgttcgcagcgtgcggcgttgacgacgacactcccaacacgggaccgagcacggaaataaccaagggaacattctatttctgctatggtgtgccagagagcgaactggatgtagcatacttcaagttcaagtttacgttcttagacgagaagggaaacgagaagtcggaagaaatcgtagccacgaaagaggctttcagcgcgagcaatccagacccgacgctgcagtcggagaccgacctgaggttctacaagcaggcggtaagaatcagcagcctgccgtcgtcggtgaggtgtgaaccccagatagtgataaagggcagcgaggaactggacaaggataagtatgacgtggggcagacgattttcgtgtatttccagcccgacggttcgcagtatgcgcagacttgctccacaggcagcatgaaacgctataagggagtgccgaaagacaagttgcaggagattctcggaagtttccagaaatcggcgaagaagactttcctgatacagaagaccggtgccgtgagtctgtacgaatgattccgtggtacgcggacaagtgctgaccgcaatacgggacgggctgccgaagccccactgtggcggaatgatagaagaatgctgccggctgtaatggtgtcagccggcagcgttttttttttgcagtatgcagcaggcttctttacttctcctccctgtagtagtgggcatagttgtagaaaggttcggttatgatttcctctgccgtttccgtgtacgtgttgccgtatgggtcgtgtgctatgatgcgtatgtcggagttggcggtcttcggctcgtagtagtacaggtggttcatcagcaggtagctgttctgcttgctcacgaaatggaagctcgtggccacggcatagcggtggtggtagccggtggcgaaggcgtcctgccccttcgacgagatgcggtgcatggggtgttccttgccgtcttccacggcatacactcgccagcgcgaatcggcgttgaacacgtttgccactattatgcccttgtccttcggcagattccagtcggcggcatacgattcgccgttgaagtcggtgtcggcgcggaacagtgtcatctggcggtgcttgttccagaaggtgcctttgtagtagcagtcggcggtatgcgtgccgttgaactcatacacgtagtatccgttcggtgtgccgcagatgttgatgttcgactgccagatgttgccgcatgccgctgcgtggcagtgctccgtcagatggtggccgtcgtattcaatctcgtggttgatggcgaagtgtgtatgtccgcagaacagttcgtagccgcccctgaactccgtcagcagctgcagcagttcggtgaggcgcgacgacgagtagtggccgtgttccgatgcgtcggcaagcggctgtgccttgtggaaggggttgttgccgaaggtgaacggtatgtggtagcagagcaccaccttcttgctcttgtccgtcagactcaggtcttgcctcagccattccatctgcttgtcggtcagttcgcccggcgaatagtatgccctgtagcggctgaagaactgcacgttgttgaagcacacgtagtgttcctttccccggtcgaacgaatagtcggtgggtccccagttctcttcccatttgcgtcggtattcatccttgccgtcctggtcgtggttgccaatcaccgagaataggcgcatctccgacgacccgagcacttcgcgtatctgccgttccagcatggggttgtagccgccgtaatactgcacgtcgtcgcccatgctcagtccgtacacgggtgtacccttgggcagggcgcgtatggtgcgccttatgtcgaccatagtctcggtggcaaagcgttccacgtcgctcacctccacgggattgtcgtcgggtgtgttgtagaatgggttgaaggcgttcgtcacctgcgggtcgcctatgacaatcatcctgtagttgtgctccgctccctccggcagccgtttcagcgtgaagtcgtattgctgtttgcctttcactatgggctggtagaagtgtgccgtatggtcgtcggcagagtgcaccggcacctcgcagtcggcaggcacggtatagaacacgaagcgtgccgtgttgtcttccttcagccggtacatcccggcagaatccgtcagcacgcattcgatgccgttgctcaccatcactccctgtatcggcattccctcgctgtcgcgcagcgttccgctcaggaagggggcgtgcggtttgggtgcagtctttggtgcagtcttcttcttcggcgttgccgacggctttttgggggcgatgcgtggcctgtatgctatgcgccgcctggtctgctgtagctgttgcgcctgttcgccgtggctttcgcttatggcgtaggctatagcagcaatgcagcacactgccattattatccacataaagatattattctttttcatcccacttttatatattatatgtatagatacattttctatcgcagaaaccttcagcccttgatttgcagacgtatacggactgcacttaatttgcaaaattatataaaaatggcaagagcgcaaaacaaatcatttcctttatgtcgttttttttcctttccgatggacagtttctcttgttgagagaacgccagcggtaagttttatcgtttgggagttgatgaaggctgcaatgtgtagaaacaaaaaatccaccgttgaaggacgatggacaaacctgatgttttcacaacggaataatccttattgtgatttgcttgaaattatgctgcaaatatacatgattgcaaccaattggcaaagtttttcttgcgttttttgtgtgttcctgaaataaaacgtaaatttgtgcagcgtttatatacattaggcataacccaaaaactctttattatgaagaatatcataggcttggatcttggtacgaacagtataggttggtctgtcgttcaggaaagacaaatagaaaacgataatatccagaaatcgatatcagactccggcagcaggattatcccgatggatgctgcacagcttggcgactttgccaagggaaacaccgtgtcgcagaccaaggaccgtacaggcttccgcggcatccgacgattgcgcgaacgctgtcttctcagacgcgaacggctgttccgtgtcttcgaagtaatgaagttcctgccgccacactttgcaagttcattgacaagatacggaaaattcaaggatgccggcgaggaacccaagttggcatgggacatggacagcagcggcaaagcccggttcctgtttatggagtcgttcaacgagatggttgcggaattcaggacaacacatccggaacttgttgccaacggactgaaggtgccatacgactggactatatattatctgaggaagaaagccctcttcagggccgtgactcccttcgaactggcatggataatactgaacttcaaccagaagcgtggctactaccagcttcgcggagaggaagagcaagccgacaaaggcaaacgtgaggaatacctcgcccaaagggtggtggacataatcgacacgggagagaagaaaggaaagagcacttggtttgacgtggtgctcgagaacggtatggtataccatcgtgctgccgacataaagccagactggattggcaaggtgaaggaattcatcgtcactacaccgctcgacaaggacggaaatccgaagaaagacaaggaggggaacataaagcgttcattccgaatgccgggcaatgacgactggaaccttcaaaagaaaaaggcagagaaagacattgacaactccggcatgactgtcggcgaatacatatatgatgcactgctgcataacccgaagcagaagataaaggggaagctcgtaagggtagtggagcgcaaatactataaggaggagctgatgagaatcattgagacacagaagaaattcataccacagcttacggattcttctctctacagagagtgcatagaggaattataccagagcaacgaggcataccggcagtctgtagccgtgaggaacgacttcgcgtatctctttgtagacaacatcatattctatcagcgccctctgaaaagcaagaagtcgctgatagacaactgcccctatgaaacccacaaatacataaaggacggagaagaaaaggcggcagctgtaaagtgcatagcaaagtcgcatccgctattccaggaattccggctatggcagttcatatccaatctgcgcatctatcaaagacagatgcaggtgggcgacagagtgaggcttgacgtggatgtgaccgaccagtatctgccgacagaggacagccgtacagccctcttcgactatctcaacgacaagacggaaataaagcaggacacactgctgaaagatttcttcagcatgaagaaacctaagggcaaggacagcctctatccttgcagatggaactacgtggaagaaaaggcgtacccttgcaatgaggcacgcggcaaaatgcttgcaagactgaagagagcgggcattgccgctgatttcctgtcggacaaggttgcggaagaacacctctggcacatactctattccgttgaagacaaggaagaactgcgcaaggctttgacaaaatttgccgaagggaattctcttggaagcgaattcgttgacgcctttgccgacatggagccatacaagaaggaatacggtgcatactcggcaaaggcattgaagaaactgctgccattgatgcgtatgggaaaatactgggactatgaaaacatagacaaagccacaaggaaacgcatagaaaacatcatcaatggagaatacgacgagaacatacgctgcagagtgagagaaaaggcaataagcctcacttcggcttcgcagttcagaggacttccgctttggatggcgtgctacattgtgtacgaccgccacagcgaagcctccgatacaagcagatggaccacaccagaagacatcgacagatatcttggcgagttcaagcagcactccctccgcaatcctgtcgtggagcaggtagtgacggagacactacgtactgtaagggacatctggaagaaatacggcaagatagacgagatacacgtggagcttgggcgcgagatgaagaatcctgccagcaagcgcagcgagatgaaccgccgtatgctcgacaacgagaatgcaaacatgcgggcaaggattctgcttgcggagcttatgaatccggagttcggcatagataacgtgcgtccatactcgccaagccagcaagaactgttgcgcatctatgaagacggagcaataagcaatggcgcaagcaacgtggacgacgagataacagccattatgggcaaactgtcgcagacggacgtgaagaagatgcctacgcagaatgaagtaaggcgctacgtcctgtggcttgagcagaactaccgttcgccgtacaccggggagatgattccgcttgcaaaactcttcacgtcggcatacgagatagagcacgtcataccgcagtcgcgatacttcgacgactcgttctcgaacaaggtgatatgcgaggctgaggtgaacaagctgaaagaccgcatgctgggatatgaattcatcaagcagtacagcggagagatggtgcagctgagcatgggccggacggtcaggattctctcccccgaggaatacgtgcgccatgttgagtcgcaatacaaaggcaacaaggcgaagatgcgcaagttgctcatggacgacattcccgatgaattcatcaacagacagctgaacgacagccgctatataagcaagctggtcatctccctgctgtcaaacatcgtgcgtgaggagggcgaagaggaagccacatcgaagcacgtcatctgctgcagcggtagcatcaccgaccggctgaagaaggactggggcataaacgacgtgtggaaccgcatcatcctgccacgtttcatccgtctgaacgaacttacgggaacaagccgttttaccactctgaacacagagggacaccacgtgccggcaatgcctcttgaactgcagaagggattcagcaagaagcgcatcgaccaccgccatcatgcaatggatgccatcgtgatagcgtgtactacacgcgaccacgtgaacctgctgaacaacgaggcggcaatgtcgaagaacaacagcaacaggattgccctctccagaaagctccgccgctacgaaaccattgaagtggaaaaagacggagtgcggaagcagattgccgtggcaaaagagttcatgaagccttgggacagcttcacggctgatgtggaacaggctttgagaaacatcgttgtgagcttcaagcagaatctgcgcgttataaacaagactaccaactattaccagcatttcagagacggcaagaaggtggttgaaccccagaccaagggcgactcatgggctgttagaaagccgatgcacaaggaaaccgtattcggagaggttaatctcagacgcatcaaggaggtgccgcttaaagaggcattgaagcgtacaggggatattgtcgaccgggaactgagggcaaagctcgcggaactgcttgacctgaaatacactgaaaagcagatgaagaagtatttcgaggagaacagcgacgtgtggagcgatgttaatctgaagaagataaagatacacttctttacgaaagagaccaacgagcggttcttcgctacaagaaagccgatagacacctcgtttacgaaagacaaaatcaaaaaccagattgctgatactgccatacagaaaatcatgcttcgccatctcgaacagaaaggcggcaatgcagaagaggcattctcgcccgatggcatagaagagatgaacagaaacatcgttgaactcaacgatggcaaagggcatcagcctgtatataaggtgcgcgtgtatgaaaaggcagacaaatacgcggtcggacagtcaggaagcaagagaaggaaatttgttgaggctgctaaaggcacgaacctgttttttgcaatatatgaagaagaacatattgacgaggcaaccggtgaaccgtcagtcgtaagaagctatgacacaatcccgctgaatattgttgtggacagacaaaagagaggattgccgtcagcacccgagaacgaacacagaattgccccgaagtatgtactttcgcctaacgacttggtttatatacctacggaagaggaaagaaaaatggggcagatcaatatgcctctggataaggagaggatatataaaatggtatctgcaaataagaagcaggcttttttcttgtcttcagatgttgcaacatgtattgttgacaaatacgagttctctccattaaataaacaagagcgggcaatatccggcgaaatgataaaagaaatatgtatcccaatatctgtcaaccgtattggtgagataacattacaacaataaagaccaaccacaccgaatgaaaaccatgcggaagtcgttcggtgtggtttttattaacagcaaaatactaagcctatgatcaagaaaactctttatttcgggaatcccgcgtatctttctttgcgcatgggacaaatggtgataaaactgcccgaagtggaacgcaatcctgacttgccggaaagaatgaaacaggagtcggaagtgacaaaacctgttgaagacattggtattgtgatacttgacaacaagcgcataaccattacacagggacttctcgaagcgctgttggagaacaactgcgccgttataacatgcgacagccacagcatgcccgtggggctgatgcttccactctacgggaattccacccaaaacgagaggttcagagagcagttggattcctctcttccgttgcgcaagcagctttggcaacaaactatcagggcgaagatagaaaaccaggctaccgtcttgtctctgtgcagcggctgtcagacaaaggttatgcagcgttgggcggcagacgtgagaagcggcgaccccgagaacattgagggtagggctgctgcatattattggaagaatatattttcaaagatagaatctctcgccgccttcacaagagaccgcaacggaatgcctccaaacaatttgctcaactacgggtatgccatactcagagccatcgtggcaagaggactggtctcaagcggcatgttgcctactctcggtatccaccatcacaaccggtataatgcctactgtcttgccgacgacattatggagccgtaccgtccgtatgttgacgaacttgtgtattccataatacaggagtttggtactgggaatctggaacttaccaaagagataaaattccgtctgcttggaatacctaccatagacgtaatagtcaatggaaagaggagtccgttgatggtggctgtaacccagaccacggcatcgttatacaaatgcttctccggcgaaataagaaagattgcttatccggagagagacagcaactgatgtttaaccaatctgcatggattatggacagatttagcgaatatagaattatgtggattcttgtgttttttgacctgcccactgaaacgaaaaaggacaagaaagagtatgcgcttttccggaagcggttgcaccgtgacggtttcaccatgtttcagttttcaatttatgtccgccattgtgcaagtatggaaaatgcagacgtacacatcaagcgtgtgaaatcgtttcttccagaatacggcaaagttggaattttgtgcatcaccgacaaacagtttggcaatatagacctcttctacggaaagaaacctcttgcccccaatgcaccaggacagcagcttgaattattttaacttgcgataacattaaatgtgccgtttctgtgctcagaaaagacaataaaagtgcttttatgcaaagtcttgatatataaaacagaaaagaagaattccttcatcaagtcagaattcttctttctgtacaactacttttttattttctataatcattcgtattgaactgatatacagatatttgctaaaagtatgttgttgattgtaccgcgaaggtacaaaatttcaagcaaatcacaacgccatctgcaagaagtacggctatgccatagttgttgattgtaccgcgaaggtacaaaatttcaagcaaatcacaacgaatatgcgtccgctgcattacctactgtggttgttgattgtaccgcgaaggtacaaaatttcaagcaaatcacaacttggtcggcagctttcacgaagcccaagacgttgttgattgtaccgcgaaggtacaaaatttcaagcaaatcacaaccgtaccggcgaagcactgtcagcatctgctgttgttgattgtaccgcgaaggtacaaaatttcaagcaaatcacaacgtacttcagtatctcctccaacacctcatcgttgttgattgtaccgcgaaggtacaaaatttcaagcaaatcacaaccaattccagtaaatagacctccccattttcgttgttgat

SEQ ID NO: 1332 - DNA, 16657 bp, synthetic construct
  misc_feature 1..16657: note = Synthetic
  source 1..16657: mol_type = other DNA
caaggagtattattcattttcacagtcaaccaagcacaaggtgaaatctgccgtttcatatatttcggattttgaaaaagaattgtcctctttggcggccaaccggcattacgatggtattatatgcggacatatacatcaatatgcggatgggcattatggcgatgtgcattacctgaattcaggggattgggtggagtcgttaagtgcattgatggaatatccggacggacattgggaaatatatcaatatatgcaagcacaacaggatgagaagttgcaattaaagtcggtagctaaagcttcgtaaaccagtcatctattatttttttcgcccggtctttttttgaaagccgggcgaattttttattgttttttgaataatctgagtagttctccaatccataataccatggaggtggagccgataatagcggcccattcttttaaagagagaggttcggtccggaaaacatctccgccaaattgaacaatcaagtattgtccgatagggataatcagcatgacaattaagaatccggtgcaatctttcagtcccttgaaggcagagccatgagctaagaaagctttggcattaaacatattccagaattgcagcatcacaaaagtagtgaagaatattgacaattcgtgtcgggtgatgacacctccggtatgtgtataccagaacatcatgccaagcagcagagccgtgaagctgattccgatgccgagaatataacgcttcatggttggagtgatgataaactcgttggattttctaggggcttcgtccattactttttcattgggtgggagggaagccaatgctccggctgcaaaggtgtcgataatcatattaacccaaagcatctgtgtcacagtcaacggaagttcatgtcccaacattgaaccaatcaagacaatcaacaaggcggataaattgatggttaattggaatagaatgaaacgttggatattgtgatagagcgaacgtccccacatcacggctgtcgcaatgctgttaaatgaatcgtccaataaggtgatatcactggcttccttggcgacagaagttccggtacccatagataatcctacgtctgcatgattcaaggcgggagcatcattggtcccgtcgccggtaacagcaacgacagcaccggatttttttaacagttcaaccaaacgctgtttgtctgtaggccttgcgcggcacatgattttcagtttcaaaacccgtttggcagcctcttcatcggataaattttcaaaatccactccggtgataatctgctcatcggtatcaccctcttgccagatgcctatttggcgtccgatttctcgggctgtggcaggagtgtcacctgtgacaattttaacgctgactcctgctttcagacatttggcgacagctgccggtacatcgggacgcacagggtcggaaatggcagcaattcccaagaataccaaaccgtcagaagcaatggtttctattttgtcaaatgattccgattccaggattttataggcgaatcccaaggtccgcatagcttgattctgataatccaaaagttgcctgtcaacggtctgcttataggaagttgctgatttgtaaccttctgttgttcttacttggcagcatttgctgaaaacaatttccggagctcctttgacatataatatagctttattgtccagtgatgagcgtacaattgtcgccatgtattttcgttcggtagaaaaagtcagctgttctatcacttccgtcttttcacggtagtccatataattaactccctggctgtgcaaccataacaagagggcggcttctgtcggatttcctaaagagcggactttgtcttcctggctgtaatcaaggtaggctgttgagttggtagagatgccttcccgtatcaaagtactgatttcattgtcacgcagcgtctgttccggcagatcataaaaattcgtttggtggacctgcatttgattttgagttagcgtaccggttttatctgtgcagataacagtggttgcacccatggtttcgcatgcatgcattttgcgtaccagattgtttgttttcagcattttgcgcatgctcaaagccaagcttaaagttacgctcatcggcaaaccttcgggtacagatacgacaatcagggtaactgctaccatgaagtattgcaagatgcgaccggcagtatccagtgtaagtatgttgtctgctgtgaaaactccagccatgatgtctttggctaacaaacctacgaatacaacgcctgctattacgaagccgataatgctgatgaatttggcaagaccgtccaactgtttgctgagaggggttttgtcgtgtgtgatttcagtcgatttttcagcaactttcccaaattccgtggcatccccaactttgtcaatccggtagatacagtgaccattgacaactgttgttccgcgcagaatacggttggaagggtaggttgcttcagtatcgaattcctccggacgagtggttttatctattacaggttcacctgttagggttgattcattcacttgtaaggaaatagcttccaataactcgccgtcggcaggtacttcttcgcccgtttccaatacaacaatatcaccgactaccagatcttttttagcgacttcatggatatttccgtcacggaccactttgattagaatgtcatcattcacctgattaagaagttcaaactttttgttggcatccatttcaaaccagaaaccgactccggttgccaaaaaaatggctgcaaaaataccgatggtttctgcatattcattatggataatggctataaccagcgatagggctgcagcgacaagcaaaatttgaatgatggggtctttaaatttttcgaggaagagcttccaaagaggagtacgtggaggaggtgtcaatatgttttcaccatgtcttttcctgctttcctttacttcagtttcacttaaaccagaataatgttttgtttccatttgttttatttcgtcacattttaaagtccccaaaattaacattttcttctttttgctccaacagtaaattcttgaattaagcctgctgttttattaaaaaatcgaatgaaactgtatgcaaataaataacgggtgcaattatttgcacccgttactgttattctttgaaataaaattgattagtatactttcggagttgtttcaccacgcaataccatcaatccgttcatagctaaagctcgcatttcgtcttcgcccggatataccttcacaggagcgatgaactcaaccatttcgcggatataattggtgataggttttccgtaagcgataccgccagtcaacaggatagcgtccactttacctttcatgacagcagccattgctccgatttctttggcaatctggtagcacatggcgttctgtaccattgcatatttagaattcgggtcggcgatggctttattttccacttcaagcatatcgtttgtacccaaataagctaccacaccaccttcgcctttcagcattttctttacttctgctttagatttgccgctatagcaaagttctaccaatgcgcctgttggcagaccacctgaacgttccggagaaaaaggaccgtcaccatccaaagcgttgttcacgtcgataacacgtccgtgacagtgtgcaccaacagaaacaccaccacccatgtgagcaacaatcagattcagctcttcgtagcttttccctacttcttttgcataggtgcgggcaatgattttctggttcagagcgtggaaaatagatgcacgtttcaatgccggatgaccggaaatacgagcaatcggttccaattcatcaacaactaccggatcggtaatgtatgctttagcaccgttgttgatttcacgggcaatatcctgagcaatcaaaccgcccaaattagatgcatgttcgcccattacagggtgctccaagtcgcgcaccagtgcttcgttcacttcgtagataccggattcaatcggtttcactaaaccgcctctgccaacgattgcggacaaggagtgaatgtcgattccttcagctttcaaaacagatacgataatgtctttacggaactggaactgggaagctaccgtctgaaacggacttaattcttctgcagagtggcgcagtgttttgctgaaaacttctttttcatcctcaaatacagcgattttggtagaagttgaaccaggattaattgttaaaattttaaatgtcataatttatgtgttttgattgtattcaatttagactacaaaagttgcaaattgaaatcaaaactcaaagaaaaagagcaaatttatattgattttgcaatattcttttttaattctttagctgcatgtcgcaaatagactttcggatgtgcaatggattcctgtagatccggcgcataattggccaatgtgcagacttctgtaaaatcggggagaggttgttctgccaatccggatatagcatatacaggcttggaatacttgtggcaaagagcagcaatttgtcccggcagctttccgcacaggctttggttgtctagttttccttcgccggtgataacgcaaaaggctccgggaagcaaatggtgaaaattagaaatcagtaatgaatagtccgccccagatttcagagaagcatgcagtacagttcggaaagcggcagcaacaccaccggctgcgcctgtaccatcgatgcgttgtgggtctataccggttttgttttttaataattcggcgtattgtaccatcttattttctagcaattccacttgttgagcgttcgcacctttctggggagcaaagacgtgagctgccccttcaggaccgcacaatacgttttttacgtcgcacaaaatcagcagttccgtatcagccaaacgttcttttaataattcagcgttaaagtcctccaattcgatgagaggattgcggtattgatggcttgtttttgtaatttccgctcccatggcttcaagagctccgagtccaccgtccacactggcacttccgcctagtcccaaaataatcgatttgtaaccttcctctaccagatgaagcaacactttgcctaaaccgcgtgtattagcatttaaaatatcgtattcttcgggttttaaaaatttcagaccgcatacatctgccaagtcgaatatagccgtatcacctttgctataatatgtaatcttgtgaggtctgtttaaagcatcctcggctacgaaagtgtggggggcagcctttaaataaaatgaaatgactgaagctgtcccgtcccctccgtcaaacatgggaagttgtatcgtatagaaaggggatgtttgaaaggtttttgtcaaaatttggcaaaaatccatggcagatagtgatcccttaaaggcattgggagccaaaataatgtaccgtatactatcggacgttgacaagtagtttttcattatccatgctttgcatttcaaacaaatcgcgttccggccattctttgacagtagccattgcctgaccgacagcacgattaatataattggggaagcgtgagcctttccaactgcttgtattagtcagaaatacccaggaatagccgtctttttggcgtttcatcaaagcgctggttccggctaatgtgcctgtacgcatccagtcgcctcttttgtttgtttcaatccatccgatcggcaatccgtggtcaacgttactggtcatatattcaatggactccgatgtcagaatgtcagggatggatgaatcattgtcgatggttgccaaaaagcgaagcagttctgaaggcgaagctacccaaccaccagcaccatagagttcttctatattatttcctccgttgcttcgataagccatttctccacttccgtcacaagccggaatttgttcggcattgggtacttcataatatttcacttcattgggcagtttttcttcatagagatttttgcctaaatgcatatcaaaacatcctgccggtaataaaatatgtttgcggatgtatgtttcatagtccattccggacgctttttcaataactcttgataaaattccgtatccgatgtttgaataagcgctggatgtacccggagtgtattgcagacgtctggaaagtacgtagcggatcatagtattcaaatcggcagggggctgtacattcattttttttgcaatcagcagtggattgaacatcggatctccataggctaatgtatagccaccttggtggcgtaaaagatgttctatggtgattttgcagctgcgtttatctttgatatcagagaaaacagaatcattgaggattccttggggcccgaatacacaatcagacaactttaatttgccttcctcctgtagcttcatgattccaactgcagtgataagctttgagatagaagcaatgcgaaaaacatgcatgacatccatcggaatgcccttttcaaggtcagcatatccatatcctttgctgtatatcagccggtcgtctttcatcaaagcaaaagaaacgcctttcaattcccatttctggataaatctttcaatcagccgatcaaatttccgggtcatttccaactccgaatcctcattattgatcacttggtttgcaggcagcaataacagagaatcagccaaccttctttgcaccatcaaggcactggaatccttggcaatattggagcccatcgacgttcccagccattgccaaggtttgctccatagaagtataattataatacaaacaaccgctatatatttcattttgcactctatcttttggaatcatgcaaaagtataaataatatgactttatatggtttttcttaagcagaaatctttctaaaaaatcattaaatcatttacttaaccttccaatagtgcgaaataagatttcataagccgatgtaagaaatcattgtttgtattataacggatattgtcaatacgattgattggaagtattaaaggagatgttccggtgataaatgctatgtcgtattcattcaatttattacaatcaatcctttcttctatcacttggatatgattagccttacacagatcaaagacgcgtttccggctggtgcccggcaacacatattgcagggggctggtgtaaagcgtttcacccttgataaaaaacacattggaacgcgacccttctgtaatgaacccatctttatcgaccaacagcacttcgtaaacgtgattttcctgaatcagctggttggtctgagtgcgtaagtctgcattgatatattttacttctggattttctcgcatagcctggagagtcatggttggaactccatcccggtattgtatttcagtcggataggagtggggaattctgaaaatatattcgtccggatgttgcgaagtgaagtgtaatacgtattttatattcccttctgtcattttttccagcaagataaagtgtcgcaatttttcgggaatattcaagttttcgatatcgatatcaatatttgatttagtaagtgaatttgctaatcttacaagattatctctcaaaaagatagggtgtccttcaaacactcttatcacttcgtaaatgctcaatccgctttcaatgatttttgtagaaaacgcattgttttcgtttggctggttatttataagtaccatgattttttagtttttcgcaaaaatataaaaaaactccataggttatcccgttccattcaaaaggaaaattgcacatcatcttatcgtaattcgtctccaagatagtcccttaagtcatcataatcaatgtccatttgttccaatacctgttccggcgatactttaattgtttttccttttgatttaattttgatggtgttgtcaaaattaatttttgggtaggcgggcaattgattgtccgtgttcttatctctgaggggaacattatcttcctgggtgattttaggccacggttcgggagttgtcggttttttagtttgatcaagaaagtatccgaacagaactaaaacgattattagcagaacaatatagattgggagtttaataaaaagggatgtacctggagtgttcctccaataactgaactcttcttgctcaatagagatatcctcctgtgccttcaggttgttattctgagcaatgttcatctgagatacaatcttttttaacgcgtcatcatctaatatctgagaatctttagaggaaactttctttgtcgttttagctcttttattgttttgggacaatggggacgatttttgtttcttcatatcgttgaacggcacaaacttctcacccgtcgttagccaactgatctggctgggtactatattttttactccagcggttgtattgacgattttaaggtgggcagatttcggattaacgacatttttcatgggcatgatccacattccagaacattcaaaagcatgatttaaagtgacaacaaccagataatcggcactcttatccgaaagattattcagccttcttgtttcagaggtacgtcttccgctttcatacacgcgtcttgtcttgatctcaaaagtcaagcctttttgattgactgcatcaaatcccttttcgttcttattatcgcatagttgcaacttcaaatgtttgcaggcataatattcaccgatatcaccgacaaccttacagcttctgataatgcctgcgttttgcaaatccaagtagctttgggcaaaatttccaatagcatgttgttccttttgagataattttaattttgtaatatcttgagagaaaggattgatttgagcggagctgacaagatattgttccgaattgattttatcggatgggatttttaagatagccagcgtattataatgcgagtcaaaaaatacaaccacaagaaaatcaaaatcctgatacttaagatttgatagacggtagttaaaatggttgtcggtcgtgacttttgatttaatctgatatttatagcctttgctgcatacagcgtcgtacgcttttgttgatctgtcggctaaatccagtttgaaatatctggaagcaatgaattcaccgatttccccggtaaaactgtctgtacgaatgattcccaaagtgaaaagtttatcgctacacttggcaaattccttcaataaagtttctcttttttttactggtttttccatagatgacttcactttttactgagtatacttaaaaatcgaatggattcagttttgattcgctatcttccatatcttcatagcattgatcgttgaagcggaatagctgtgttggcgatgattccttttcgtttatgttttcgagtaagccggaaaccatggcttggcggtagaaattctgtcggtcgtaagtacgcccgctgattagctcatatacccgttgcagctcgcccatggtaaactgttcatccagcagtcggaatgcaatggggctaaccttcagcttgatttttaaatgttctctggctttgctgatgatttcatcatggtcgaaggcaagaggcggcaattcatccacctcaaaccagcaggcgcgggcagcatcgtcgccagccaatatctgatagtcactctgacggaccaaggcatagaatgcaatggtgacgacccgttcccgaggatcgcgattcacggcactgaacacataaaactgctccaggaaaacattctttacgtgcgtttcctcatacaattcacgtgcagcaccttcttctgccgtttcatccatttccaagaatccgccgggcaatgcccaagttcctttgtaaggatcccgactgcgttctatcaatagaatatgcagctgtttaccgtcaaagccgaaaattacacaatctgtcgtaaccgccggacgcgggtatttgtagctaaacatttttttctattattttgtttgaatgctattaattacgatacaaagatagtgttatttgaaataatttaataactttgaaaaattcaaactaatgcaaatatgttatgaaaaatatactcggacttgatttaggaacaaatagtattggttggtctattgttaaaagtgaaactgatgaaaatgggaaagagcatttggttggtatagaggctgctggaagtagaataataccgatggatgctgcaatattaggcgattttaataaagggaattctgtatcacaaactgcagaacgtacaaaattacgtggtgttcgtcgtttgcgcgagcgttatttgctacgtcgggatcgtttacacagagtccttgatatccttggttttttgccgacacattatgcgcagcaacttgatagatatggaaagatcttaaaaaatcatgagcctaaattggtatggcgaaaaaatgcagccggagtctatgagttcatcttcaaggattctttcgacgaaatgttacgtatttttaaagcacagaatccggaccagggtgatggaaaaataccttacgattggactatatactacctgcggaaaaaagcattgacagagccaatcagcaaagaagagctagcgtggatattgctgaattttaatcaaaaacgaggatattatcagcttagaagcgaagaagaagaggaggagaccaataaatctgtggagtttcaagcgttgaaagttgttaacgtagaagattctggtgataaaaaaggaaaagagacttggtacaacgttcgtttagaaaacggtttgatataccgaaggctcagtgacgtatttcttgattgggtcggaaaggtgaaagagtttgtcgtaacgacggaacttgaacctgatgggactccgaaaagagataaagatggtgaaatcaaatattccttgcgtgcgcctaaagaagatgattggacattggtaaaaaaacgcacagaatcgaatatagatgcaagtaataagacaaccggagcatatatttgggatgcacttttggaaaatccgaagcaaaaaatcaaagggaagttagtgcgtacgattgaacgtaaatattataaagaagagttaaagcgcattctcgtaaaacaaagtgagtatcatttagaattgcaaaacagggagttatatacagcttgtgtaaatgcattatattctcataatgaagctcatcgcaataatatacttgataagaattttacatacttgtttttggaggatattttattctaccaacgcccgttgaagagtaaaaaatctttgattgacaactgcccttatgaagaacgttttgccaaagatgtaaagacaggacaagtaacaaatgttcctgtaaaatgtattgccaagtcgaatccattgtttcaagaatttcgtttatggcaatttatatcaaacttgcatatatataggaaagatgttataccggaaacagatgttacaagtgaatttttgaaaaatgaagatgattatacggcattatacgattggttgaatgacagaaaagatatagatcaaaaagcatttttaaagaatccgctatggaatttgaagaaaaatgcagaaaattaccgttggaattatgtagaagataaagtatatccttgtaatgaatttcgtcatgttgtattgagtagattgagcaaatgtagtgtatctgctaatttcctgaataaagaaacagaacaggcattgtggcatttgttatattcaattgaagataaagaagaattagtaaaaggattgcaaaaatttgccgttaaatataatttgggagatgctttcgttgatgtttttcaaaaagtgcctgcatttaaaaaagaatatggttcctattcagctaaagccattaaaaaattattgcctttgatgcgaatgggtaaatattggaatgaaaatgaaataaattctgatgtaaaagagaggatatctaaaataacaaccggggagtacgatgaaaaaataaaagatacagttagagaaaaagcgaaacattttgaatcgatatctgattttagaggattgccgctgtggttggcttgttatgttgtgtatgggagacatgcagaggcaaaagaaatagtaaaatggaactctcctgaggatattgattcgtatttgaaatcatttcgtcagcattctttgcgtaatcctatcgtagaacaggtgattacagaaacattacgtactgttaaagatatttggaagcaagtaggacatatagatgaaatacatatagagttggggcgggagatgaaaaatccgaaagataaacgagtaaagctcactcagcaaatatcagaaaatgaaaatcgtaatttacgcattaagtatttgcttacggaatttttaaatcctgaatttgagattgagaacgtacgtcctaattctcccagtcagcaggaaattttgcgcatttatgaagaggatatcctaaataatacttcagaattaccggaagatattgcaggaataatgaagaaactggtagaatctgatgtaaaaaaacgtccgtctaaatcagaagtcttgcgttataagttgtggctggaacaaagataccgttcgccatatacagggcaaattataccattaggaaagctatttacacctgcctatgagatagaacatattatacctcagtctcgttattttgatgattcatatagcaataaagtaatatgtgaatcagaggtaaataaattaaaagcaaatcttttggcacatgaatttattgccaatcatggaggtgaagttgtggaattgaattatggacaaactgtaaaatattttcactagaagaatatgaagagtttgtcaaggaacgttatcaaagcaacaaaactaaattaaaaaaattgatgctggatgatattccagaccagtttatagcacgtcaacttaatgatagtcgctatattagtaaaatagtaaagggtttattgtctaatattgtacgcgaagagaatgagcaagaggtaacatctaaaaatgtaatttcctgtacgggtggagtgacggaccggttgaaacaagattggggaataaacgatatttggaataagattatcttgccacgattccagcgtatcaacggtttgttggggcgaacagattttactgcattcaatacttcagggcatgagattcctgtaatgcctttagagctacagaagggctttaataaaaaaaggatcgatcatcgtcaccatgctatggatgctataattatagcttgtgcatctcggaatattgttaactatttgagtaatgagtctgcgagtgcaaaggcagaagtttcgcgattggatttacgaaatatgctttgtgataagattaagacggatgacgctggaaattataaatggcttttacgaaagccgtgggagtcgtttacgcaagatgtatatagcttataactgctgtttttagatgctgggaacacataaatcaaagaaatcctcgaattatcgcagcataaagaaaatgaaccgatttgtatagtgatgaacaaaaaagaaggtgcatcgtgcattacgacacacctttttttgttttatctgattcgttgttcaacgacatcccagtttacaagtttccaaaagttttcaatgtatttgggacgggcattctgagtgtccaagtagtaggcatgttcccatacatccattgtcaaaagcggatatttaccttcttggataggagtgccagcattaggtagagctattatttctaatttttcaccatcttgtacgagccaaacccagccggaaccaaataaggtggtgcctgcttgagtaaacttttctttgaatgtttcaaaatttccaaagtttttattgataagttgaagcatttttgtttgtggcaattctatgcttggagcatggagtgcttcaaaataaaaatagtggttgaacacttgggctgcattgttgaatagaccacctgttgctttttgaatgatttcatacagaggtaagtcttcaaattcagtaccggctttttgtttgtttgtgttgtcgatataggctaccaggtgtttaccatagtgatattgcaaggtcttcgcactaatcaatggttccaaagcatcttctttataaggaagagacactaatacaaattttttgtctttatcccgtttgttgaccgcttcgcatgaaagcagtccgcagttgcaatttgtttttttcataattcttcattttagtattctaaataaatatacgtaggttatcttaaaaggttctactcaaattctgtgtataacttctttagggtaaagataaccttttattttgaatattttttttattccgtatattattttatacctaagacaaatccaagctccaggcgttgggtttgttggaaaatatcattgatttgtttttgtatggcttgttttgccttttcttccatgccttcaggtgcatggctgaaatctacacccatcgcttttattatcattgatactattgaatcgctcatgatagaataaattacttggatgtatactttttcaaaatacattgtcaactggttgctttctatatggtatttgaaactaataggaggaattccattcatgggaaaattcattccggatagcatatttcctaagtttaccgtcaattgtaaatagttttcatcacacatgtattgtgcaggaattttgaaaggtatctgctgtttgttttgtatatctagcactaggttctgatgatcttgaaaattgatacctttaaaataagctcccattttttcttgggctatagctgtaaacatgccttttagttgtttgacacctatttttatttgcttttgcatcatttgaaaaacgattgtatctgtggcgtattcaaattcaaaatgcggtttttgataactccaatatgtaccggcaagtttgtctgtcggttcatcctgattgctgcaagataggttaagaagggttactattgctataaatattatactgataatctgtttcatatgattgttatattaaattaaatattaaatgtgatagatgctcccagacgtgcaggagctcctgattgtcccatattattgtactgtggaagtttgttgccaacaggattgtttagcatatatgagaaaaaggctttgtcaagtatgttttttccccatattttaaactcccaatgtttggcagaaattccaaactcgagattccataagaagtaaggtttttgttttaataggttggcttcatcaaaatattgggttccgaatccattgacacttgtggaggcagcaaatgactggaaccaagaaacatttacttttttattatagcgtaaaccagtatttccggtaaactcgggagccattacaatccggttcccttcatgggctttatttgcattgtggtagtattgggcatgagtgtatcccattgataggaaatatgccaggcaaggaataaactcccagtgcatgtcaacttcgcaaccaacactatgcgcatctcctgcatttttcagggctggtcccatcatgcccatggtaaatatttgttgatctttccaatcgataaagaatactgcggcatttaaattgaatttatggttttgactgaaatacttcattccgatttcgtagttccaaagtttttctgcattatattgcaattgtaccaattggctactcatatcgtttgatataatgttatatccaccagctttatagcctttggaaatactgaggtagagggataattgagagttccattgctgtaaaagagaaaattttggcaaccatgcatcaaaatcacgttttttatttgattggtgatagctgctatattgttcacttccactgaatagcagactatcacgataatcaagttctgttttttcgtagtcataacgcaatccagcagtaaaagtcatccctggccatatatcccgtatggcaacttggccatatcctgcaattccccaagtggtagtgttattatagtacttggcatggtctaatttcatgggtaataaataaaaacgatctgtcccgaaattggcaatgtatttattcgtaagatctttgtaaaagccaaaggctccaattgtccattctatacgttgtttttgagaggattgcagtgtgaattcttgtgtatatagatgttgatgtgattttttttgattatcaaaaacatctaaacaagtaaaatctgcatccaaaaactgtttatcatttgtatgagcataagaactaactgatgagaaattaagttgttcccagcgtttgttcagattgatgtgtgctgcagtcaaatttctgcgatatgaggagggtgtattgtaattaactacatatctctcatttcttaatgaatcagctgctgcatatgcatagccaccatcgtaagaatggctatgttcaacaccaagtttcaaatcccaattcagaggagtcagtacccgtccttggtatctgatgtgataagaatctgatggatttgattttttattgttttcatatcgatttttaaaataacctttagatttgttgtaggagaaagacaaccggttgtaataattttttatgggtaaatttaatattattctatagttttgagaagaataactggaatagccaatgccggcttgtagagcaaatttactatggggagttttggtattaatgttaatgagtccattgatactgttacgtccgtagaga

SEQ ID NO: 1333 - DNA, 16649 bp, synthetic construct
  source 1..16649: mol_type = other DNA
  misc_feature 1..16649: note = Synthetic
tagtcgtatgaaaaaagatattcaatactatagcataatagctttattatctgttattcttgtatcgtgtcatggggattggcttgacaggaatcctaaaacgatcattatggaagaacaggtttggaacgatccgaagcaaatcgtgggtttgctggccaacttctacaatcgattaccggtatttacagggctcgaaggcaattggagagatatgacaatgtttgatgacgctatgtggtccggttattcaggagaggagtggaggaatcagatgtcgtcttacgggaacaatctgggagaaatatgggattatggactggtacgtgatattaatctttcacttgaaggtattgacgaatatagtacagcactcagtgagagtgaaaaaaacctttacaaagcagaattgaggttcataagagcgtattattacttcgaaatggtaaggagaatgggaggaataccgctgattaccgaacaactggtatatgattttagtggcgatcctacttatttacaacatccccgggctacggaagcggctgtttatgaatttattgccaatgaaatggatgaaatcaaagatcaactcggcaatgaagggagtacgacgagagccaacgagtttattgcactcgcattgaagagcagggccatgctgtatgctgcatccttagcaaaatacaataatcttatggcagtacccgttacaactcccggtggggaagtcgggatacctgcatctaaaattgaggaatattacagagcttctttagacgcttcgctggaaattattaattcggggaaatattcattatacagaggcaatcctcatttaggtgagaactattatgaaatcttcgataagaaaacaggtaataatgaagtgatttgggtaaaagattataaagcgcctgataaaagacactggttttcttacgataatattgcccgcggattaagagaggataatctggcttcttcttgtgtaaccccatcgttgaatctggtggaaagctatccttatctcgacggaacagccggtacgctgaaaaacaggaccagtgataactccgattacatatattacgatgacctatcggatatttatgccaataaagattggcgcttatatggaactgtcctcttctcgggagcatcattcaaaggtttgtcggcaggcattcaggccggagtgaaagtctggaatggtacatcatacaatactattgaaggagaagatatcggaacaatgtataccgatggtggagtattggtcggaaattcaggacctcaccgttccatgcaggaagtttccaatactggcttttatttgaggaaactcatccaatcaggggcagggacaagtacccgtggtattttgagcgataactggtggatacatttccgtcttgcagagatatacctgaatgccgcggaagctatgatggaactgggccttccggatgcggtcaggtacgtgaatgaattgagggaaagagcaggacatcctgctaacagtctttcggatttgaatttggatatcctgatgaatgagagacggatcgagttggcgtttgaagatcaccgctatttcgacctgaagagatggagaaaagcacatactgtttggaatggcgatgcaaataatcccaatacaatgatttatgccctttatccttaccgggtagtaggtggccctaatgatggaaaatatgtattcgataaaatgatcgcaccgcgtttcaggaatccgagatattttcaattggctaattattatacatttattcctcaacatgcaagggataataatcctaaaattgttccaaatccatttcaataaaaaaatgaaaacgatgaaaacgaaaatatttttgacaacatatatcagcgctattctccttctgctgctttttagttgtgagaaagataattttagtgctccggagtccatgttatccgggaaaataacttataacgacgaatcaataggtgtcaggtcaaacgccctgcaattagagttgtggcaacatggttatcagaatttcacgaaaattcccgtacatatcgatcaggatggaactttttccgccatgttgtttgatggaaattacaaattagtccgtatgaacggggctccgtgggaaaacaatacagactctatagatgtggtagttaaaggaaatactgtagtggatgttcccgttgtcccttatttcacgataagtaatgctgcttattccagaaatgccaaacagataacagccacatttacggtcaacagggtaagtaatcagagagagttgagggcggttcgtcttttcctgggaagaactattattaccgataatgggtataatattgcgagtgcagaaaaaccggcatccgaagttacactcggtacaacggttacgttaaccgttactataccggattcccatactgaaaagttcttatatgcaagaataggagtggagacagagggtataggccaattattgtattctccttcggaaaaaattcaattggattgatgatgtagagaagattataaattaagtacttaaagggcatgagcaaggtaaattctacctgttcatgccctaaatttattattactctgatatttacacctattatctgtcataaattttgtacttttgtgcaaaagttaggttataagcattttatggttaaagcaatattttttgatattgacggtacattggtcagtttcaaaacacatcggatacccgattccgcccggaaatcgatcgagatgatcaggaataaggggattaaagtatttatcgccaccggcaggcactcttcagtgatcaataatctggacgacatggagttcgacggatatatcacgatgaatggatgttactgcctgcaaggtaacgataatgttatatttaaaaaaagtatcgaccaggcagatgtcaatagctttatcgattatatacaacagaaaagggaacttccctgcctctttgtagaagaacaccgtctttcttttaattatatcgatgaagatgtgaaatttctgatgagcctgttgaaacaggaaatgcctcagataaatgatcttgattattaccgggacaaggaattattccaattaacggcgtttttcaaagattctcaggaagaggaagtgatgagtctgttgccgaactgttcagctatgcgatggtatccgacttttgccgatgtcatagctaaaggggtggataaaggtgtcggaatagaccaattctgtaattattatggattctccctggaagagacgatggctttcggtgatggaggaaacgatattgaaatgcttcgtcatgcgggtataggcgtggcaatgggaaatgcaaaggaagagatcaaacaggcggcagattatgtgaccgacactgtcgatgatgatggtgtactaaaggcattacaacattttgggttggtgtaagatcgagtatctatcctatcgaaattaatcaagatactaaactatacaaacgactagttgtctatattataaaaaatgcctcgcagataggtgaggctctaaattacttaataatcataattcctcaaaataatcatgcgaaaactttgcaaaatgtaaagttttccatatatttgcatatatgaccagaagatcagtagaagataatgattataattgagagtcaaatactcgatgaatttgtagagaagcatgccgattgtcggaaagcagtccaaaactggattaataaagtggaagatgctgaatggaaatcgcataccgacttaaagatggactttccttctgccgattatgtgaaaaacggacgatatgtattcaatattcggggtaataaataccggttgatcgtggttgttgttttcgtagcaggtcaattaattgtccgttttataggtactcatgctgagtatgataaaattaatgcagaatctgtttaaaaaaggagatgagttatgaaaatgaaatatttagatctgaaagaaataaaggatttatctcaattcaaagagataaaagcatattatgaagatatattgcagaaagctacggaaaccggagctctggaagtgcaggatgctgataatgaatatatcaaagaattagaccgtataggcaaaatagtatatgcgtatgaaaggttacattttcccgcgaagaatttgaagtttaaatctcctttgattatctcaatcgaaaatgaactcgacaagaggcaattaaaacaacgtcaagcggcagaactgttggatgtcaaagaatcaacattcagccaaattatgaaaggaaagcggtctgttccaaagataatggctaagaaattgtactcggaattcaatattgacccggtacttattttggaaaatttataaaattagaataatattacattgcccggttattacgattttgtttttgctctgggctctgggtatctacttaactaaaaactcccttacgagaacagtgtcgtaagagagttcaaagtttgaatgtcttctttattttgatgcttctgtgagtgccctgaagagcggcaggaatgtgtcgtctcctttggatacaaatccttcggggtggaattgtactcctacaacgaattggtctccctctttttcaatagcctctaccactccgtcttttgctcttgcactgatcttaaaccctttggcaatatcttttaccgcctgatggtgaaaagagttaactactaccgactctctgccgagtattttatagagttttgagttcttatcaatatcgatagtatgcgttccgtagctgcttggagcattttgagagtgcttcacaaatgtaccttcgacctgggatgggatgtcctgataaagtgtcccgccgaaggcaacattcatagcttgttctccacgacagattcccaatacaggtaatcccttctctacggccattctgataagagttatatcgaactcatctctttccggggcaataccgcccatggcgcgtacaggctcttcgttaaaccattttagcgggtcaatatcctctcctccggtcataacaagaccatcgattacttccagaacacgcgtaagctcctccttatcggaggtcatagggataacaagaggaacaccccctgctcttttaattgagttggtatacgtaagtggagcagaagtagcgctttcgcttgcgactgaggatacaccgataataggctttttctgggcataagcagatataagcgtaaatatcagtacaatggataatagaatttttcttttcataaatgtaggactatctcaagactttacaagttatccaggctaatagtataactgtatctgtattctttgtctgagaacctgtactcgttcagcggtttagctccccaggagttcaatccggccacgccgcgctggaacaaatccacacagagaacggtctctttacggggaagtacatccgaccagtgttgttgttttttggtcattcccggatcaaggtcttccggacgatagttggtggcacttaccgaaagcggttgtactccgtctacacggattccttttcctgcttcgtttaggagagtcagccagcggacatcggttttattcccggtttcctgtggacggtaataagtataggcctgatcctttacaagaccttcccagatacccataaatgtgtcggtgttgcggtcgatgtaattctcccatggccctcgtccgtaccaacggaattgattatactcttccggtaaaatcatcagcattccgaagcgcatcatctccggaagctcgtcgctctgtgcctgataatggagatcggtggtaaggcttccgtcgttattcacggtgtaagtgatatccacaaaggcttctatccctctgggcttagcccggtaagtaaatgatacgccgttgttgttttctttcatatcgcggtaactgtaaatcacattatggcctgctgcgtcccagagacgaagattatattgctctcccgaaccgaagtcattgtcgaccggagccctccagaaattcaggcggggcagttccttaaagatattttgtccgtttacttttgcactgatcaatgaccggccatctcttaccgaaaagacgtactctttgttgcccgatgttacggttacgttttcatccttccgggatacattaagtgttcccgtatgttcaccggaaacaaaatagttattggcttcgaatgcaaattcctcttttgccacttcaaaaccgggtttgataaattcatttcctttcttgtcataagcgaacagatggaggaaatactccgtgcccttttcaggttgtattgaagggagtttcaattgaacatccttgccggaatttaccgggacttctacggcgaaatctccttcggcaactttttcaccgtttttcaataacacccacttatagccgaacccatcgttggtcagattggtgaatttaaaatcattgatcacagtgataagacctttgttgaggtcttttgcctcaaaaagaatgttctgataaaccttcttcactatatgggtatggggcatataattctggtcgggagtaacaagtccgtccatacagaaattaccgtcattttgtttattatatcctttcaggtcacccccgtatgcccagtaaaagcgtccctgttcgtcatgggttgggtagccgtggttataccattcccaaatgaagcctccctgcatgttcttgctgctgcgcatcagttcccagtattccgggaaattacccatactgttgcccatcgcatgtgcatattcgcacataatatagggacgtcccaggtcctgggcagcatcccgcttcatactttcccaggagggatacatcgggcagataatatcggtattcctgtcacgtccggcctgttcatactgtactgggcggctcggatcgcgttgcttggcccagtcatacatatcgaagaacgcttttccgttgcttgcctcgttacccagtgaccagataatcacagagggatgatttttatccctttccactaaacgggtgacgcgatccatatgttgtccgtgccactccgggaagttggaaacattgtcggggccgtaacccagcccgtgtgactccagattggtttcatccacgagatagataccatattcatcgcagagtttataccataaaggttgttgaggataatgagatgtgcggacagcattgatattcagttctttcatcaattgcaggtttcgcatcatgatctctttgtctactacctgccctttattggtattgaattcgtgtagattgacacccttcaggaatattttttgcccgttcaccaggagttgtccgtctttaatttccactctgcggaatccgattttggaagaggttgcttcaatcaggttgcctctttcgtctttaagggttaacagaagggtatagaggttaggtgtttctgccgtccatttgtccggattggatactcttcccgagaggctgatctcttcagaaagggaagcgcttatgcttgtatcttttgtctgccggaaaacattttttccgtttttatccaggatggatacttccagtttacgattttgagtctgatcggtatagtttttcagctctacttctatactgaactgtccatgcctgtaggagtcatccagatcgggatgagcgaagaagtcctgtatgcgggtatcatctgtgctgtacaggtaaacgctgcggttaatccctcccaaacgccacatatcctggtcttccaagtaggaaccgtcactgaatttatgtacctggcacgccagcaggttctttccctgacggatatacggagtaatatcgaattccgccggacttttggcgtttttattgatacctacttgtttcccgtttacaaagacaaccatgaaattggtacccccctcaaaatggaggaatacccttctaccgttccatgtctcgggaatagtaaatgtctgacggtaggcgcctaccggcgaatcattccggtcgatatgaggaggatttttcgggaatccgaagccgatattcacatacataggaataccgtatccattgaattcccagtttccgggaacgggcattttgccccaggcgctgtcatcgtagttttcattgaaaaaacctacaggaacttcatcaactttcggcacccaatgaaatttccaggttccgttgagggactgataataaggtgaacgttcatattcatcggcgatggcagtctgttcgtcagcataaggaatagccgtagcccttgttttttcggtatttaccgcgaaaatttccggattttcccaatcaggagcctgatcttgaactcttcctgaaccctgatcctgcgcatggataaatgctatatgcatcaacattgttaaaaaaataatataagaaaatgacttcatgtgtatatactttggtgaataaatttatatatgttttttgttttccttgcagtgcaaatttacatgattttctttgaaaaaaacacatggtcagacaaaacaaccagtttatttgacgaaataacgtctttcctgaatatgtcgtaaagatagatgtttttctattatttttattctaaaatgaagttattcgcctcttatggcggtatttttattcttaataacgaaagagtaactaatccccggtggattgaactgtacaaggctaactggagtccggtctataagtccgttaggactccgtgtagttgttggatgtgtcaaggagaaatttataaccgttgtgcatacaagaaagagacaataagattgatcgaagaaatcatttgaatttgagagagggacctaattccctcttttttaatattttccccaatctctttgacgtgcagaataaaaaaggcgagttgccccgccttacatgttttcacaacggaataatccttattgtgatttgctttcaaaagttgtaacggcaaatgtatgaaaataaatttaatatgcaaaatgatttgttaaataaaatattcattttaactttacgggcaataaaataacgtgtttaattgtatacgacatgaaaaagcatattctgggtttagatctgggtaccaacagtattggatgggcattggtggaggttgatgaaaacaataaaccatgcagcatagaaggtatgggcagccggattattccaatgagtcaggatatattgggaaattttgaaagtggaaattctatttcacaaacagcagaaagaactgcttatcgtggaacaagaagactgcgtgagcgtcatttgttgcgtagggaacgtttgcatagagtgctgaatgtgttaggctttttgcctgaacattatatgaatcagattgattttgagaaacacttggggaaattctttactgacctagaacctaaattggcttggaaagaaaatgcgaatggaaaatatgaatttatttttcagtcttcgttcaatgaaatggtctccgaattcaaaaaagctcaaccttatttatttgaaaacggaaagttgattccttatgattggactatttactatttgcgtaaaaaagccttatctcaaaaaataaaaaaagaagaattggcttggattttattgaattttaatcagaaacggggttattatcagttgcgtgatgaggtggacgaagaaaatccaaacaaattagttgaattccattcgttgaaagtgattgatgtcgtgccggacgaaagtgctaatagcaaaggcgaaacatggtattctcttcatttggaaaatggttggatttatcggcgttcgagtaaaacacctctttttgattggaaagataaagtccgtgattttattgtcacgacagatttaaatgatgatggtacgataaaaactgataaagagggtaatgtcaggcgttcgtttcgggcaccggcggaagatgattggactttattaaaaaagaaaaccgaagcagacattgataaaagcaagaaaactgtcggaacatacattcaaatatgatgctttgttggaaaatccatcacaaaaaataaaagggaaattagtacgcaccatcgaacggaagttttacaaagaagaactgaaacagattcttcaaaaacaacaggagtttcatcccgaattacaggatgaggatttgtataacgaggctgttcgtgagttgtatcgtagcaatgaatcccatcaactcgctcttggtaaaagagacttcacgcatctttttttggaagatattattttctatcaacgtccgttgcgaagcaaaaaatcgtccattgggaattgttcgttggaatataggaagtaccgtgataaggaaggagtggaacatatcgaatacttgaaagcggcgcctaagtcaaatccttattaccaggaattccgtttgtggcaatggctctataatttaactatttaccggagggatgacgatacgaatgtaacccaagaattcttgaacagcgtggaagattatgagaatttgtttgattttctggataacagaaaggaaattaggcaagacacgttaataaagttcctgttggagcaaaaaggttttaagggaaaaatgttggctaacgaagcatcaaaatatcgttggaactttgtggatgacaaggaaaaagtatatccatgtaacgaaacaaaagctttgattgtatcccggctggcgaaagttgaaaacctgcctgacggtttcttgaaaagggaaactgaacaacaactctggcatattatctactccgttaccgacaaggatgaatacgaaaaagcattgaaatcgtttgccgaaagacatggattggatgtagcatcatttgtggaaaattttaaaaagtttccgcctttcaaaagcgaatatggttcattctcggaaaaagccattaaaaaattattgcctttgatgcgaactggaaagtattggtattgggaaaaaattgacgaaagtacgaaaaaacgtattgctaaaattttaacaggtgagtatgatgaaaatataaaagagagagtccgggagaaagccattcatttgaccgaagaaggacattttcaaggtttgcagctttggttggcaagttatatcgtttatgatcgtcattccgagccaggcattgccggaaaatggaattctgtcaatgatttggaaaaatacctgcatgaattcaaacaacactcattgcgtaatccgatcgtcgaacaaattgttaccgaagcattgagagtgataagagatatttgggcgcattatggtaacggagtgaaagatttcttttcggagattcacatcgagttaggccgggaaatgaaactacctgccgaagaccggaaaaaattaagcgatcaaatgctcgaaaacgaaagaacaaaccttcgtatcaaagccttacttgcagaaatgttgcattatccggaagtggaaaacgtgcggccatactcacctatgcaacaagaagccctgaaaatatttgaagatggagtgttaagttctaatatcgaaatagacgatgatatccttaaaataagtaagaccgctcaaccttcttcctcggaattaagacgctataaattatggttagagcaaaaataccggtctccgtataccgggcaagtcattcctctgaacagattgtttaccgctgattacgagatagagcacatcattccacaaagccgttatttcgatgatagtttcaacaataaagtgatatgtgagtcggctgtcaataaactgaaagacaatcagaccagttttgaatttataaaaaaccaccatagcgaaatcgttgaagtaggttttggcaaaacggtcagaatttttgaagaagaagagtatcaaaaattcgtgaaagaacattatgcgaaaaatcgctccaaacggaataaattattgatggatgaaattcctgagaaaatgattgagcgccagatgaatgacacacgttatatcagtaagtttatttcttccgttttatccaatattgttcgttcggaaacaaatgacgacggaattaattcaaaaaatattgttccactgaatggtaaaataaccggtcggttaaagcaggattggggactgaacgatgtttggaacgatttgatattgcctcgttttgaaaggatgaacgaactgaccggttctaaagacttcacggcttacaatgaacgttatcagaaatatctgccgacagttccgctcgaattcgcaaaaaactttcagaaaaagcgtatcgatcaccgtcatcatgccatggacgctttggttattgcctgtgctacccgcgaccatgtgaatttccttaacaatcaacatgcgttggacaagaagaaaacaaaagaagaaaaagacaaaagtcgattcgacttgcgtaataaattgtgtttcaaaaataagggagatgataaaggcaattataactggcagtttttcaaaccttggggtaattttaccgttgatgcccgcaatgaattggaaaaaatcattgtcagtttcaagcaaaatcttcgtgtgataaataaaagtgtcaattattaccaacggtacatagatggtgagaaagtggttgacaaacaaaccaaaggtgataactgggcgatacggaagcctttgcataaagatacggtatcgggattagtgcgattgcgaaaaacaaaaactgtttcattaaatgcggcgttagataattatcttgatattgttgataaaagtttgcgaaaacatattatttcgttggtcagtcaaaattacgataagaaaaaacttgtgagatattttaaagaaagggagaaccaatggaatggaatagatataacgaaagtcgctatttattattgggaaaacgacaatgtggcttcgagggtaagtttagacacctcgtttaatgaaaaacgaataatagaaacaataactgatacaggtatccaaatgattttactaaatcatttagaaaactacaaaggcagattggacgatcaaggaaaagaaattgtccccgaaagtttggctttcactcccgaaggaatcgacgagatgaataaaaatatcattttgctcaacaatggtaaattccatcagccaatttttaaagtccgaacctatgaacccaaaggtaataaattcaatgtcggatatgttggcaataaaaaaactaaatacgttgaagccgcaaagggaacaaacttgttttttgctatttatgtagatgatgagggcaagcggagctatgaaacaattccgctgaacatcgttattgaacgcttgaagcagggactaaaagaagtgcctgaaagaaatgaaaaagggcataatcttttattttctttatctccgaatgatttggtgtatgtgccgggggaagaagagctaactacttcattaaatcatcaattagatcgaaatagaatttataaaatggtaagttcaagcgggaaccaatgtttctttgtcaaaagcgaggttgcaaatcctattgttaataaggtggagtattcagtattaaacaagatggaaaaatcaatcgacggaataatgataaaacaagtatgtaggaaattacaagtagatagattggggaatatacaatttgcatagcaccatatcaaaatctttattaaaaaagaatatcaaagcctcgtacaacaaacaaagccgtaaaaaattacaaataataaagatgcgcatgtctacagaacaattattaaacgaatgccttgttattttgcgaagtattaaagacgacaggaaaagtcttgaaaaattgcttggatttatgaaagaagaatttgttgaaaacaacgaaatcaatctttttgaaataccagactataaattacaagttcctccgaaatacagaaacttaattagcgaagttgctggtaatatgtcagcagggttgattagtttcgtaaatacggaaacattggaagttgatggaatgccgaaagaaatttactcggatttaccgttggaagaagatgatgaagagtatgaagaagaaatgactgacactgatacgtattctgatgaaatattcagttttcgaaaatggaaagattttataacgattgaacctttggagtcgtcggaagcatatcgcattatggaatattttgtagacaatctgcctaagggacatgcgaagaacatattgaacaatgccatcaacggcaaaaaaccattcgcaaatttcaacaattttattcatcaatcggaatatcgtgaactttggtttgaatttaaggatagaatgtatgaaaaatacgtgattgatagttatttatataaaataacagataaaggataaccctatgtccaaaccccggttgaaaaaagaactccaacgcctcaccaaagaacaattggtagagcaaatactggatttgtacgaaaaaaataaagctgtaaaagagttttacgatttttatctcaatccgaagaatgaaacggccttggctgaaaagtataagaaaattatccgtaaagaatttaatgtagagcatcccgaacgtggcggtgaaaaattttcggttgccaaacgtgctatttcggattttcgtagtttgcaaccttcacccgaagcattagcagacgtgatgttgtatttacctgaaagcgcatgtgaactgacttattgttacggtgactattcggaacaattctatgattcgacttacaacaattacaaggctgccttggcgtttatgcaaaaacacggtttgcttgaacaatttaagttgagagccgaacaatgtgtacgttgggcttcaccctgcggttatggctttgcgagtgaaattgccgatctatattatgaatattataatgaatcaccatgattaaacgcacgctttacttcggtaatccggcctatttatccctccggaaagaacaactgcttattcaattgccggaagtggtgaaaaacgaaacgctgcccgaaacatttaaagacgacgccgtgaaaaccgttcccatagaagatatcggtgtggtgattctggataacaagcaaataaccattactcatggtgtcattgaaaaactgttggccaacaacgttgcactcattacctgcgacagtagccggatgcctctgggtttgatgttgcccttgtccggcaatactacccaaaccgagcgctttaaacatcaactgggggcatcggttccgttgaaaaaacagttgtggcagcaaaccgttcaggcaaagatacaaaatcaggctcatttgcttcattctgctaccggcgaggtggtaaagaacatgcaaatatgggcttcggatgtaaaaagcggcgatccagacaattatgaagctcgcgccgccgtatattattgggcgaatatctttccgcagatatccggattttcaaggaacagggacggtattccacccaacaatctcctgaattatggatatgccattttaagagcagttgtggcacgctcattagttgccagtggactacttcctacgttgggtattcatcaccggaacaaatacaatgcttactgtctggccgatgatatcatggaaccgtatcgccccttcgtagataaagtggtcgttgaaattatagaaagtgaagaggattatcaggaattatccaaaaatataaaaatgagactattaaacattcccgtattggatgttatcatcaacgggcaacgtagcccgcttatgattgcggcatcgcaaactaccgcttctttggcaaaatgctacaaaggtgaaatacggaaaatagcatatccgaattttgagtaaaaggcaatatgaacctgaatttgacaaatatcccggaaaaagagagcctgaaggaaaagtatttccttttgaaaggagaatacgtaaaattattgaccgacaaagatagtttgttgcaatggggtaaaccacagttagaagcgttatatgttgtgaagatcggtcataaacagttgcagttgctcgaaattcaattggaaacgagagctggataataaacacgacagttttactatagctatttacaattcacaaggcgataaattaggttatattccacgtgataaaaatgagatgttggcacggctgatggatgccggcaaatggttttatgccaaagtgaaaaataaagagtgggagggtaactggttaaaaatagatatggaaatatatttgaaagaatagaggttttatgaatcgactaagcgaatatagaattatgtgggtactcgtattttttgacctgccgacggagacgaagaaagatcgtaaggtctataccgtttttagggataaactgatcaaagacggttttaccatgtttcagttttccatctatttacgacattgtgccagccgtgaaaacgccgatgtgcatattcaacgtgtgaaaaacaatcttccaccacatgggcaagtcggcatcctgtgtattaccgataagcaatttggcaacatggaattgtttatcggaaaaaaagaaaaagaagtaaccacgccctaccagcaattagaactgttttagaaaatagaaatcccgccttaccggcaggattccatgttcggaacaacgtctttttttaattgtaattttcggtataaaccactggaaaatagcga

SEQ ID NO: 1334 - DNA, 16625 bp, synthetic construct
  source 1..16625: mol_type = other DNA
  misc_feature 1..16625: note = Synthetic
gatggtagaaattgtaaaatatctatgctttttaatgtggtttaagaaaaccctaagttttattgtattttattgattcactccaggttgtcgctttcgctgtgtttaaaacttaacctgtaaatcgcttcttttgtcgcttgatttttgaaaattaaatctctatccacagcaaactgcccatcgttttcttcctgtaatttgttgattgtccgaatgtaaagctcctcttcgttttgctccaaatagagataaacgggtttcccagagctttccacagcttcagcattaaacttatcgccccagaatctcaatgagttgtcccacgtaaaaaaattgtacgcattcggataaagcttatcaagaatttccccatattccgatttcttttgattgtttgcccaagcaatgctgtacatcagcgtatattcaataaaagggcttccgtaattttgcgacgcaataattttatagcagtctttttcaagtgattgtgccacatgccaggtttgcatccggttttcaatatcggtttccatggcttcggttttgataggcagccattgtttgttgaattgaaactgccacacaaaaaagagcgcaattaccggataaatcagaccatttccggttttccccgggaagaacttttttatcagttcggcaagaataaaaaccatcagcggttgcagcatcagaacgggtataaaatagtgatgcgcataatgttttccaaccagaataatttgcagcaaaacagttgcaatcagagtaactgccagccatgcgatttttttgttcgctctttttctgaaatagaaaaaatagccggcaagcacgataatcactccaaaaaagagataaaaaaagcgcttttcgtaaccgtacagctctctcagattaagtgtcagcgaaacgaaatcaataatgtttgtgtcgccgccgccatattgcccgctgtgcagaaaaagatctttcacccagccggcaaaaacaccgatgcgaagcgtcatcggaagggcaataatcaggaaaagaacaaccgaagcgcctacaaacagaaatctatttttccagccgtaaataacgaaaaacggcaaaatccacagcggcagataggagagttttatgctcagtccgaatgccgaaatcaggctgaaaaggagcaactcctttgaggttgtttttctgtttttgaaatagattgaaacaagcagaaccataagcagaatcaccggaaacggcataagcagctccggtgttacccgtccgacgagatcgtaccagattaccggaagaaaaacagcagtctgaaaaagtagggcataggcaatatttcgtgtgactttcagaactttcatgccggcgtagagcagcaacagcgttgtgagtgctgcaattgtctggctgacaatacccagatacaaatcggggtgcatgaaaatatcttcaacaaaaggaacaggcgtagaacggataaaatatactattctgaaaatcagtgccattaagagctgaagcggtgttccgggattgtcaaaatgcccgacttttattgtgccgtcagccatggtcattccgctcataaaatagatatattccgggtcgcaggagcggagagagagattgcccaacagctgccggaaataggcggcaatgataaaatagattaccggaaaaagcagcagcgatgctttttgaataaaaattgcttttgttgctctccggttcatttgatttaaaaatttgctttccgcattgttaatcattcacttcgtcaaaaatagaattttcgctgaatctttcattcaggtatggtttttttggattgagttttcaagaatattcaggctgtttggaccctcgttgaaaagtaaatccaaaatgctcagattgggcataaattcctgtttctcttcaaatacctgcgtgtagggctgcggattgaagtgcgggtcagcagctgccctgtgcttttttggcgaaagcgcctcgcggaaattcagcgtgttttccggtattccctcaaaattgccggtcagctcaggggaaacttcaatgtccaataattcacacagcaattcaatgatttccagattgaaatcgaaaagaaactcccatttttcattgaaaaacggataaatttcatcttcataaaaattaaagaaaggtgatgaattgtaagcggaaaaaatggttcgccattggttgcgctgccattccgtgtcataagaaatacgcaaatccctgatttttacatttcttccgcgcccttttaccaccggaacaatcagggagataatgccgtttgcgccggaaatttcatagcggttgcggtaggtctgcttggtgaaattttcaaactgttcgataaacactttttcaaacagcaaaaatttggaaaaaaactgcaccggcggaaaagttgccgtgctgagaagaattgcctgatgcgccattactcttccctgaaaaaacctgattcttcgtcatcctctgcaatctcgaaaccttccggtccgggtttttttgcctccttcgcctccggtttgggaactaacttcatgacttgtttgtaatctcgtttcagtttccatgttcgcggatagaaatagacgctggcaatgatgtaccctaataatacacagccaagaatgagcaaaaccagcggaacatccggtatttcccagaaaaacagattgatggtaatttcaaatgagttctgcaaagtgaagattaccagcaatatagcaagaatgagaagaatgataatgacggcactcatagcatttaattttctttcgaagataaaaaaaaggataacataaaagtgttatcctgttgaaaaagttatatttagcctactttataaaccgaaacattcggttgattctgaccttcccgggcagatttctgtccttatccagagacaaccagatgaagctcgcttttcccacaatgtgatcttctggcacaaaaccccacatgcgcgaatcggcggagttgtggcggttgtcgcccatcatccagtagtaatccattttgaaagtgtagctgccggcagcttcgccgttaatataaatggtttcgtttttcacttctaatttattctcttcgtaaacggaaataatccgcttgtaaatgggcaaattttcaacggtgagctgaacggtttttcccttttggggaatagtcagcggaccgaaattgtccacattccacggatagtttttactgtgtggaaaaatattctcgtcccatgttccgggctcctcttcaatctttttaacggaagttacattggcaaaatcttctaatttttccacattttcctctgtgagcggaaacatgtaccgttcgtttgaaaaggcagtgcggtcatcttcggcaatatgaagcttgtcgagtgatttgcggttgatggaagttccgttggtgttgacgatatagttgtgctgtatgcctttgaagtgtggctgcggtgtaccgttcaccttaacctgcccgttggtcatttcaatcacatcgccgggaattcctatgcaccgcttgatgtaattttcccgcttatccaccgggcgcgaaaccacttcgccaaaattgcgcggattgttccatacgtttgcccgtccgtaggttctctctaactggtaatagctttgattttgaaggaacaacgctaccgtatcgccttcgggaaaatggaaaaccacaacatcatcatttttgattttgccaaatcctttcagccgtttgtagggctgtttcagccattccacataagatttttttgtggaggaaagcggcatggtgttgtgcacaaacggaaaagagagcggcgtgttcggcgttttcggaccataagccaccttgctcacaaagagatagtcgcccaccaaaagcgatttttccatggatgaagtgggaatggtgtatgcctcaatgaaaaacatacggataaacgtagccgcaatcaccgcaaaaatgattgcatccacccactccacaaatttcgtctgtttcccgtcgggcggatttttctttttccagaacgcccagtgcacttttttcgtgatgtagatgtcaaaaatgagagctaatccgatgagccaccagtagttgcctaaccagattacccacaggagatataaagctgcaaccgtgatgaagctgagccatttagcgtttttagtgttttttgtcatgtggcggatattaaattttcaacatatctttcatggtgagaattccctttttgcccatactaaattcagcagccaaaacggcgccaagcgcaaatccttttcggcttttggcgctgtgcgtgatttcgatgaaatcgacatcggagtcatattttatactgtgaattccgggaacttctccctcgcgctccgaagtgatggcaagtatgccctcttccacttcgctattctcttcccagcctttcagggaaggaataattccgataagatcatttgccagcgtgagcgctgttccactgggcgaatccagtttttgcgtgtgatgcacctcccgcattgcgggcttaaactctgggaattgtgtcatcatttcagctaacttccggttcagctcaaaaaagagattcactcccacagaaaagttgcttccataaaaaaatgtaccctctttttctttgcatttctgataaacttcttcccggcgatcgagccagccggtggttccgctgacaaccggaatgccggcatcaaagcatttgaaatagttgtcaactgccgttgatggagtggtgaactcaatggcaacatcgcacttgcgaagattttccactgtaagttcttctaagttgttgatgtcaatgattagtccggtttgatggttccgggagaggtaaattttctcaatctctttccccattttcccgtaacctatcagcgctattttcatgctaaattctcttttctgattaaaataaatgacaaagataacagattacgttaatgtgaaacagcgttcaatcataaaatcggtttaagaatgaaacggtgcaggttttattaggttttttgttttcatcgtttttggcaagctgtgccatcggaagcattatttctgacaaatgcctgaaactgcatgtattgtctcttttttgcagtagctctttcaattggcataaaatcactatttttgccggtttgttaagcatgaaaaacggaatgaaatccgaaagggaaaacgaaagatttatcaggaattttgaaaactgacaattttagctcaatgaaaaatagtaagcttgttgcaaccgatttagatggaacttttttgaggaatgatcactctatcagtaaaaaaagcttagagtcacttcgtttgcttggtgaaaagcagattgtcagggtagtggcaaccggaagaaatctccggaaagtgatggaagttattcccaaccatatcccgtttgattatattgtatattcttcgggagcaggtgtttacgactggaaaaaaagagaacatctgtatcatcaaaatatcagcagcagctcatccaaccggctcattcaatattttgtggggcaggactataatttttatgcatttgacgaggcaccggaaaatcacaggctttggtatcatcggggagagcaggagtgcgaggagttcaaccgttatttttcatttcacaggtcggtgcaacaacagttgccaactaacggggaacttgccggcggactttgccagtttatgctgattattcctgaaaatgagacggtttttgaacagatgaaaacagatattgaagaacgttttgaggaagtccgcgtgatacgcgcatcatcgcccatatcaaaaggatacatctgggttgaggtgtttcaccgtgaagtttccaaaggaaacggggtggggcatttgtgtgaaatgctggggatttttcccgaagaaaccgtgggaataggcaatgatttcaacgatttggacctgcttcgcttcacgggacattcattcattgcagccaatgcgccggaagcgatacgaaacagttttaaggcggctccctccaatgaggaggatgctttcgcctttgccgttcagccgcttctgcaataagtaatttgccaaaagtttgaatattaatttattatcagatatacaaaagatgaaacgaataatttatacacttttgctcctcctgccactgtttgcaggggcgcagcagacattcaacctgaatgacccgattcctttagacccgaaactctcaaaaggagtcttagataacggcatgacctattacgtgcgtgccaacagtgagccaaaaaaccgcgcagagctgatgcttgtggtaaaagccggttcgattgacgaggatgaggaccagcgcgggctggcgcattttgccgagcacatggctttcaacggaaccgaaaatttcccgaaaaatgagttagtgagctattttgagtccatcggaatggagtttggtcccgaaattaatgcctataccagttttgatgaaaccgtttatatgctgaaagttccgttggattcgcaactttatgtcgaaaaagggcttcaggtgatttacgattgggcgtgccggattaccgactcggatgaggagattgaaaaagagcgcggagtgattcgcgaggagatgcgtggcggaagaaatgcaaatttcaggatgcagcaaaagtggctgccggtgtttttgaacaactcaaaatatgccagccgcctgcccattggcgagcaggagattgtggaccatgcgccgccggaaaacctgcgcagattcagaagcgactggtatcgccccgacctgatggctgtggtggtggttggagattttgatcagactgagatggaaaagcaggtcatggaaaaattttcgcaaattccaaaagtagataatcccagacccaaggagtattttgaaattccggagcatgaggaaacattggtgagcatcgccacagacaaggaggcgcaatatccggtggcttttgtcttttacaaacatccgttggaaaaagagaaagttttgagcgattaccgaaactttattatttacgatctttacaatagcatgataaacagccggctggctgaaataacccagcagcccgaacccccgttcattgttggacaatcatcctattccggaatgttcggaccgataaatgtctatcagtcggttgcagtttgccacaacggaaaaattgttgaaggactggaggcagttttattagaaaatgagcgggtgaagaagttcggttttaccgaatcggaacttgagcgccagaaaaaagcgctgcttagccagatggaaaagtcttacaatgagcgcaatcagcaaaaatctgttggccttgcacaggaatatacccgaaattttttgatgaccgaggaacctgttcccggaattgaaaatgagtttgaattttacaaggcttttgttcccggaatcgctttagaggaggtgaatgcgcttgcccaaaagtggattactcccgaaaatcgggtggttgtggtgaatgctcccgaaattgccgacacaaaagttccgtcaaaagaggaaatttttgcactgcttgaagaggtggaaaagctgccggttgaaccttatcaggatgtggtttcggacgtgccgttagttgcagatgaaccgtggcccggtgaagtgctcaacgaaatgagcattgaaaaagtggacgccgtggaatggattcttgaaaatggcgctaccgttgtggtgaaaagcactgatttcaaggatgatgaaattctgttcaacgcctggagtccgggcggaacatcgctctatgatgttgaagatgatgtttccgctgaccttgccgctaccattatgaccatgagcggaattgcacaatttgagaaaatcactctcgacaaaatgctgtcagacaaggtgtttacccttacgccttttgtttctcaaatccgcgagggatttaacgggagcgcatccgtgaaagatattgaaaccttgctgcagatggtatatctctatttcacccagccgcgttttgatgaaaccagctttgattcatacatgtcgcggatgacgggaatactgcaaaacagatccgcttctcccgaagcagtttttcaggattcgctggcggtgattttatccaactaccatgagcgatccagacccatgtcggtggagttgcttgccgaagctgactttgcacgcattaaggagattgccgaagagcgctttcgcaatgcagccgatttcaagttctttttcgtggggaaaatagatactgccctgcttaaaccacttgtggaaacctacatcggcggtattccctatctcgaagaaaaggagaactggagaaatctgcatattgtgccgccggcgggagttgtggagaaaaccgtgaaaaaagggtcggaagacaagagtattcaacgcatcgtttttcatggcagttttgattactcctccaccaatgccattgagttagacgccgtttgtaaaattctggaaacccggcttctggaggttatccgcgaagacaaaagcagtgtttattatattggcgccagaccttcttcggcaaaatacccggatgaagagtattccgttgctatctcctacggcactgatcctgagaagttaggtgagctaaagcaggcaatttttgatgaaataaacgattttgtgagaaacggaccgagtgcggaagagctggcaaaagcgaaggaaaaaatgttgcgtgaacgcgaagtggcacagcgcgaaaacagattctggctcaatataatcagcaatacttactacctgaaagatggcgacttttccgaattcggaaaatatgaagacacggtaaaaagttttaccgaaaattctgttaaagcagcttttggaaaatatttcgattttaaaaactatgtgagcgtggctttacagcctgaaaactgaaaataaaaagatgagtgcataccggaaactcccggtttgcactcatcctgtttaaaacacctttgagaagagcttggaagtttaaattcaaatggaaatgagtgaaatgatatatactccgctgaaaattgcagttagagtggttgtctatgcgctgtttgttttgggattggcggaaattatccggttagatgccatgtttccgttggttgacggctattttggtgaaatcagccgcaccgagtttgcgcaggagtttatcctgctgctgcttgtgattttttatttgtttttgggaaagatgcaccgccccgttatgccggtctccacaattgtcgctctctttctgctgatctctttaatccgcgagctcaattttttaattcctgcctggtgggtctatccggttttgggagttttggcagttattgcatgggttgtttggcgcgatttttccaaaatccgaaaagcaaccatagagttttttgctcagcccgcttcggtctggtttttttcgggaattttagtaacgtttgttttcagccgtctgatggggcgctcaaaattctggcttctcatgtatgacgagagcaactaccgtatggcaaaagccgccgttgaagagggaaccgaactgatgggctacggactgatgttgatttccgccgttgagtttgcgttggtgtattttgggaggaaacggaaaaatagctgagcggttaaaaaaattagttgcagaataatatagtgagcaaataaaaacgagggaaactttcgaatcccccgtagtaaatgttttcacaacggaataatccttattgtgaattgcttacaaattaccacaaagctaaaacaaataaatctattttcaaagtcaggtttcagataattttgagttgatcaaaaattttctaaaaaattgagaaattcatctgctcacaaccctaaaagctaaagttaaataaataagcacattaaagaatatgatttaatgttttttatttatagttttaagcttttgtttcaataaccttttcaaattctataattatgagtaaaaaaatattaggtttagacttaggaaccaatagtattgggtgggctttagtagagcaagacttcgaaaacaaagaagggaaaattctgggtatggggtgcaggattattccaatgactcaggatattaaagatgaatttgggaaaggaaactctatttctcaaacagcagaaagaaccgggtttcgcggtacaagacgactgcgtgagcgacatttgctaagacgtgaacgcatccatagagttttaaacgctttagattttctccctgagcattatgcaaatcaaattgattttgaaaaaaactttggtaaattcaaaaacgaaacagaaccaaaattagcttacaacgaagctgattttattttcaaggaatcattttttgaaatgttagatgattttaaattacatcaacctcatttagttagcgatggcaaattaattccttacgattggacaatctattatctacgaaaaaaagcacttactgaaagaattcagaaagaagaattagcatggttgatactaaacttcaatcaaaaacgtggatattatcagcttcgtggagaagaggaagaagaaaacccgaataaattggttgagtttcattcgttaaaggttatagatgtagttgctgatgaaaagccaaataataaaggagaaatatggtactcaatgtatttagaaaacggatgggtatatcgtcgctcaagtaaaacgtccttaaatgactggaaagacaaagtgcgtgacttcatagttacaactgatataaatgacgacggaagcataaaaacagacaatgaaggaaatgaaaggaggagtttcagagcacccaaagaagatgactggactttattaaaaaagaaaactgaacaagatattgataaatctaacaaaactgttggcgaatatatctatgatactttacttcaaaatcctaatcaaaagatcagaggaaagcttgtacgaaccattgaacgcaagttttataaagaagaattagaagcaattctaagaaaacaaatagaactacagcccgaattatttacagaagagctttttaacgcttgtatccatgaactttatcgtaacaatgaagcacatcgaatggtattaagcagtcgagattttgttcatctgtttgtaaatgacattatattttaccagcgccctctaagaagtcaaaaatccaatattggaagatgttcgttagaatatagagaatataaaacgaaagataaggaagataaagaaatagaagtaaaggaataccttaaagcaatatcaaaatcacatccactttatcaagaatttagactgtggcaatggatgtataatcttaagatttatgaaaaagagaatgacaaagatattactacattatttttgcagtcctctgaagattgggaacgtctttttgaattcctaaatagtaaaaaggaagttaaccataaagatatccttagttttttaataactccaatattaaaatcaaaatatccaaatgcaaaacaagctgcattcaataaagaattagtgaaggaaatctctaagtatcgttggaattatgtatttgatgatacaaaagaaaaggaagatgagaaatctaaaaaatatccatgtaacgaaacaggttggcagattacaagtaggcttgaaaaagttaaagatatacctactaattttttgacaaaagagaaagaaattcaattgtggcatattatatactctgtaacggataaaattgaatttggaaaggcgctaaagacttttgctgaaaaaaattatttagatagcgaatcttttgttgaaaactttgtaaaatttaagccatttgacaacgattatggtgcttattctgaaaaggctattagaaaacttttacctctaatgagattaggaaaatattggaaatgggataatattgatgaaaaaacacaagatagaattagcaaaattataactggagaatatgatgaagaaattaaaaatcgagtacgcgaaaaagcaattcatctaaccgaacaagatcattttaaaggactgcaattatggatagcacaatatattgtttacgatagacattcggaagcagatatagcaggtaagtggagttcattaaatgatttagaagattacttacaagagttcaaacagcattcattacgaaatccaattgttgagcaagtagttaccgaaactttacgtgtagtaagagatatttggaaagaatatggaaacggagccaaagatttctttgatgaaatccatgtcgaactgggtcgtgaaatgaaaaacacagctgatgagcgtaagcgtttaacaacaatcgttacagaaaatgagaataccaatttgcgcatcaaagctatgttggctgagtttattaacgacagcaatatagagaatgttcgtccacactcgcccatgcaaatggaagctttgaaaatttatgaagatggagtgctaaattctggaatagaaattccagatgatattgcaaaaatcagtaaatcggctcaacctacaaaaacagaatttcaacgatacaaactttggctcgaccaaaaatataaatcaccctacacaggtctgattattccacttaataaactatttacagaacaatttcaaatagaacacataattccacaagcaagatactttgatgatagtttctcaaacaaagtaatttgcgagtcagctgtaaactcacttaaagacaaacaattaggatttgaatttataaaaaatcatcaaggagaaacagttgaaactggatttgggaaaacggttactatacttaatgaaacagcttatcaagaatttataaaagagaactacaaaaataacagagtaaagcgtaacaaactcttaatggacgaaattcctgaaaaaatgattgaacgacaactgaacgatactcgatatatcagtaagtttgtttccaatcttctttcaaacattgtccgttcagagcaaaacgatgacggtatcaattctaaaaatgtgttacccggaaatggaaaagttacaaacacattaaaacatgactgggggcttaatgatgtttggaatgatatagtattaccacgttttatacgtatgaatgaattaactcaaactgaacattttacagcaaaaaacagcaatggaaaaatcatacctgccattccttttgaattatctaaagggtttcagaaaaaaagaattgaccaccgccaccacgctctggatgctttagttattgcatgtgccactcgtgaccatatcaatttattaaataatcaatctgccaaatctgatagaagtagatacgatttacaatataagttgagagaaaaagagaattattataatcaaaaagaaggtaaaaccaaagagaaatttacaacgtttattaagccctggaatacctttacgcaagatgctcgaaatgagatagaacaaattgttgttagcttcaagcaaaatctccgtgtaatcaataagaccactaataaatatgaaaagtttgtaaaaaagcatgatagaatggttaaagaaaaagtggctcaaattaaaggtgatagttgggcaatcagaaaacccatgcataaggatacagtttcaggattgattaagctcagaaaaataaaagaagtttcactaagtgtcgcattagataactacaaggaaattgttgaccgcagtttaagaaagcaaatttcacaattggtaacaaataattacgataaaaagaaacttgttaaattctttaaagatgccaagaatcagtggaatggtaaagatgtttcacgtgtcaaaatatattactgggaaaatgacaatgtagcttcaagagtgagtttggacacttccttcaccgaaaaacgaataaaagataccattaccgactcaggcattcagaaaatactattaactcatctggagaactataaaaacaaatttgatgaaaaaggcaagcctgttgcacctgaactcttggcttttacgcctgaaggaattgatgaaatgaacaagaatatcttacaattaaacggtggaaaatttcaccagccaatatataaagttcgtacttacgaacctaagggtaataaatttcaggtgggtcaaagtggtaataaaaaagataaatatgtagaagcggcaaaaggaaccaatcttttctttgctatttatcaggatgaaaatggaaaacgcaattatgaaactgtacctttgaatattgttatagaacgacaaaaacaaggactaagctctgttcctgaaacaaatgaaaaaggagatactctcttatttcatctttcacctaatgatttggtgtatgtaccaacaaatgatgagcttgataatttgggaggaattgattttggaaaattgaataaagaacaaaaaaacacaatttataaagttgtgagctttacaggtggaagattatcagttatacctattaatgttgcaactgcaattgtaaataaagttgagtatactcaattgaataagattgaactaacaaaagaaaaagaaatttgcattaaacttaaagttgaccgtttaggaaatattttaaaagcataaatagtctctgataaatatacgataatttagatataagtttttcggcaattgtggattaaaatgctaatacgatgttgaaattcagcacctattaccatatttacaaccatgctaatggttttgaaaatattttccgcgaggaggaaaactatcatttctttcttgataaaatgcagttgcatatagagccggtggttgaagtaattgcctggtgcctgatgccgaaccactttcatttcatagtaaaagtcaggagcgaagcggaaataatcgaaaattattcatcgtcgtcgagtctaagttttcaaaagtttcgaactttagaaaacttagataatatcgacggcgatgaaaaaataaaagaagaaaaatataaatttatcagcaagcagttttctaatttcttcagcagctatacgctggcttttaataagatgtataaaagacggggttcgttatttattaaaacttttaaacgaaaggagattgattcaaaaacctacttgcgaaaccttatactatacgtgcatctgaatccagtaaatcatggttttaccagtttgcataccgattgggaatggaatagttttgagatctttccggttcatcaggaagaaagaatgaaaatgctgtttgcggactatgaatcatacagaaaagcgcatgtcagtcaactaaaaaacatgtatgattttgatagtgatttagattaattcaaaaccaaaaaccactttgcatgattaaaagaacaatttactttgaaaatcccgcctatcttagcctgaaagacagtcagttagccatcagactgcctgaggtggaaaaaagtaatgtgccagggtcatttaaagatgcatccgtacatactatcccgattgaagatataggagttttgatactggataacaaacagataaccataacacagggattgcttgaagccttattgaaaaacaatgtggcagtgattacctgcgggagtaatcacatgcctttaggattgtatcttcctttggaagggaatactacgcaaagcgagcgcactcaggcacaggttgatgcttcacttccgttgaaaaaacagttgtggcagcagaccgttgaggcaaaaattgaaaatcaggcttatgttcttcacaattgcagaaatgaaacggtaaaaaacatgctgatttggtcaaagcaggtgaaaagcggcgacagtgagaatctggagggtagggcagcagcctattactgggcaaatctgtttcgtgaaattaagggtttccgccgtggcagagaagggattccgccaaacaatctgctcaactacggctatgctgtattgcgcgctgtcattgcccgctcgttggttggcagcggattgtttcctgctttgggaattcatcaccataaccgctataatgctttttgtcttgccgatgatgtgatggaaccttaccgaccgtttgttgataaactggttgttgaaatagtggatagcggctgtgattatgaaaacattacaaaagaaataaaaataaagttgttgaaaattccggtgatggatgtagttataaacggaaaccggagtccgttgatgctggcagcgaggcaaacatcggcatcattggcacgctgctatttaggtgaaatcaggaaaattgcctatcctgtgtttacggcttaaaattctgtttttttatggaacgttttagtgaataccgaattatgtgggtaatggttttctttgatcttccgactgaaacaaaaaaggaacggaaagtatattcaacttttcgaaaaaagctgcttaatgacggatttaccatgtttcagttttccatctatctgaggcattgcgccagtcgcgaaaatgccgatgtgcacgtaaagcgggtaaaacagatgctccccgaagcgggacatatcggtattttatgcataaccgataaacaatttgggaaaatggagatttttcatggaaaaaaatctgaaccagtgacaactccttatcagcaattagaacttttttgaaaagcaaaatcctgct

SEQ ID NO: 1335 - DNA, 16605 bp, synthetic construct
  variation 80..81: note = n is a, c, g, or t
  variation 562..563: note = n is a, c, g, or t
  source 1..16605: mol_type = other DNA
  misc_feature 1..16605: note = Synthetic
  variation 16034..16072: note = n is a, c, g, or t
ttcgccattacccaattcgttaacttttttaatgaattcccacggaaaagtgtcttccattccgaataaaattcctactnnttatccgaaaaatcgtcctataaacatcgggaacaccattctccaaagcggccaatcgtgggaaatccacttctgctcgtcgtaccaatgattgattccttttgaggctaaaattgctgccatttcacgggtttggttcaaacagatatcttggtcggaagtgctcaaaacaatgtgcatgtgcttgtatttccaagcttcgtcatttcttacaaattctcttggacaattaaaataaacaagctcattgctgaaaccatccataaaattcctgattgaaaaagcgcccgaaagacagaacatgtgagaaaccacgtcaggaaaacggaatgcgaaatttgctgcatgataacccccaaaactcgctcctgcaaccgcaactcgatgttccgaatgtaatttttgtagatacggaataaattcctgaatcaaaaactgcacatagagttcgtaatttctaattctttgttcaggactgatnntaattgatgctttcattcaatttgaagtcgtggttttgggtgtactgtccctgcgaagttggaaacatcacaatcggatagccgtaatgtccggtaacttccacttgcaggctcattcccaacaggtgcgaataatagtcggtgtgctcaattcgtggcataaatattttttgtttaaagtttaaagttattgaatattgttaaagtaatttcagtttgtaagccattagtttattgctcattactcattacccattacttatttttacgccgacggtttcgatttaggtggaatgatgtttagaaaatggtcgttgattttttctgcggcatcatccaaaagttgttgaattctttccttgctgtcggatttatacacgattccaacatgataatcgagcggaagaaatctaaccacttcctcgcagttgaattcttcgtaatcaggatgttggtctttcgccaaggcaatgattaaacctgaagaaaatcctgtaggttttgcgatttcgtattttaggtctttcagtagtgcattctcgattcttgcccattcgtgccaaagattgattccgcttgaagcttccaccaaatcgggaatgtgagcgccaccaactcttgaggaagtctctaggaaataccattttccatcctcttttcctctgataaattcagtgtgcgttgctccattcaccaaaccgaaattggttaaaacttttgcatttgcttcctctaaagccttgaattcatcggaatatcttcccaaagttttcgtacggaaaatccctccttcatgtgaaacctgcattggtggagaaagatattgcgatgcggaagtaaagacaatctccttattgtaaaccaagctgtctacgtggaaaacgtcgcctggtttgaagctttccaacaaaaatttatagcgttcttcgcctgttttttcaagggcttcccaaaggtcgtctttggagttgagtttgatgattcctgctgcagatgcttcggaacgaggctttaaaacccaaggtgcaggaactttatcggtaaatttatttaaaatttcatcgttgaacacggaagagaattcaggaacatcaattccagaatctttcgccatttgacgcatcgccaatttatcacggaaataccggtgcgtagtttgtcccatccccggaattcggaaagtttcacgaataagcgcggctttctcgacatcgtaatcgtccaaagcaatgacagcgtcaacttgccgggttttcatcagatgcgaaaatccctgcaccaaatggtcgagattccatacggaaggttctacttcctgcatgtaaaaaacttcgtcaatcgcgtgccacggccaatttttttccttaatgttttccgaggtgatgaggatgactttattgccgagtttcttcatctcgtccataaaatcatatcctttatagtagcatgaaatgcagacaatcgttttctccttcatataatgttttttgaaaattaatgaattatcaaaaaaataaacacatttttaataaataatcaatacgaaaatttaataaatggttcagatttgaaaatctactttcaattatagggagaattttttgattgtactaattttttattgaaaattttccaaaaaattaatgagaagttgaacgccgtatcctgtagcgcctttttccttcatatactgaacgtttccgaacgcaactcccgcaatatcgaggtgcgcccaattcggatggtcttcaataaactgttccaaaaactttcctgctacaatgcaatctccgaaaggttttgacgatatatttttgaaatccgcaacatctgatttgaagtcgtctttccaaacctcccaaagcggaaggttccaaagtcgttgattcgttttatccgcagaaacttcgagtgattttttaaggacctcattattggaaaaataagcgccacaagtataaccgaacattcgcaccgaacttcccgtcaaagtcgccaaatcaatgagcgcatcagttctgtaattttttgcaagataggagagtccgtctgcaagtgtcattctgccttctgcgtcggtgttgagaatttcgatcgttttgccgttgtaggcggtaataacgtcgcttggaatataggcattgttggaaaccgcattatcggtaatcggtaaaatagcagtgatgttgacgggaagtttcatttcagcagctgcgattaaagttccgataacggcagttgcgccgcccatgtcggatttcatgtaatgcagattatcggaaggtttaatggaaattccgcccgtgtcaaataatacacattttcctaccaaaccgactgttttagcattttttacgcctgaatgatactccaaaatagtgaatgccgcttcctgtgaacttccctgattgactgccaggaatgcgcccaatcccaattcttcacattttttacgctcgaaaacagtgagtctgaatttatattttttggaaatttcttttaagaattctgaaatatgtggaacccgtttgtagttctgcggtttgttcaaccattccatacaggcgaattgtccttcgcaaatggctaaagttttgagctctatttcctttaattctttttcggaaactttatttaaaaccaaattaaaacctttcataaagaaaggatgttcttctttaaatggatattcataagttcctaaaaataaaccttttaccaattctaaaatttgtgctgcatcaaagttttccgcattgatttctgtgttttcagattgaatcttttttctgaagtcgtaagaaaattttgaagcaactgactgcagttcaaagttctcgggcttttcgcccaaaccgataaggaagtttatggaatcattttctacagaaataaaggtttcattcttttttcctgaaaacagggaatcgatgttgttcccgtgattctttttgtcttttttccaaagttcttcagtgtagaatgagaatttttggttgatagtttttggggctttagcggtaaggtttattttcattatttttttacattatttgatgtcgccacttcgtggcttttttgatatattttgtcttaaagttcaaagggcttcaccctttgctattttatttcgccacttcgtggctcggttcttaaattatctatttcttttattttaagtcatttacgagattagaactttgttttgccttgataagcgaagcgccttggtttggcttaaaagcaacattatcttgtaaggttctttgtttatcgttgcgatatttaatgagaaagataaacacgcaaagcaaaacaaggatttattaccttaaaacttctaattttttaagctagaaaaatccgctaacacatattttcaataaacaaagatttaaaatgctatataaatttattgtcaagattgagtgaattcattccaaaaaattcactgaaaagcaaattgaccgacgaagtctattcaaccgcatctccttcttgctcataaatcaaatccaaaaactgctgctcatccaaaatctcaatcgttccaatttcctgcgcttttttcagtttgctacccgctttctcgcccaccaccaaataattgaggtttttagaaactgccgaaatattttttccgccgtgtttttctaccatttcttccgccgtttcccttgtgaaaagggaaagtttccccgtgaaaagaaatgttttgccttccaaaacgttgcttaaaacttcattcgtactttctcctttttctaattgaactccgtaagatttcaaacgttcaatcatcaactgattttccgaattttcaaagaatgctacaatactttccgcaatttttccgccgatgtcttctacttgggtgagttcttccacagtggcattttttaacgcgtcaatggattcaaaatttttggctaatttcttggcaacagtttctccgacatgtttgatgccgatcccgaacaatactttttcaaaaggaacttcttttgacttttcaattccgtcaataatattctgtgccgatttttctgccattctttctaaaggcagcagttgctctttcttcaaagcatagaaatctgccggattttctaccagtttttcgcgatacaattgttcgatcgtttcgctaccaagattttcaatatttaaagcttttctcgatacataatgtatcattcgaccgacaacctgtggcggacaatgcaactcgttcggacaaaaatgtatcgcttgatcttcaattttcaccagttcagttccacattcagggcaagttttgatgtattgaatttccggattttcaggatctcttttctctaaattaacgccgacaatctttggaataatctcaccgcctttttccacaaatacaaaatcatgttcgtgcagacccaattttttgatgatgtcttcgttgtgcaaactcgcccttttcaccacagttcctgccaataaaacaggtttcagattggcgaccggagttattgcgccggttcttccaacttggtaagttactttctgtaattcagtttcgactttttcagctttgaatttatacgccatcgcccaacgtggagatttcgccgtgtagcccaattgctgttgctgtttgatggaatttacctttaaaacaattccgtcaatttcaaaaggaagttggtgtcgtttttcatcccaaaagctaatgaattctttcacttcatccatgttcgaacacaattttgcttgttccgaaattttgaagccccaactttttgctttgtgaataagttcccaatgagtcgctgcgggaacttcattcgaaataaactgatacaaaaccgctgaaagtccacgttttcgtacttcgcccgaatcttgaattttcaaacttccggatgcggtatttcttggattcatgaaaaggtctaaaccttcttctgcacggcgttcattgattttatcaaagtttcttctcgttagataaatttcaccccgaatataaaagttttcaggaaaatcaccgtgaagtttcatcggaatatccgaaatcgttcttacgtttgcagtaatttcgtcaccttgaaaaccgtcgccacgagttacggcttctatcaactgaccgttttcataaaggatggaaatcgaggcaccgtcatacttcaattcggcaacaaattctacctgttcgtttagagttttttcaattcgtttttcccaatcttccaaatcatcaaaatcgtaggagttatccaaagaatacatcctaaactgatgttgaacggtcgggaaattctttgtgatttcaccaccaacacgcaaagtaggagagttgctgtcgtaaaattcaggatgttttgcttccaattcctgaagttctttgagcttcaaatcgaattcaaaatctgaaattgtaggttcatctaaggtgtaataattatagttatgttgatgaagttctgcgcgcagatcttctatttttttttgaatattttccgacattttgaaggtagatttatacaaaaatactaattctatagaaaccacaacttcaataggttattttaaataaaaacatttaaaattaaatttactcctaatttttataagggttgtctttataaattgtattaattttaaaaataaatactaatttagcaggggtaaaaataaaaaactatgaaaattgagaaaagatggattgcttcttttgttgtaattacaatgatttcaatcgcggcattattctggaaaactgaaattcctgtcccaaacttcggcgaattcctcagcgaagaccaaattgtaggtgctgatgttgcctggattttagccgcagctggtttggttttgttgatgactcccggcctttcgtttttctatggcggaatggtcggtagcaaaaacgtgatttccacgatgttgcagagttttattgcactgggtgtaatttccattctttgggtggttgttggtttcagtctttcctttggtgaaagtttgggtttcactcacaatggcattcattacggaatcatcggtaatccattgagttacccttttttctctggggtaggtacacttccgcatcatctaatggcgcccacaattccttttattttgttcgcattgtttcaaatgaaatttgcggtaattacgccggctttaatcactggttcgtttgctgaaagggttcgttttatttcctatctattatttatggtgctcttcagtttgtttatatatacgccactttgccacatggtttggcatccggaaggtttgctgaataaatttttcggagtaaaagatttcgccggaggaaccgtagttcacatgagtgcaggtttcgcagcacttgccggagcaattgttttgggacgaagaaaaaatccacatcatcaaccttcgaatattccatttgttttattaggaaccggaatgctttggtttgggtggtttggtttcaatgctggttctgctttagcggctaatgcaactgctgcgatggcttttggtaccaccaccatagcatcggcttccgcaatgatcacctggatattttttgatcgaattaatggaagaaaagtctctgccttaggcgcttccattggtgcggttgtcggcttggtagcaattaccccagctgcgggatttgtaacaattgctgaaagtctgttcatcgggtttatctctgcaattgtttctaattcaatgatgcactggaaaaaactcaaaaaaatagacgacactttggatgttttcgcttgccatggagtaggaggaattatgggaatgattcttaccgcaatttttgcgcatggcgaaaatgcaagtttgttgcatggcggctggtcggtttttgggcatcacatgctggctttggttctggtttcggcgtttacattttttggagctttattactctacaaaatcactgatttcatcattccactaagggtttcggaagaatcagagcagctcggtcttgatctttctcagcacgatgaatccattggtttttaattttaatgaaaaaagcaccgtttcaatctcggtgcttttagctttttactgacttaacatttcctttattttctcagaaaccttttccgcattcggcaacatctctttttccaacaccaagttaattggaactgcaggtaaatttaaagaacccgcggcttcaaccggcgcatctaaaaatctgaaacaattcttagaaattctatgagcaaaagcttcggcgaaggaattattaatctgttcttccgttaacaccaaacattttccatgaattttaaccctttcaaaaaccaattcttcatcaagcggaatcaacgtccgcaagtcgatcacttcaactcttcccgggaatttcttggcggcttcttttgcccagtaaacgcccattccgtaagttacgatgagcatggttctgcctttttcagtttcagccggatcagcgtctaaaattatttttccttttcctaatggtaaaatataatcttccgcaggttcaatggttttggcttcttcagttccgggaactttgctccagtacaatcctttgtgttccaacatgatgactggatttgggtcgtaataagctgcctttaataaacctttaaagtctgcggcgttacttggataggcgattttaattcctttgatatttgccaaaatactttccacgcttccgctgtgataaggaccgcctcctccgtaagctcccgtaggaacacgaatgatggtactcaccggaaattttccctgacttaaataacaggattttgaaatttctgtgattaactggttaattcccggataaatatagtcggcaaactgtacctcaacaatgggttttaaacctaccgcactcattcctgctgtggaaccaataatgtacgcttcctgaatgggggtattgaaaactctcttgcttccaaacttttgtcctaaagtcaccgtttccctgaaaacgccgccaattctttcgccgacatcctgcccataaagcaacgcttccggatgtttccacatcaattcctggatggcgtgaatggctgcatctaccatcacgattttttcctgatttttaggagttcgttccccaacttcctcggtgattggagtaggggcgaagacgtgctcttgcacagtttgaggagttggatcttctgccataattgctttttggaaagcctgttctgcttccagtcttgcctttttttcaatttgttttaaaagatcttcgtcaacaccatcttcaagcagtctttttcttaaaatatttccggggtcttttgctcggtgcttttctaaatcttcctcatcgcggtaaaattctctccgaactccggaagtatggtggccaattaaaacggttttcgcacaaaccaccattggttttcgttctttgcgaacaaaatctacggcttctttcatggcttcaaaactttccacgaaatcggttccatcgattctcattctgtttaaacccgtaaatcctgccacgaaatcgtaagcatcggctgttctggcttcctctttggttacggagattccccattcattgtcctgaaccaaaaaaataatgggcaactgatgaagtgcggcaaactgaaaagcttccgaaacttcaccttccgtgaccgaattatcgcctaagctgcaaacaacaacggggtttttatggtaatgttttaagttgaattcctgtatgtatctaattccctgtgcaataccggtggttggaatggtctgcattccggtagctgaactttgatgaataattttcggcatatcctcttccaaacttgaaggatgcgaataataggaacgtccaccagaaaaaggatcgtctgctttcgccaaaagttgcagcatcaaacgataaggctcgaaaccgattcccaacaacaaactttcatcgcgatagtatggcgaaacccagtcttccttggtcagctgataagccgtcgccaactgaatcgcttcatgcccgcgcgaagtggagtgcacgtatttgcaaatatttcggttttcctcgtaaatgtctgccattgctttggcgagcatcatgtggttaaaagcctttaataaaatttcctctgaaacgttctgttgcgtatctaattccatagctaacaaatataataattttttgttgatgttgctttttggggaagatgggttgattatcgtagggtttgtagtagggttgaatttgcaaaaagatctttatcgctaattcgaatatgctatgcaaataaaaaagccccgaagatagtcgaggcgctaaatgttttcacaacggaataatccttattgtgaattgctttcaaaattattgagacaaatataaaatatttttcctaaaattttactaatcgggagattttttttatcttaaacgttctaaatttatttgaaaaatgataattatgaaaaaaacaatactcggcttagatctcggcacaaattcaatcggttggtctctaatcaatcaaaattttgcagaaaaacaaggcgaaatcctaggattgggaagcaggattattccgatgacgcaagatgttttagataattttggttcaggaaaaccctctacaacttctaccgcagacagaacatgttacagaagtgtgagaagacttcgtgagagaaatcttttgcgcagggaacgacttcacagagtgttgaatattttggattttatgccaaaacactattccaataatatagattttgaaaacaggttaggaaaatttctgcctaaaactgaaacaaaattggtttataatgaagacaatcagtttattttcaaaaaatcttttgaggaaatgttagaagaatttagaagtaaacatcccgaattgctttcagacggaaagaaaattccttacgattggacgatttattatttgagaaaaaaatcgctttcacaaaaaattgagaaagaagaattggcttggattattttgaattttaatcaaaaacgtggttactatcaacttcgtggcgaggaagaagaagaaaatccgaataaattggttgagttttattcgctgaaagttaccgatgtaattgctgacgaagcaagaaaaggaaacgataaaatttggtacagcatagttttagaaaatgggtgggtttaccgaagagaaagcaaatatccactatttgattggaaggataaagttcgggattttattgtaaccaccgatttaaacgaagatggaaccataaaaacagataaagacggtaaagaaaaaagaagtttccgtgcaccaagcgaagatgattggactttgctgaaaaagaaaaccgaaaaagaaattgacaattcacaaaaaaccgttggagaatatatctacaacgcacttcttaaaaatccttcgcaaaaaattaaaggaaagttagtaagaacaattgagcggaaattctacaaagaagaattggtgaaaattctcaaaaaacagactggatttcataaagaattgcaagacgagaaacttctaaatacttgtatagaagaactctatccaagaaacgaagaaaggcaaaaactgttgaaaaccaaagactttgtctatctttttgttgaagatatcttgttttatcaaagaccattaaagagccaaaagcacaacatcggaaagtgttcgttggaaagcagaaaattcaaaaaaaatggagtagaaactacagaatttctgaaaacaatttcccgttctcataccttgtttcaggagtttagaatttggcaatggatgcagaacttaaagatttacgaaaaactttcagacgaaaatgtaaccgataaatttctttcaaacgaagaagattttgcaaacctttttgaatttctttggaaccgaaaagaagtggaccataaagcacttttggaatatgtagttaaaagaaaatatgaggacttaaaaccaaagcaagttacagccaaagcaaaggaatttcgttggaattatgtgtatgatgatgtaaaagatgagtccaaaaattatcctgttggtgaaactttttctatgattaaaagctgtttggaaaaaatagaaaatctacctaaaaactttctgtcacaagaaattttagagaaaatttggcacatcatctattcggttaccgataagattgaatatgaaaaagcattaagaacttttgccaaaaaaaatcatttggacgaagaacaatttgtagaaaatttcaaaaaatttccaccgtttaaaagcgattatgcatcgctttctctaaaagccatcaaaaaattattgcctttgatgcgaatgggaaagttttgggacgcttctactattgatgaagaaacaaaacgcagattaaattccataaaagaacggcttgaaagcattgattttgatgagaaaaaattagatgaaatatcagacgacgacattctaaaacctgttctcaaaagtttttcaaaatttaaaaatcgcagtttagagaaaggattaaatacttatcaggcaagttacgcagtttataataaacattctgaaggcagttccacaaaatggaattcggtaaaagatttagaaaagtatttagaagatttcaagcaacattctttgcgaaaccctattgtagagcagttgattacagaaacgcttcgtgtggtccgcgatatttggcaggaatacggaaatggagagaaagattttttcaaagaaattcatattgaattgggaagagatttgaaaaacaattcggatgaacgaaaaagaattaccgagtttcaaaccaaaaacgaaaataccaatctcagaattaaacttttattgacggaattactgaatgcaggagtagaaaatgttcgtccgttttcgccgatgcagcaggagattttgaagatttatgaagaaaattccattcagaatattgccgatgaagattttgataatgaaaatttgaaatctgaaaatatcacttttgatgaaatcatcaaaatttccacgatgcagcaaccaacaagttcgcaacttcagcgctataaactttggttggaacaaaagtataaatcaccttatacagggcaagttattccattaaataaactttttacaagcgaatacgaaatagaacacgtaataccacaaaccaaattttttgatgacagttttaccaataaaattatttgtgaaagtgccgtcaacaaaagaaaagacaaacaattaggtttggaatttattaaaaattgtggcggagaaatcatagaattaggtttaggaaaaaaagtaaccattttatttgaggaacagtacaaggattttatcaatactcattattctaaaaacaaagcaaagagaaataaacttcttttggaagaaattcccgagaaaatgattgaaagacaactgaacgacacccgtcatatcagcaaacttgtgatgaatttgctgtccaacattgtgcgaagcgaagacggaaaagatgacggagttaattccaaaaatgtactgtcgctttcaggaaaaatcacttcagaacttaaacatgattggggattgaatgacatttggaacgagttgattttaccaagatttgaacgtttgaatactttgacaaactctaatgattatactgcgttcaacgagaagcatcaaaaagatttgccgactgttccgcttcatttagaaaaaggttttcagaaaaagaggatagaccatcgtcatcacgctttagatgctttagtaattgcctgttctacaagaaaccacatcaattatctcaacaatcaaaacgctttggatagcaattataaaaagaaatttttaaccaaggaagaatacagagaacgatttcaaaaagcaagagaagatttgcgcagagatttatgcgacaaaaaagtagatgttgaaaatctaaaaaattaccaatggattttcaaaaaaccttggcaaaactttactaaacaggcgaaagataatttagaaaccactgtggtaagtttcaaacaaaaccaaagagtgatcaacaaaaccgtaaattattatgaaaaatataatgatgaaggtaaaaaagtgatggtgaaacagacgaaaggtgataattgggcaattagaaaacctctgcacaaagaaacggtttccgcaaaagtggatttgccaagaataaaggttccgaagggaaaaattttaacggcttcaagaaaaagtttagatacttcctttaaccttaaaaatattgaaagcatcaccgatactggaattcagaaaattctgagaaattatttgaaagaaaaggaaaatcctgaattggcatttttagctgaaggtattgaggaactgaacgaaaacattgcaaaatataatgatggcgttccgcacaaacatatctataaagttagagtttttgaaacaggaagcaaatttccactcggagaaactgggaataagaaagataaatatgtggaatccgcaaaaggaaccaatctgtttttcgccatttatcaggatgaaaaaggtaaaagaaattttgaaacaattgcttttaatatcgttttagaaagattaaagcaaggattaaaggcggttcccgaaactgacgagaaaggaaaccgactcttattttcgctttctcctcaagatttggtttttgttccaacggaagaagaaatcgcaaatcctaatttggtagattttgaaaacttagataaaaatcaagtgaatagggtttataaaatggttagtacaacacaaaataaacttgaatgtgttcctatgagttactctaaatcaattttagaaaatgagatgggaagcaataataaaaatgaaagaattcaaaatttttatgacggtaaaactatttttgatgaaaagcaaaatccgatacaaattaaatctgtgtgttggaaattagaagccaaccgcctcgggaaaattataaaagttataaaataaaatgttcttccgctccatctacatcggcaatccatcttatctgaaacttaaagataatcagatgaaaatcctgtgccccgaaactaaaacagaaaagggaagtgtcaccgtggaagatttgggacttttgatgctggataatttccaaatcacaatttctcatcaactcatccaaagattaatgggaaataatgtagtgataataagttgtgatgcacatcatttacctcatggaataatgcttccgcttcatggtcacaccgaacattctgatcgcataaaagaccaaatggcagcgagtgagccactaaaaaaacaactctggaaacaaaccattgaatgcaaaattgaaaaccaaaccgaagttttgaaaagattgggaaattattttgaaccaatgattgagtataaaaacaatgtaaaaagcggcgacatcacaaatatggagggaattgccgcgcagcattattggaaatacctcatcaatcccgactttttgcggggaaggtttggcgattctcctaaccagtttttcaatttcggatattccgttttgaggagtgttgtagcaagggcgattgttgaaacaggtttgcttcctgtattgggcatttttcacaaaaataaattcaatccctattgtttggcagatgatgtgatggaaccttaccgtccttttgtggattttttggtgatggattggctgaaagtatatccaaattccgaagctttaaccaaagaatttaaagcttatatgttgaatattgctacgaaagatgtaaaaattgacggactaaaacgaccacttatagtcgctgtgaaaatgacgacttcttctctatacaaatgttatacaggagaaaagagattgatttcttatccagaatttatataaattccgaattcaagatttaaaaattcaaaatttttaattagaaatattgaatattgaataatgaatagcgaaagatttaacgcataccgaattatgtgggttttagtgctttacgatttacctacggaaaccaaagccaatataagggatgccaatctcttcaggaaaaggttattggatgacggatttgcgctttttcaattctccatgtatgttcggcactgtccaagtcgcgaaaatgcagaagtccacatcaaaagagtaaaagcaatgcttccaaaagccggaaaagtagcaataatgagcattaccgataaacaatttggcgaaatagaaattttctttgccagaaacaaagaagaaccacctccaacctatcaacaacttgaattattctgatttttacaattctaatcaacctctaaatccactgattttcagtggattattagttgaggttgtgtcgtgtcacgaagataataatttttgaaagcaattcacaacaatattgagaaaacgtggcaaaatggacacgttgtgtcgtgtcacgaagataataatttttgaaagcaattcacaactaaagtttttgtacattgtataaattgttagttgtgtcgtgtcacgaagatnnnnnnnnnnnnnnnnnnnnnnnnnnnnnnnnnnnnnnntttttgaaagcaattcacaaccttctgcaattctttcatactcagctttcggttgtgtcgtgtcacgaagataataatttttgaaagcaattcacaacgctttatttaatgcggttttacggctgtttgttgtgtcgtgtcacgaagataataatttttgaaagcaattcacaacgaaaacgcaaccaatcctcattgctcatacgttgtgtcgtgtcacgaagataataatttttgaaagcaattcacaacataaaacaatattctaaactgaatatcagggttgtgtcgtgtcacgaagataataatttttgaaagcaattcacaactttaaacttataaaaattcaaaaaaaatgggttgtgtcgtgtcacgaagataataatttttgaaagcaattcacaacatgttggggttggggaagttggggttccgggttgtgtcgtgtcacgaagataataatttttgaaagcaattcacaacggattttgaagtaaatatttttttatttcagttgtgtcgtgtcacgaaga

SEQ ID NO: 1336 - DNA, 16584 bp, synthetic construct
  misc_feature 1..16584: note = Synthetic
  source 1..16584: mol_type = other DNA
ttgtagtttaagtctaaaataaacagcgatacaatagtactaatgaaaataagaaataatgttccccagtaaatcattcggtcttcatttacaaggttttgctctttaaaaattattggtagcaaaccaaaaagtaaaccaactccaagtccactgtacaatgtaattttcttattgttaaaaacaagacttataaaaataagattgataaatacaagatttaaggttttaaaatcacctgtaagagcacctaaaagcattataagcgtaaaggttgataatattacgaaagttacagagtttttcttaaaatctgccattttattctttttcttttatcattcaattttgcaataaataaatcatttccaactatcactatatttcttttttataaaataaaattagtcaatattttgttttttatcttgagaaaataataataaatatcaaagcagaaactaaaatcattaacaataaatttgtaataatacggcggtgaaacagaggttttataccattctcaagcatattttcggtagtaaacaaaattaatcctttttgtttttttaattcacccattacactattgcactcgtcaatacacgatgtacacattatacattcgcgttgtattccgtttcgtatgtctatagccattgggcatacttttatacatcttaaacaatcagtacattcaccaattttaattttagtttggtcattttccaaaactccccttggttcgcctcttttgtaatcgtaagctataagcaaagtatctttgtcaaataacacattttgcaaacggctgtacggacaaaaatttatacaagctttttgtcttaaaaatgcaaaaatgcagtaaatgataattgaaaaaattattacacccgaaagccctgtgatatggttttgtattgaaccatttataataataactaattctctgaaaccaattatatacgacaaaataatgttggcaatgataaatgataagatataaaaaactatttgttttaatattttcaaagttttttcaaccaattgaggactatactttttgttttcatctttttttctatcaaacaaatactctatttttctgaaaagcatttccatcagtaccgtttgcgggcaaaaccatccacagaaaacccttccaaaaaccgttgtaaacaatagtataaacgcagcaaagagtattaatatcaaaccaaaataataaaactcaccaggctcaaatacttgtccgtaaattatgaattctgatttaaaaaaattgagtaaaataaatggctttcccttgtaataaacaaagggtaaacatgcaaaaattaaaaaaaataaaaggcttacccaagttcttaatttgtataatttaccatcaggtttttcaacacacagtttgcctttttctatattagtttcaaaaatgttatttttaaaaaacagcaaatactttttgagtgaaataccatgtttacctgaaactatgcccatttaaaaacttgtaattttctttaatttttaaagaagctaattaacagtaaaaaaatgaaaacttatgaataattaattaccactttcaagatcttttttcctattcaaaagtagctttgcttgcgaaatgagaaacaaaattataattatttcgagtacaataaggcttaaaataagataaaacaaaaaatttggtaaacctgcaattgttccatcattaggcgatgcttgcaaactatctgcttgtgctgaaacgctatatgaaacaaagtttattgtaagtaataatatcaaacttgtaattttgctttttcccgaactttttctttgctcatttttccaattatctacaaatacatcggttgattttcttatatgtcgtattaataaccatattattacaagcaataatagcaatactcctattagaatgtatccacccaccaatcccgaaatactaaggtttatatttgctaaatttgagttttttgaaaacaataaaaatggcattaatataattaatgttgtaatgaaaattcttatatctgttcttctgaaaatcaaattatttgaatttgaaacttattccaagaagcaaaagtattgtcatacaaatttttaataaatgatgttagtcagaaagtttaatgatattggtcaatagcatgaatagcaccttgagcaaaaaaaattaattaaggcacaaaacttcaacacattttttattgttaaaaacatcaataaatgtgcttatttcgttttggttacggtctaaaattataagagagctatcggtatttgtagctttttgagtaaaagcttttatcatatcatcttcaccatttaaagatgaaagtgtataatttataccggaattttcaagtgttgactgtatttttgatattaattctttagttgcaaagccagaagtagaatcggtaaaattaaaatgaattgatgaattaaatttcttagcaatatcaataattattgggtttaccggattgtcgaacaactcgtcaatataaatatagatatttttgaaattgcaaatttcagaacccttttgcacaacccaaacaggtacatcaaccatgtttattgtttttgccaaaaaactacctgtaatatgctgcacaccatgcacgccgtgagttcctataaataaaatatctgatgatgtttcttcaacagcatttttcatagtatcaaaaagttcaccttcttttgtaagataacttatttttattgatttatttttttcaatttcggataccatttgctcaagtcggtttttaatttcgcgatttaaaaaacctgaacctataattttttttgcacttttatcaatttccgaaacttcaaaaatatgtagcaatacaatttctgaatttgttaaagttgcaagatttacagcactcatcagtgctttatcagatgcttcggaaaaatcggttgctacaagaaatcgcattttttttattgattaattttcaaaaataagacatgaaatttaatgttttaaattttaccttaaaaaacttcatatttattatttgatttatctttgccatttaaaaaaatggaaaataataagggagtggtttttgttacccgaaaactgcattttaatgctgctcacaggctttataacgacaactggagccaagataaaaactatgaaatatatggcaaatgctctaataaaaactggcatgggcataattttgatttatttgtaactgtaaaaggaataccaaacccagaaactggttttgttataaattttacagagttaaaagacattgtgaatgatttgatagttgaaaaattagaccatcttaatctaaacttggatgttgaatttatgcaaggtaaaattacaacaatagaaaaccttgtggttgcaatatggaatgagcttttgcctcatataaaaggtgttgaattacattgcatcaaaatttttgaaaccgaaaggcagtttgtagaatactacggttagctttctattattttacaatagtcaaagccatattttcttcaattatttcattgttgaaacctgttagtgttattttacatgggtaagttcccatttcaattgttctgccgtcagacattgtaccattccatgatttatatggtcctttgtattgatatattttttgatacagcctgttataaactacaatttctatttctttaaaaattctgccttttatgtcgaattcatcatttattccatctccattgggcgaaaatgcatttggtaaataccattcacattcatctccaaaaattgaaatttttacagaatctttcaaggttttgcagcggtgatttacgtttacagcatacattcctgttttgtttacttttattgtaggtgtattttcgcctgtattccagctatacgagttggtattagtttgagtggcatcaatggttatctctttatcttcgcaatatctctgctctgtacccaaatcaataacgggtgcttctataacaaatgttgattgagaacttgaatctttacaaccatctttttctattaaatatttgaaattataatttccaatagttaaaaatttgaatgtagggctaaggggcaaaaaatttaaaaaccaagtacctccgttagtaaagggctgaagcaatggactttcgccaatgcaatacaaactatttaaccctgtaaacgatgaatttggaattgattttactttaaattctttttctgtttcagtatagcaacccttgtcgttttttgtttcaagttttattttatataatcctattgcgggtttttgtattgttatattctttttgctgtcaaaaaaacttccattgacaaaccatttgtacgaaagcacattgccttgagggtcggtgctgttgttaatagtatttaagttcaaaccaaaacatacatcttctgatgtaaattctgaagttggcaatgaaaatacgtttaagttaaaatttgatgttcctatacaaccgcgttggtctgaaacctttagttttacggtgtaatttccatgcgttccgtaatgcttatcaggttcaaaatcaacagatgttgaaccatcgccaaaattccattcgtatttttttatacttccatttgtaatatagctattatttacaaacttttgagatatattttcacaaacatcatgtgccgtaaattgtgcaaccggattaggatgtaccgtaatttgttttgtgatgttgctaatacatttcatactcaccacttttagcgatacctgataagttccggcagtggtaaaagcatactttacggtatctttatcacttggtttataaatgccgaaattccattcaaaataattcaaagtatcattcgattttgttcttataaatcgtgtttctacccccgtacaaatgctgtcataagtaaaatcagcaaatggttctttaaatattgtaaggtttttaattactgtatcattacaagtattgtaatgtgcatcaagtattagttttattttgtaattgccaaaactattgaaagatttcatagctttttcgccagtagctttgtcgccttcggctaaatcccaatttaaggtgtattttaagttatttgtatccggtaaatttattgatgaaaaagctatattttgcttagggcaagcgtttttaaatccaaaatcaattttaggcgattctaatatttcaatttgttttgtcacttcattaagacagcccctgtcatcagttgccacaagccttatattataaacactcggtgacgaaaatactatatttacaactgaatctgaactgcttaaactcaatggattcgaatcccatttcaatgtgatttttcttttgagttttgaatacgccaacgaagtaaaagtaaatttatttctgtctaaacattgcacatcagggttttcaattttaaaatcaacaataggtttttgcgagattgtaattatagttgtatcgtagtagtatttaaaacaatactctgttctaagtatgactttataaatattataacccttgaaagtatgagttgggttgttttgagtagaactatcgccatcgccaaatgtccagcgatattttattgcttgataattgtatggatttgtaaaattgagagtaattacactatcagtactgcaatatctgtcattatatggttttatagttgtaccttttggtttacctgcgggagttgtgtaacctctgcccactcctactgcctgccaggcattggttacagcttctatttcacgagtacattgaccaaatatatcttcggccgcttttattgcataaaatcttgcatcattaaattttgaatttgttgttaaataatatgtattgtttctataagcaacttttgccgcatttacaaatccgatgctatcaacattgtaagtcatatttgaatcatttgtaccggagccgcctttgcataagagataaaaccaaaaattttgaacactgctgttgtaatgaacaatatcaccggcattccaatatttgccaccataggtatcgggacaaccaaattcgtttgggtttgacatatttctaaaacccttgttagaccccgctccaaatctcccaatataccatgtaaattttgaaggcaaaccataccattcaactaatttaccgaaaatatcgctaaaagattcgttcaatgaacctggttcgccagaatataccaaatttgatgatttttgagtaaccccatgtgtaaattcatgtcctacaacatcaatacctgtaacaggtccccatgaacttccgttacccataccgtatgttgaatatgtaccattccaatatgcatttacaaaatttccccccaaaatagcaatcatcttagcgttgttgttatcgtaactgtttctattatgcgattttttatagtaatcaaaagttttttcggtaccaaaatgcaaatcggctgctgtagcctgccttgccgaagttgtactatcccacacattattgttgtcgtaaaaatcggttccgcttgagttgtcataagtatctacaccaccacccctgcccgtttctcttagcctgtaacttgatgaatttatactgtcaacagttatggtttgtgtgcctgcatattttccaattgctttgccttttacatctgtttcgcaaagtattttttgggtatttattatttcatttttaaaagcatcaacaaaaatgtactgtctttcgtgaggttcaatgctgtaaatatcaaatttccatgtcagtctgaaatcggctttttcaaggttgttatttactgcacaaactacaagttcgcctttgggataccatgttgcattggggttgttttctatttctcttaataaattttgttcgttttctgcttgccatgcgtatattttatctttagaaattagcttttcaaggcaaatttctttattaaaatagcctttgatgtttatgttttttacaggataatactcaccgttgaatgattctatttttccgtctcttgagtggataatcaacatgcttccctctatgtaaaaatctccaaaatactggtgaaatcgggtatgaaccattcccaaatcgtctgtttcttcattgtattttacaaaatgattttgtgggtcgaaattaaattttcttataagactcgaagcaaactcatcaatatttgcttttataggcttttcaaaacttacataacccggcaaattgaaactgttattaatataaacttctttagaagcttcaaatttttgcttagcactttcgccataaaatgattgttggctaaatacgttggtaaataaaaaaattgtcaataatgtaatatttaaccttttcatatatttcatatttatatcaaaattaaaaaataactttctaaatttaaaacattaaaatttaataatttgatttttcagaacacttttaatattttatgcccttacttgacgttgattttagtaattttgctgcatgcaaataggtgaaaaattattcgattttaatcttaaaggtacagatggtaagtattactcaaactatactttttctgacagatatgcactgctaatcattgtttcgtgtaatcattgcccatattcaatggcatattggggcagaattataaaactttgggagcgttttgaagaagacaatctcggtattattgttataaacggtaatgatgcagagcaatatccgcaagataattttgaaaatatgataactttaaacaatcaggttttaaagggtaaatttccgtatttatacgaccaaactcaagaagttgtaaaaaaactcggtgcttcaaaaactcccgaatcatttctttttaactcaaaacgcgaacttgtttacaaaggtgctatagacaatagctgggaaaacgaaaacactgtaactaatgtgtatctggaagatgcaatagaatatacattagacggactggaggttgattatcccgaaatacctgctgtaggttgcagcataaaatggaaaaaacaacaataaatcttttatttaataaaattggaaattgcagatattttaaaaaaacaaattgctgacggtataaacaatttatacaatcaacatttggatgaaaatgaaataaaattagaaattacaaacaaagaccacaaaggtgatttaacttttgtaacgtttccctatttaaaattttcaaagcaaaaacccgctgaaactgctaatgcaatcggaaattatgtgatagccaattgtagctcggtatctcattttaacgtagtaaatggttttttaaactttgaaataagcgatagtttctgcttaaatttcttaaaactcaatttcaaaaacaccgattttggaagcataaatcaaggaaacggaaagtgtgtaatggttgaatttgcatcgcccaataccaataaacccttgcatcttgggcatttgagaaatatacttttaggctattcggtttccgaaattttaaaatttgcagggtacaatgttatttcggcaaatttaattaacgaccgtggcattcatatttgcaaaagcatgttggcttggagcaaaggaaatggcgaaactcctcaatcaagcaatacaaaaggcgaccatctcgtaggcaaatattatgttgaatttgataaaatttaccgtaaagaaattgaagaattaaaacaacaaggaatacccgatgacgaagccaaaaaaaccgctccctctattgttgaggcacaaaatatgcttgtaaaatgggaacaacacgacccccatataattgctctttggaaaaaaatgaacaactgggtttatgatggctttgaacaaacctataaaagattaggtgtaacatttgataaatattattacgaaagcaatacctatcttttaggaaaagatttaataaatgaaggtttgcaaaaaaaagtatttgtaaaagaccctgacggaagcgtatggattgatttaacccaagatggattagaccgcaaaattgtactcagagccgatggcacttcggtttacattacacaagaccttggcacggcacaactcaaatacgatgagtacaaaatggacaattcaatctatgttgtaggcaacgaacaagattaccatttcaaagtacttaaaataatattacaaaaactcggtaagcaatatgccaacggaatttttcatctaagttatggtatggttgaccttccgcatggaaaaatgaaaagccgcgaaggcaccgttgtagaagccgatgaacttatggatgaaatgtactctacagcaaacaaactaacaatggaactcggcaaaaccgaaggatttaccgaaaatgaacttaaatcgttaaacgaaacaatagctatgggtgctttaaaatattatctgcttaaggttgaacatgtaaaacgtatgctttttaaccccgaagagtctattgattttcatggcaacaccggaccctttatacaatatacttttgcacgaatttcgtctgtactaagaaacaccgcaaataatgaaaatattgatgtttcatgctctttgcacatttccgaaaaagaattaataattactcttttgctgtttccacaaaaagtaatgttggcatcgcaaacctacaacccatctgtaattgctaattatatatacgaaatttcaaaattattcaaccgtctgtatcacgaactttctatacttggcgaacccgacagcataaaaaaatcaaaccgtgtagctatatgccgtttaacagccatagttataaaaaatggcatgaaacttttgggaattgcagtacccgaaagaatgtaatctgataatgttaattgaaactatatttttaaaataaaaaaaaacgatcccgaaattcttcgggaccgccttaaatgtcttcacaacggaataatccttattgtgatttgctttaaaatcattgcaataataatctttttttttatattgcaaaaaaattttatctatgaaaaaaatattaggacttgacttaggaacaaattcaatcggatgggcgctgttggaacaagattttgaacataaacaaggaacaatactgggtatggggagtaggattattccaatggatgaaggtattaaaggtaagtttgaggatgggatatctgtttctcaaacggcagaacgtacgaggtatagaagtgttagacgattgcgtgaacgtaatttattacgcagagaacgtttgcacagagtgttaaatgtgctaggtttccttcctgagcattatgcgaatagcattgattttgaaaaacattttggaaaatttaaaaatgaaacagagccaaaattagcatggaagaagaatgggaaaaagaaaaatggaaaagataagtttgaattcatttttcaagatttattcgatgagatgcttgctgactttaaacacaatcaacctgagttattgaatagaaaaaacaggaataatgagccggcaaaaattccttatgactgggcaatttattatttgcgaaagaaagcattaacagaaaaaataaaaaaagaagaacttgcctggctaatactaaatttcaaccaaaagagaggatattatcaattacgtggcgaggtggaggaaacgactagtgaagattctaaaaaagagagtgtattgaatcttaaagttgtgggtgtcaagaaaggagaagtagataaaaagaacaataaaaaaacgtggtattcaatcacttttgaaaatggatgggtacattcatttccatttacagctgaaccaaattggttaaacacagaacgagaatttatagtaactgaagagtacaacaaggaaactggagaaataaaaattgtaaaggacaacaagaaagatacagtaggaagagaaaaacgaagcctgtctgtattgccttctttcgaagaaattgagttgatgagtaaaaaggaacaggataaaatttataaaaaaataaaagccagaacggagcttactatttcaaatagtaaaaagactgttggcagctacatctacgaaacacttctaaaaaatcctactcagaaaatacgagggaaattagtgcgtactattgaacgaaaattttataaagatgagttgaaagctatattggaaaagcaggttgaattacagcctgaattatttacagatgaattgtacaacgcatgtgttcgagaattatataggagcaacgaagctcatcgggttcagttgagtaaaaaggattttgttcatttattcttggaggatattattttttaccaacgtcctttgcgaagccagaaatcaagtattggaaattgctcgttagaatttagagaacataaagttaatgtgaaagatgaaaaaggaaatcctatcaaaaacaaatttgaaaaagatattaatgggaaagacattttaattaaagaatatctcaaggcaattcccaagtcaaatccatattatcaggaattcagagtatggcaatggttacataatctaaaaatttataacagaaaggatgacacagatgcaacagaagaattcttaaagtcaatagaagacaaggaaagattgtttgagttcttaatgactaaaacagaggtaaaccattacgatgttttagagtatctactaacgcctgggataaaagagagatttccggatgcaaaaccaaaagcgtttaagaatgaactaaataaagagatttcaaagtatcgttggaactatgtatttgatgatgcaaaggaaaaggaaggtgaaaagtctaaagcatacccaatgaatgaaacgggctatgaaattcgcaaacgtttagaaaaagtggaaagcattccggttgattttttaacaagagatattgagcaaaacctatggcacatcatttattcggttactgatcccaaagagtatgaaaaagcattgaaatcatttgctgataagcatcaattaggttcagaatcatttgtagcagaatttaaaaaatttcctccattcaaaagtgattatggaacatattctgagaaagccattaaaaaattattgcctctgatgcgagttggaaaatattgggatggagacgttattgtaaaaaacagtacgaattattttaataacattcaacagctattagaaaaactcagtaaaaaagaaggagcgattacaaaggagcaaaaagaaaaatggaataaagacattaataggaaattgtatgatgagttgaatctttttaatgatgcagatatttcgttgtttcagggtttgcaacttcatattgcacaatatctggtatatggaaggcattccgaaagtgctgatataagccagtggacaaggtcatacgatgttcaaaattatctatacgaattcaaacaacactctttgcggaatccaattgtagaacaggtaataaccgaaacccttcgtgtggttaaagatatttggaaacattttggaaagggagaggaaaatttctttgatgaaatacatgtggaactaggaagggaaatgaaaaatactgcagaggaaagaaaacgcttaacaaatattgtttctgaaaacgaagcaaccaatcagcgcatcaagctattgttaatggaactaaagaacgacagctctattgaaaatgtacgagaatattccccatcacaacaagagattttaaaaatttatgaggatggtgttttaagttatttcacagaacaaaaattaaaagaggaagtattccaagatgcaggaaaggaagaagcaaaaaatgtttatgaaatttcccgaaaagctcaacctaataaatcagaacttatacgctataaactttggttagaacaaaaatatcaatcaccatacacaggtgagattattccattgagtaaattatttacacctgcttatgaaattgagcacatcataccccaaagccgatattttgatgatagtttaagcaataaaataatttgtgaagccgaagtaaataaactcaaagataaccaattaggtttggagtttatccaaaatcattttggagaaaaggtgcaaattggagaaaaagaggtaagcgtttttaccgtagagaaatacaaacaattcgttgaagagcattataccaacaacagaaacaagcgtactaaactgttgttggatgatattccggaaaaatttattgctcgccaattaaatgatacccgctatatcagcaaatatgtttctcaaattttatcaaacatagttcgtgcagatgaaaatgatgatggcgtaaattccaaaaatctgattctttgtaatggacaaattactgatcgtttaaagcaggattggggcttaaatgacatttggaattcattgatacttcctcgttttgaacgcatgaatcaattgacccattcaacaaagtttaccactaaaaataaagaagggcataccattcctcaaattccatttgaattatcaaaagggtttcagaagaaacgaattgatcaccgccatcatgcaatggatgctttagttattgcctgtgctacacgcgatcatgtaaatcttctgaacaatcaatcggcaaaatcagaaaacataaggatagacttgcaaaataagttacgcaacaaagaaaagtggacagaccgcaacggaagagagcatgataaattcaccacctttaaaaagccatgggaaaattttactgttgatactaaaaatgagttagagaaaattgtagtaagctttaaacaaaacctgcgtgttattaataaagccactaattattatcagaagtttaaaaacggcaagaaagtagaggaagaacagaaaggcacaaattgggctatacgaaagccattacataaagcaactgttttcgggaaggtctatttacttaataaaacaaggaagttaagtattaagaaggctttaataaaagtaaatgagttaaaggatatgaaaatcattgttaatgaaaaacaacgagtagcaatcagtaagtatttcaatgaaaataatgttgacattgagaatgctctaaaagatcctttcttaaataagtttaaggaaattgaaatttacgaagtacagtccgctacacgtcaaggaaatgatttagtatctatttttaaggatgtaaaaacaaaaaataaagctgagggggtcattaataacattactgatacaggtattcagaaaatccttctcaagcacttattatcaaaagagaataatccggaaatagcctactctccggaggggattgaggaaatgaataaaaatattgtgtctttaaataacaatacgtttcatcaacccattatcaaggttcggatgtatgaaactatcggcaataaatttcctgttggggaaagcggcaataagcaagataaatatgttgaggctgataagggtactaatttgttctttgccgtttatgaatacgaggaatttgataaaaagaaggagcgcacaataaaaaaacgctcttttgaaactcttcctctgaatgaagtaattgaaaggcaaaaacaaggattatctccagtacctgatatgaataaagaggggcattcactgatcttctatctatcccccaatgatttagtttatgtgcccactaaagaagaattggagagcaatacaaaaattgatattagaaatttaactaaagaacaaagaagtcgaatctatagatttactgatggaagcggaaaaatggcaaattttattcctgtaaacattgctaatgtgttattcaatatgaataaagacaaacagaaaaaaacatttggaaaagaattatttgctatacaaaatgaaattggagttggctcacaaggctcaaaaaatgaaaatgcaacaacaggggaacaaattaaatctatttgtatcaagttaagtattgatagattaggcaatatttcaaaaactcaataagcccatgctcctcccagacagctattaccatatcttcaatcacgcaaatggagatgataatctgtttcgggaagaaaagaactacgatttttttttactaaaatatcatcagcatattgatccaattgcggataccatcgcccggtgtttgatgaaaaaacatttccatctgttggtgaaaataaaaggggaggaagaaatattatcaacctttccaaagtttagaactttggaaaagttagaatatcgacagaaatttattagtaaacaattttccaactttttcagtagttattcgcaagccttcaacaaagtatataaccgtcaaggctccttgtttataaagaatttcaaacgaaaggaaaatgatgaccttcagtatttgcaaaaagtgatactgtacattcatctcaatcccaaaaaacatggttttgaacttgattttaatcaatggtattatacatcttatcatacttttattgaaaacaatactgaactggcaaccgatttatttacaaacgaagaacattattttgattaccaccaggagaatagtacaattaatatagagtatcaaaaacttgaaaatgaattaacctgaattacacatatatgataaaacgtaccctctactttggtaacccggcttatttaaaaacccaaaacgaacaacttgttgtaacaattcccgacaaaaacaacaatttgcccgaaaacacacgaagtacaactattccaatagaagatattggagttgtaatattagacaatcaacaaataaccataagccaggcactgttggcaaaactgctcgaaaacaatgcagcaataattacctgcgacaatacacaccatcccacaggcatgatgcttaacctaaatggaaatacattacaggcagaaagattttcgtcacaaattaattcgtcgttgcccttaaaaaaacaactttgggcacaaaccgttgaacaaaaaattgcaaaccaggctgctgtattaaaaaaacaaggcaatggcgaccatacagtattattaagcttttctaaacaaataaaaagtggcgaccccgataattttgaagggcgggcagcagcatactattggcaacatttgtttggaaaaaactcgggctttttgaggcaccgagaaggaaaatacccaaacaatctgctcaattacggttatgcaatacttagagcatcagtagcaagagctttaaccggaagcggtctgctgccctcgcttggcatacaccaccgaaacaaatacaatgcctattgtttggctgatgatataatggaaccatatcgcccttacgtagatgaaatgatttgtaaaattgcacaaaacaattatggcgaagaaataagcaaagaaataaaaacccaattgctgcttataccggttatagatgttgaaataaatggagaaaaaagccctctttcagtggcattgagtcgtacaagtgcaagccttgtaaaatgctacgaaggtacattgcgaaaaatttcttatcctgtattgatataaaaaattaaatgctttcagacagactaaatgcatacagaattatgtgggtattagttttttttgacttaccaaccgaaacaaaactcgaaagaaaaacagcttcaaattttagaaaagagatattgagagatggtttt

SEQ ID NO: 1337 - DNA, 16558 bp, synthetic construct
  misc_feature 1..16558: note = Synthetic
  source 1..16558: mol_type = other DNA
ttaatgaatcaccaaaagaaataccagcatagcttgatagtccacccgattgaaaggtccatgtagttccaccatcagtagtattaagaaaagttccaacacctgaaacaaaaccatgatttacatcagtgaaagcaacaccaaaaagaaaatcggtagttccgcttacttgaacattccaggtagaacctccatttgtagttcttactatgtctccacctgcacttactgcagtcccaacattttcatttacaaaatacattccataaaacattttattggtgataccactggtttggtcaatccaggtttgacctgcatcagtagttttttgaattaatccataagttcctccaacataacctatgtttgcagtaggaaatacaacgggtcctaaaacattctgagttccatgtactttattaatccatgtcgcgccaccatttgtggtacccaaaattgctccaacatttcctactgccactgctgtattttgatcaattgctgatatacctttaagtgacggatatatttgaaagaattgtgaagtccagttattacccccgtcggtagtgtgttcaattgtttcacccatttgactaccgacattccaaccattgttaacatcagtaaaactaacaccatataaggctccaatccctccagcctgactaatttgttgagcccaggtagcaccgccatccgtagtatgtattattttctgagcatctccgactgcagtagcatgatcagtatctgcaaaataaaccgaccataagatacccgtgactccgctagtttgagaagtccatgtcaaaccggcatcagttgtacgtctgatcgttccagcaccaccaacagccgtcccgtttacagaatctgtaaatgaaacaccgtacaaaaaaacagttgttccacttgtttgaggagtccaggtaattccaccattagttgtgcgtaaaattgtgccagtcgctccaactgcagttccattattagcatctgtaaaagatacgctccgtaaagctttagtggttccgcttgtttgctgcacccaagtaactccaccattggttgttcttaagattacacctaatcctcctacagcagttccgatattagcatcaataaaagagacaccaaacaattgtgtaattacaccgctctcctggaccgaccatgtcgtccctccatcagtagtatggataattgtaccaaccgcaccaacagcagtcccataaagatcatcaataaagcttacgctatttaatttgttacctgttggcaatggatttaaccaagtccattgagcaaagttaaccccctgcattgaaaatattaatacattaataataaaaaaaagacgaaacgaaattggaaaatatttgaacatgattgactccttgattatatgtgaattaaataactcgattgaaagatttttcaattttttaatagaatttgtagctctttttaattagaggctgtccaaatatgtgcttttgagacagcctcttttattgacttaattcttccattgaaatggtatttcttttaattctcgatttcgcatctattattttataaagtcctccgttagttaacgaatttgactaacggtttattttaaactttttgattttaaaaactcttctattgttattgatgtattccaatagaattcaaacaattttattagtgcactggtaaggtctgaatgttgtactatcattgatgacacattaaaatttttaactccttcatttcgcagagatatcattacgttgctattatcagatataagcattttgataggaagttcttcacaaatacgtacttgctctcctatattttcaaagtaactcacatattttgtaaaatttattatattatcctcctctacttcatagattccttttgccattattcccttgtttataatgttttttagaggagcgctaacttccgataattcgtcaatatcattcatattggtagcataaggttttttattaaacgtaagaatatgttccttggacgtttcttctaattcctgaaattttttcatctgactttgtttacttgtaagcacttgaatataatctaaaggagtcgagttctcttttttgttgttatatttattaactaattttttagcaatctccagcattttttgttcttgctttttctgttgctcaatgaggttttttattgctgcttccgggtcaacagctttaaactttttaacagttccaggaactaccacacaaaaccctttctcaactaattgattaattatatcatatacccttcctctcggtacactacaaatttttgtgatatctactgcttttagcaaatcctgggaaagcatagcgctataaacctgtgcttcatattcggtcaatccgatttccattagctgattgataatttcagtcatttattttctataaatttattgtaacttataattgcaacagaatattaacataataaaatcttaatgtcaaataatattgcaacttataattgcaagatattttttaatgtaattaacccagaattgtcaatatggagtaatttctaacgataattctggtataatattttgagagatgcaatacttcttcaatagtattgatcgatacaattattaaataagtcatatttttcaaaataatgttgaatatcttataattattaacacaaattatatttgcatctcaactttttttaatgattctgcaaaatccatatttcggaaaaactttctcaaaaatctttttggacgcaaggacgaaccatttctcactttctttagggtgggtagcttgaatctaaaaaatattaccctccccctctgaatcactattctgttcgtccattcgtccatcttctatcttactcagtataaaaccacgctcagcacctgactttttatcttcatactttaagttctttagttttgcgtatgtttttatccagcctgtaaaagttttttgctgcagtttcttaaaatcaggataaatctcaagaaacttttggtgtagcgttttcttgtcaattttaattccgaattctaagtcttccataaaatccacaaattcttctgatgttgcctcaactaattttttagtgttcagattcttacgctcataatctaccagaccatttttaagatgatactgaatacacttaatcataaaattgtaaaagctattccagtctttgccatcccaatcatcaaaaaaccttcttctaaattcatcttccggtgaattttttatgttgtaataatcagtaaactcaagtacaaactgccttctcagcgttgattcatccacgccctttattgtgtaatttgttgaaagcaatatcttcggggagtattcaaatggcactatcatttcattctgattctttttttcaatcgcaatattgtctgtaattgccgtaaacaacatttcaaaaggaaagcttcggctcagatcattaaactcgattatattagtttctggttcatacgattgaaatgaaaatctatcgaacttaaatgctttcccgcctaaccttaatgattttcttacttgtgagagcgcattaccaagcagactttttccgcagcctccgtttgatccatcatcaattttttcatccataaaaattattgcttttgcttttgctggatctttatattctaacaacaaataaccgatagcactcataaaagaattaaatctttctaagttgcctttgcatattctcagtatgaatgttttaaaatcactttcttcatcacttatagtaaaattctttgctattatttttttcttccagattaacccatccagttgtgtgtaatcataagtaatgtatttatccttagttacttttacaaaacagtttttaaagtatatgtatgattcttctctggtatctcttttaaaattatcttcaaggtttggtaaaaattctaaaaaattcttgctgaataatgtgggtgcctggttaatcactttacccaaaataatatttgcatcaaaagtctctcctgattcatcaccaaagcctttaatataacttgttatgtaatcctttatttgtacagtacccacttcctttacaatattatcttcaaccctaacaaacatataatcccttcctatgtaatactttctaaaaccactccgttccagggaggtaaggaattgctgtctgtttatttttatctcatcgccatcattataccagaaaacttttccatcatcagtttggttttcactttctggatatagagttactatcacagtgtcttctgcgctaaatattttctctgttgcgtctttcattgatcaactccgtcaaatcattatgatgttttaatttaatccctttaataggtctgttaactaactttacaattttttccattgctgatgcccctgcttcatcattatcaaatgctatgtataaatcgtatttcttaattgttccaatttgttcagcaggaatatttgtcactccgggtattccgattgctgcaaatccctcctgctccattatcatagtgtcaaattcgccttcgcatactatcaacatttcgttttctttaactttttttagtgtgtcgatattaaaaaatctttttaatggcagattgcctgaatagtttgatagacttatatatttacttatttctctgcttgattgtatccttctgcctcttaaataaactatcttgttattttctaaatacggaatgataagtttgtggtaagtaaaaacaagtttaccgtttttatttagcagccctgatattagcagctcatcatctaaaaaacagtccttcagatattcgtatgtctgtttcatattttttattgcaaacaatctgaatctcttaattgtttcttgactaagacctctttccttccctcgcaaataattatatgtttcatcatcaactccatagcaaaatttttctaaagattcataaataagattttgtttttcttttctttcattcatcaggtcacctatcgctctaatctctgcttgccttctgtttaactcaaacataaattcataaacacctgctctttcttcaaataattcaatctcactttttaatactataatcctcttctcaatttttttcaattcaatttttttttgaattttgaacctgtccaccgtggtggattttgaattttgagttttcttattctccaatcctgccctaacagccaattctttcactgcttctttaatactaatacctttcaaatcagcataaaattttatcacatcaccgccctgcgctgttgaaaaacaatagtacgaatttgtttccgggtatagtttcaatgaaggattactctcatccttataaatcgaataaataaagccctgctttgttggttgtagccctaactctgttgctaaatcaacgatcttaatgatgcgttttatttcatcaatcatttttctctcgcttcttcattgaaaacctgtccgccgtggcggattcttcgttgaaaattcttacttgtctactgcctattgcctactacctattcctctctacttactactcactacttacaataaagccaccgccgctctcatcgcctctaaatcagtatgtgcataaatcatcgttgtgtttatactgctatgtcctaaaatttccttaacagcaattatcggcgcgccgctctgtgccatccttgttgccgctgaatgacgcaacgagtgcatatgaataccctcgtctatttccgcagtacgacaagcccctttgaactttttagaaaaataatctcctgtataaggtctgcttgcactctttccaaacacatattggttcttaaattcccctcttgagagggggtttgggggtgtgttctttcgggcaatcatcctgtatcttgcatccagtatcaagtaaacccgttcactcattggcactactcgctgctttcttgtcttagtggtaaagacctcatcacccactattattacttttttaattagatcaacatttttccatctctgattaaccaattcatttaagcgcattccggtatcaaacgccaccctgcaaaagtcttctatcaatttactttcagtcacttgcattattttttcaaactcttcgtttgttaaatactttggtgcaaccgattgcattttggcaaattttatttttgtcaaggggttattaactatgtaattccattccttaaacttgttaaacatcgctctgatagttcgcacataaactttataaccctttggtgcggttattctcagttgtaaaacaaatttttctatatcgtgctgtgttattgtgtgcagcggtcgtataggtgaaaagaatttcagcaatggtttgttagaagtttttatactctgtaatgatttaatagataagtttatcttggcataactttcatactcatcaacgccctcttttaatacaacttggcgttgatttgcgatctggctatcccccaggatagccgcgatctgcataagtttctcaaatttatctttgtctatattttttaatgcttctaaatccattttctttcttaataaataaacacttaacatttaacctctaacattagcccctctcttttggagaggggttgggggtgaggcttattccagcatcacctcaatcgtttctaccacatccgctaactcatacactttctcattcaattgttttattttttcctcaacctcataatccacagattcataaatcaattgctccaaccttcttataatgaagtttaggttataggttattactaatatgttatctttcattgcatcaccattaaataaaaatgcctcgttcattcacacgactaaatgatacgaggcgattaaattcggttacttttactatctctatttagtcgtgtgtagatgaatatctgtaacttctattggaaagatatcttttttgaaagggtgtaaggaagggtgcaagtcttacaaaaaacttgcatatttattttaattatttagttttaatagggcatttccacttcgaatactcgttaattcggttctaatcacccctcgtttctttttcatttcttccccaattaactctgggtgatatttctttacatattctcttgcagtttttgaaacattatcaatcggcttagtaataaattcaggataattctctattaaaaacttctttattagttttctttgactggctttatcatcagcttctgttttctcttgataagtccgtggtcttaatatcaaattataaaatgatcttggtcttgccttggtgaatggtttgtaataaatattttctattctttgcaaggcatactcaatgtccttagaatgctttgtacttagatcatataactttttgatcctgtcgctatctttttctccatctataaattcttctatttctgaaatttggtcggcgcgattcatatagaatgtgtcgggattctcctcagcaaaactttgtgcaagtcttatataatcatttaatgctttaatcgttaaaggttcgtctatgtcctccttcaaaaaattaaaatgataaagtccattttcatcaaacctttctaactctgatgaatagacggcaaatcttctatcaatacattgtgaacagataccacagtgtgttttttgtggtggtttatttcttgttgcactgcaggacactgcactatctattatctttaactttttgtatctcttaataatcttgagtatatctgttttggtattaaataaatatgggtgctcaatcttatatcccttttctgcaattttagtaaataatttctctaataatcttatagttttaggatgtgttgttctgcttgcccttccattcatcatatcttgtgtctttgcaaaattcagacttgtaataccgttttcatatacatatatcctatcttgcttataagtattcgctattgcaaaagccattgaattaaaaagaaatgctcgtgttctttgtgtctcgtctattgattttgtatgacttaacccgcaatgaaatttataatgcttacatctgtttgggtatagtttgtttaacgtttcaaataatttactttgcgtttgttttacgctcggttgtcctgattgatgacttaccaaacaaatttcatctttagttgattctaatctttctattgctccggctaatgaatccagccctccagaaaataatgttatacttaaccctttttttgtatctaactcaaatttttcattgtcaaatagatcggcaggaaaatcgtcagcacctttgtaaaatgtaaacttgtaagatttatcccctgttgtaaaacataaaagatcacttagcaaatattgcacttccccattattccagaacctgtaatcccttactttaatatgaaagtgaaatgaacgactccagctctgatattcaacactattaggtgtccctcttgaagattctcgatcagcagcaaatatatatcctgcaatctctaataagtcttttactcttttagatgtagaataaaccgaggttacaaacttctgtaaagaaatatttacgtttttgtttctgccttcgtggtattcaagttcaatatagtgcgggttcttagcttcttcttttagtttaaccccattacaggctacaatatattccccattcgcactcaattatattcttcctgtaatagttcacccttcatttttccaagagcataggataaaaacccctttatttctttttcttcaggatagctttctttcacatttttattaaaccagccggcagcaaaggattgggttatttttgaggtttcaaatgcgtgcttagaaatttgatttatatgcttttctaattcttcattaaacttttttctttcgctaatattagttattacagcagaagcttctctttcaagaaaatacttcaaatacctttctgtaaattttgaaaagtataatctcgatatttcacaaaagccacttccatcagcagcttttcttaatattgcttcagagtctataccttcagaaaaaagtgtctgccctctatcaaggttactgaaataccagttgttaattgcatcaatagcagcctgtcttgcaaaagtttgatattcttttgaaacaacttcttctttcttataattattaatcgctcttgcaagcttaagtgcggacaactcttcgctacttaaaattttattttcggttaggtaaccaattggatcatttttttggaatgcgtaagaaacttgtagtagaaattcaaaagctgattttatcgagggatcattttcaagattactaaattgtttctgtacttgttgtagtgtgtttttcgcaatggaataaatttcagaactgcctaaagcaaagccagccatctcagcgacaattaatcgccaggcttttgatttaggaagcacaccaagtctttcgtgtcccactaagttatccgtgattagtgtttagtaaatgtcgtttaatttaacgctgatacccggtcattaaaactaatataaccacctatttctcatcgtggtctcataacttaacttagtgtctttataacttttgtaaaactaaataaaggattttttaatttcaactattctcctaatattttatcttgctggcaaatgctaaattttttcttttgttaattctaccttctttgatatccttttcttattttatactcagttgttttagaatctgatatacgatttgccaaacattccttctactattcattccttggatgccgattcgatggcttaggcagtgttcccaaattttagctatttaaataaaactatttaaaacaacaatcccgcattgctgcgggactactgtaaatgttttcacaacggaataatccttattgtgatttgctttaaattgttaaacgaaatttaataccttttttgaaaaattcaaaaggaaatttatgaaaaatatacttggcttagatttaggcacaaactcaattggttgggctttagttgataaagagaaccaaaaaattcttggaatgggcagccgaattattccaatgagtcaggacatactgggtgactttggtaaaggaaactcagtttcacaaactgctgaaagaaccagattcagaagtgttagaaggttacgtgaaaggcatttgttaaggagggaacgattacatcgagtactaaatgtattgggatttttaccaaaccactattctgatcaaattgattttgaaaaacgcttaggaaagtttaaagaagaagctgaaccaaaattagcttatcagccaatttgtaatagagaaaacggaaaaaatgattttaattttatcttcaaaaaatcatttaatgaaatgttggatgattttagaaaacatcaaccacaacttttggtaaatgataagaaaatcccatacgattggacattatattatttgagaaaaaaggctctaactcaaaaaatagaaaaagaagaattatcatggatattactcaactttaatcaaaagcgagggtattatcagctacgaggtgaggaagaagaagaaaatcctaaaaaacaggttgattttcattctctgaaagttaccgatgttcaagctgatgagaagaaaaaaggggcaacagatatatggtatgccattattttagaaaatggttgggtctatcgcagatcaagcaaaacgcctttatttaattggaaagataaaattaaagattttatcgttaccacagacctcaacgaggacggtacaattaaaaccgataaagagggaaatgaaaagcgcagttttagagcacccggagaagatgactggacattgttaaagaaaaagactgaatctgaaattgaattttcaggaaaaactgtaggtagatttatttatgataatctgttgcaagatccaaaacaaaaaattaaaggaaaattagttagaacaattgaacgcaaatattacaaaaaagaattagaacaaatcttacaaaaacaaaaagaatttcattctgaacttcaaagtgaggatttgtacatcgattgcattagagagctgtatagaaacaacgaatctcaccagcttttattaagtaaaaaagacttaattcatttgtttttagatgacattattttttatcagcgaccattgaaaagcaaaaaatcttctattggtaattgctcttttgagtataagaaatacactttgaataacgaagaaaaaattgagtacctgaaggctatacctaaatcacatccattttatcaggaatttaggctttggcaatggatttataatttacgcatacacagaaaagatgatgacagtaacgttaccagtgaatttttaaattcggctgaaagttatgcaagcttgtttgaatatttaaacgacagaaaagaaattgatcaaaaagcacttttaaaatatttcaaaataaaagacacatcacatcgctggaattttgtagaagaaaaaaaatacccctgtaatgaaacacgaacacttattaggacaagactttctaaagttgatgataatatattaactaaagaaatagaagaacaactatggcacattatttattcggtaacagacaaaatccaatatgaaaaggctttaaaaacttttgccaataaatataatttagatgcaacttcttttgttgataactttaaaaagttcccgccattcaaaagtgagtttggcagctattctgcaaaagcactaaaaaaactgttgccgttaatgagagcgggaaaatattggagttatgataacattgatgaaaaaacaaaatcaagaatcaacaaaatcattacaggtgaattcgatgaggaaataaaaaacagagttcgtgaaaatgcaataaatctgacagatgaaaaccatttccaaggattacaactatggcttgttagttatatagtttacgatcgccattcggaagcggcaatgataaataagtgggattcggttgcacacttagaagagtatttgaatgaatttaaacaacattctttacgtaatcctatagtagagcaggtagtaacagaaacacttcgtgttgtgaaagatatttggcagcaatatggaaaaggaactaaagatttctttgatgaaatacatattgagctaggaagggaaatgaaaaatactgctgacgaacgcaagagaataactgcacaggtgaacgataacgaaaatactaatcttcgaataaaagctttgctagcagaattgaaaaatgattcaaatattgaaaacgtccgtccttattcaccgcaacagcaggagatattaaaaatttacgaagatggtattctaagttcagatatcgaaattcctgaagacatcttcaaaatcagtaaaacatcccagccttcaagctcagagttacaacgatataaactctggttagaacaaaaataccggtcaccctatacgggtcagatgattccgttgaataaattgtttacaacagattatgaaattgaacatatcattccacagagtcgttattttgatgacagctttaataataaaattatttgtgaatcagctattaacaaattaaaagataaccaaattggattagaatttataaaaaatcatcatggtgaaattgttcaaacaggctttggtaatattgttaaaatctttgaagtaagcgattatgaggattttgtaaaaacacattacttaaaaaaccgcttcaaacgaaacaagttacttatggaagaaatacctgaaaaaatgattgagcgacaaattaatgatactcgttacataagtaaatttatcagctttgttttgtctaatatcgttcgcgctgacaaaaatgatgatggagtaaattctaaaaatgttattccaggtaatggcaaaattactaacacgttaaaacaagactggggattaaatgatgtttggaatgatttagttttaccacgctttgagcggatgaatcaactgacaaaaagtaaagtatttactgcatataacgataagtatcagaaatatttacctgctgtcccgcttgagctttcaaaaaactttcaaaagaaacgtattgatcataggcatcatgctttagatgctcttgtggtagcttgtgcaacaagagatcatgtaaatttattaaataacaaatatgcaaagtcaaatgaacgctttgatttaaataggaagctcagaaaatttgaaaaagtagtttataatcatcctaaaacaggagtgagaattgaaaaagaagttccaaaagattttaaaaaaccttgggataactttactgttgatgcaagaaatcaactagaaacaattgtggtaagctttaaacaaaaccttcgtgttataaataaagctactaaccatccagaaaaatgggtggaaataaatggacaaaaaattaaaaaagaagtggagcaaaaaggcattaattggtctattcggaaaccaatgcataaagaaactgtttcaggcaagattgatttaaagagaataaaagtccccaaaggaaaaatattaactgcaaccagaaaaaatattgatagctctttcgatattaaaaatatcgagtcaattacagatacaggtattcagaaaattcttaaaaattatctttccgcaaaaaacaatgatcctgaacttgcgttttcacccgaaggcattgaggatatgaacaaaaatattgttctttataataacggaaaacctcatcaacaaattcgtaaggtcaggatttttgaacttggaagtaaatttccgttaggacaaaaaggaaacaaaagcactaaatatgtagaagcagctaaaggcacaaatctattttttgctgtttacaaaaatgaagaaggtaacagaagttttgaaacaattcccttaaatgaagtaatcgaacatcaaaaatggcgggctactttatctaaaacggaacagaaaaacacacctctcattccaattaatattgcaaaggggaaattcttattttgtttatctccaaacgatctggtgtatgtgcctgatgaagaagaaataattaatcagacaccgatagatttttataatctatctaaagagcagagaaaaagactatttaacgtgaatgacttctcatctacttgttatttcacaccgaacattgtcgctaaagcaattgctccaaaggaaatagatctaaattatgataaacaaaaaaacaaaattacagggtcttttgatactaaaaccacgagcctgaatggtgttcagataaaggatgtttgtataaaacttaaagttgatagattaggtaagattaaaccaataataaactaccaataattttatatataaaacgtaaaaattgcagtttacaacaatagatttattatttagtattcgcttttcgatagattattaagggtacagttattgttattaattttaatttaataccatataactgatgattaaacgaacaatatactttggcaatccggcttatctttctaaacagaacgatcagcttgtagttaagttaccggaattaaaaaaggcagcaagtgaagaattaaaatctaattctgaacctatacctggtgattcaaatccaaatcaaaaatatttggatcgcggtaatattaacacaatccctgttgaagatattggaattgttattcttgataatcagcaaataacaatcacgcaaggattgttatcctctctcttagaaaataataccgcagttgtatcttgcaatttttcacatatgcctattggtctgtttttaccgcttgaaagtaatttaacccaaagcgaaagatttcaatcacaaataattgcctccgaaccgcttaaaaaacaattatggcagcagacaatttcaagtaagatatataatcaagcagctattttaagaaacagaaaaaaaactaacgataatatgaaacgctgggctaaagatgttcgttccggtgattcggaaaatcttgaaggacgggcagccgcgtattattggaaaaatgtttttccaacagagttagaatttgtaagagatagaaatggtttaccgccaaataatcttcttaactatggatatgcaatacttagagcaattgttgcccgaagtttagttgcctctggcttgctgccaacacttggtatccatcatcataataaatataatgcttattgtcttgctgatgatataatggaaccataccgcccttatgtagatgaacttgttgtaacctttgttgaagacggtgaagactttactgaattaacaccatcaataaaaaaacaactgcttactatacctgcaatagatatttttattgataatgaaaaaagtccattaatggttggcatgcaaaaaactacagcatcgttagtaaaatgttttaatggagaggctaagaaaattatttatccaacaatgtttaattaaaattaaattatatttttgcagccgcaggcttcagcctgcgtttattatactaaaatgaattcacgattaaatcaatatcgcattatgtgggtactcgtcttttttgatcttccgacagaaacaaaaaaagaccggaaagcttatacacgtttcagaaaagaaatgatgagtgatggattttcaatgtttcaattttcaatttatgtacgtcattgcgccagcaaagaaaataaaaacgtacatataaaacgtattaaaaacatacttccggaaaaaggtcatatcggcatcttatctataaccgataagcaatttgggatgatggaagtattttttggtaagaaaaaagaagaaaccggatttgtggaaactcatcaattagaacttttctaaaacaacgactgcaatgtcaccctgagcttgtcgaagggtgacatttttatgtagtcgtaaatttgatattaaaaaccggtcttatagttttgttgtatgcaattttttaatcctaaaattgctgtaagtctttatatttcaatgaggtataatataatgagttgtttttaatatcctcaaagaacaatttgaaagcaaatcacaacattggcataagtttagaaccaatcgtccagttgtttttaatatcctcaaagaacaatttgaaagcaaatcacaacagtgtcaacagcagtaatatcaccctctgtgttgtttttaatatcctcaaagaacaatttgaaagcaaatcacaactaaactcagcttctaatgttgggatgcaaggttgtttttaatatcctcaaagaacaatttgaaagcaaatcacaacaagacgacataaacaaacgacttgctgatcgttgtttttaatatcctcaaagaacaatttgaaagcaaatcacaacattcttggcaatactttttcagtaaaaaagttgtttttaatatcctcaaagaacaatttgaaagcaaatcacaacccacaaggaactatttaataaaagctgtaagttgtttttaatatcctcaaagaacaatttgaaagcaaatcacaacgatggcacgcagaaacattaatgcag

SEQ ID NO: 1338 - DNA, 16554 bp, synthetic construct
  misc_feature 1..16554: note = Synthetic
  source 1..16554: mol_type = other DNA
tttcaaccacaaaattactgaaaatcaataatatgtgcaactttttatccatttatttcgctctcttttccctcttttctaattccgccaacgggtaagcttgtgtaattggaaaagccgtatctttgccatgtgtcaataacaattcaacaattcaacgattaacaactcaacaagtatgaaaagaggatttggaagcgacaaccattcgggcgtgtgccccgaggttttggaggccatcgcccgcgtgaataaggaccacgctgtggcatacggcgatgatgaatattgtgctgcaacggaagcgaagttccgcgagcagtttggcgaacaagcccgcgtgtttttcgccttcaacggcacgggctgtaatactttgtgcattgatgccatgacacactcgcatgaggccgtggtctgtgccgagtctgcccacatcaacgtggacgaatgtggcgcgccgcagcgcattgtgggctgtcgtctgttgacagtggccacacccgacggcaaactgacgcctgaactggtgaaaacgcgtctgcacggctttggcttcgagcaccactcacaacccaaagtcatcagcataacgcagccgacggagcttggcactctgtattctttggacgaaatcaaggctttggtggctttggcgcgagaatacaacatgtacgtccacatcgatggtgcccgcttgggtaacgcagccgtggccttgggttgcaccttcaaggagatgaccaccgacctcggcgtggatgcggtctcgtttggcggcaccaaaaacggcctgatgatgggcgaggcggtcgtcctgctcaatcctgacctctgccccgagttcaaataccgccgcaagcaggccatgcaactgtgctcgaagatgcgcttcatagcggcgcagttcgacgcctatttcgagaacgacctctggcgccgcaatgccgagcactcgaaccgtatggcgcaactgctttacaaggccgtgaaggacattcctggcgtgaaggtggtctatcccgtgcaggccaatggcgtgtttgcccagctgtcccgcaaggtgtggaaagagctgcaaaaccattatttcttctacgattgggacgaagatgccgacgtggtgcgctggatgtgcgcatttgacacgacggaggaggatattaatcgtttcgtcgcgttgttgaaggaactgatgacgaaggaataacaaaccgttgcaccaccgacgacatcggcggttccgtgtgttccccatgtaggggcggacccatgtgtccgcccttaataattgtgtccgtccttaataatagcgtgttcaattccaaaaatttatttgcgccatcatcatttgtgtcatggcgcacacatgggtttatggtacacaaaatggattagggtgcacacatgggtgcacccctacagcggcgcacgttcccgcatttttccaaatgctatggaaatggctgggcatgaccacaatttcacgtggttatggttgggactattgggggacatgattaaggttgttgaaaaaagacgaggcgaccgaagtcgccccgtcctaaatgattttcacaacggaataatccttattgtgaattgctgcatatcttgtgctgcaaaaatacaacttttttggattgtgcatttggtttttggggatttttttgtatttttgacgaaaatttttcaattctgaaatcaatacaactatgaagaagatattaggacttgatttgggcaccaacagcattggttgggcagtggtgaatgcggaagaaacgctccgcgagaatgaaacaacttatttgaagccgacaggcatcagtgcggcgggtagtagaattatcccgatgtcggcagacattttgggtgatttcgaagctggcaattctgtgtcgcaaacgaaagatcgcacagacaaaagaggggcacgtcgcctattggaacgatacttacttcgtagggagcgcctcttgcgtgttcttaaactgatgggctttttgccagaacattttgccaaacagattgatgagaacggaaaatttatcaatcatagtgagccgaagttggcttggcgtaaagatgaacaaggcaagttcgagttcgtttttaaagattcgtttgaagaaatgttggaggattttgcactacatcagcctcaacttgtggcagatggcaagaaagttccctacgattggactatctactacttacgtaagaaagccctgacgcaaagacttacaaaagaggaacttgcgtgggttttgttgcagtttaaccaaaaacgtggttattaccaactgcgcggcgaagacgacgatgagcaacaagacaagttggtcgaatatatcgcccaaaaagttgtcagagttgaagcaaccgatgacaaaaagggcgatgaaatatggtacaacgtgcatttggagaatgggatggtgtatcgtcgcacgagcaaaacgcccttggattgggcgggaaagataaaggagtttatcgtaactactgaccttgaaaaagacggaacgcccaagaaagacaaggaaggcaacatcaagcgttcttttcgtgctcccaaagaggatgactggactttgctgaagaagaaaacggagttcgacatcgacaacagccacaaaaccgtaggctgctacatctatgacaatctgctgcaaaagcccaaccagaaaatcatcgggaagttggttcgcacggtcgagcgcaagtactacaaggaggaattgcggcagattctcgaaacgcaagttgccttaatacctgaattgaaggatgccactttgtataataggtgcatcgaggaactttaccccaacaacgaggcacaccgcaacaacatcgccaaacctgacttcgctaacctgttcatcaacgacatcctgttctaccagcgtccgctgaagagcaagaagtcgctcatcagcgactgcccgtatgaaagccacttcgacaaggacggcaacgagcatcctgtgaagtgtatcgccaagtcgaatccgctgttccaagagttccgcttgtggcagttcgttcagaatttacgcatttaccagcgggaaagaatagttagtgatggccagttggacttgttcggaaaccaatcggcagggaaactccaaactgatgtggatgtaaccaacgaattgctgaaaaccgaagaagattacgtaaaacttttcgattggctgaaagacagagcttccatcaaacaggacacgttgctcaactcgtatttcaagttcaagaaagagaagggtaaagaccaatatccttaccgttggaactacgttgaggataaggattatccgtgcaacgaaacaagggctacaatgcttggcggattgacgaaatgcagcctcgacgctggtttccttacccgcgaaaatgaaatgtcgctttggcacatcctctattcggtggaagacaaaaccgaaatcggcaaagcattgaaaaagtatgccgaaaagaacaatcttcccgaatcgtttgccgaggtgttcgccaaagtcaaaccgttcaaaaaggactacggctcctattccgaaaaggccatcaagaagttgctgccgctgatgcggatgggcaaatattgggatgccgaggccatcgacaataggacgaaggaacgcattgacaagatactgactggcgaatacgacgaaaacatcaagaaccgagtgcgcgaaaagtccatcaaccttactgacatcaaccattttagggctttacccgtttggttggtttgctacatcgtctatgaccgccattcggaggccaaggaaatagggaaatgggagaagcccgaagacatcgaccgttatttgaaggacttcaagcaacactcgctgcgcaatcccattgtggaacaggtggttacggaaaccctacgcaccgtccgcgacatctggaaacaggaaggacaaatcgacgaaatccatttggaactggggcgcgagatgaagaatcccgcagacaagcggaagaaaatgacggagcgcatattggataacgagaacaccaatctgcgcatcaaggctttgctgatggagtttatgaacgaccctgaaattgaaaatgtacgcccatattcgccgagccaacaggatattttgcgcatttacgaggaaaacgcacttgacaatctgaccaaggacgacaaggattttgatttcgtcagcaaaatttccaagtcagcacaaccttcaaaggcagatattacaaggtataagtgttggttggagcaaaaatatcgctcaccttatacgggccagatgattccgcttgccaagttgttcacgtcggcttacgaaatagaacacgtgattccccaatcgcgctactttgatgactcattcagcaacaaagtaatctgtgaggctgaggtgaacaaactcaaagacagacagttgggatttgagtttatcaagaaccataaaggcgaaaaggttcaaatcagccaaggcaaagtggttgaaattctgtcggttgaagcatacgaaaagttcgtaagagaccattattccagcaatcgtgcgaaaatgaagaaactgctgatggacgacattcccgacggtttcatcgaaaggcagttgaacgacagccgctatatcagcaaactggtgaaaggcttgctgtcgaacatcgtccgcgagaaactcgataacggcgaatacgagcaggaagccgtttcgaagaacctgatttcgtgcaacggctccatcaccgaccgcctgaaaaaggattggggaatgaacgatgtttggaacagcattgttttgccgcgtttccgccgtttgaatgaattgacgggcaaaataagtgacgatgaacttgtagccgaatttaaacgtctgtttgaagaacagttgattgtctgctccaagtcaagaaatgaatcgataaatagttcttatacagattattataaatcattaggtgaaaaagaacagaaaaaggttattgacgaggtaatgaagaaattgccaatcaaagaatcatttttgtcagtaaacaacgagggacatataattccaaatatgccgctggaattgcaaaaaggcttcaacaaaaagcgcatcgaccaccgccaccacgcgatggatgccattgtgatagcctgcgccacccgcgaccatgtgaacctgctcaacaacgaagccgcacactcgaaacacaacgccaaccgataccaactgcagcggaagttgcgccgattcgagaaaatgaccatcgacggcaaggaaaaggaaatcgccaaagagttcctgaaaccttgggattcgtttacaacggatgcaaaacaggcgttagaaaatatcattgtgagtttcaagcaaaacctgcgtgttatcaacaagacctcgaaccattatcagcactacgatgagaatggcaaaaaggtgcttgtcaagcaagaaaaaggcgacagctgggcaattcgcaagtcgatgcacaaggcaactatttggggagaaatcaacctgagattcaaaaaagaaatttcattagaaaaggcattggaaaatccacaaactattgtaaataaggagttcaagcaaaaagtccgtgaattgttgaatgaaggcagagacgctaaattcataaaaaaatatgttgagaacaacaaagatgtttggtcggatatagacatctctaaaattgaagtttattattttacacaaaatgtaaaagacaaaaatggaaaaattaaagaccgctattttgcaaccagatttttaagcgatttggttacctatatggctggcgttaaggaatatgacaaagccataaaaaagattgaaggtataacagatacaggtattcaaaagatacttagagcacatctgaaagcaaaagataataaccctgaaatcgctttctctccagatgggattgacgaaatgaatcgcaacattgtagaattgaataatggaaaatttcatcatccgatttacaaggttagaagatttgagaaaggaaataaattcccaataggaaagactgggaataagggggttaagtttgccgaagctgatgatggtaccaaccttttcttcgccattttcggaacggaaaagacgaataagaaaactggcgaaacggaaaccgttcgttcctatctgaccattccgctcaatgtgatgattgattgccaaaagaaatacggttcgcaatggcgcaactgcatcgaaatctatctacaagagcagcaattggttacatccgatgccaaactcttgttcatcctttcgccaaacgatttggtttatctgccgacgaaagaggaaattaggaacgggatttcgacgattgataggaaacgaatttataagtttgtaagttgcactggaaatgaaggacattttattcctgaaataatcgcaactccaattgtgcaaacaacagaacttggaagtaataacaaggcacagaaagcatggacaggcgaaatgattaaagaaacctgcttgcccatcaaagtggacagattaggtaacatcatcgaatttaacggaaagaaaatagagtcgtaaccaatttgggtacaacttaacaaacgaaagcaaccatgatcaaacgaaccctatttttcggcaatccggcctacctttcgctgaaaaacgcgcaactcgtcattaggcttaacgatgcccaaacgcaacaggaagtgaccaagactgttcccatcgaggacatcggcgtggtggttttagaagatcggcaaatcaccatcaccaacggggcgatggatgccctgctgcaaaacaattgtgcagtggtcacttgcgatgagaaacacatgcctgcgggtttgttgctgcctttggaaggccacacggtgcaaagcgagcgttttcgttggcagattgaagcttctctgccattgaagaaacagttgtggcaacaaaccgtccaagccaaaatccgcaatcaggcttcggtgctgaaacgaatgagcggtgccgaaataggttgcatgtcggcttgggccaacgacgtgaaaagcggtgatagcgagaaccttgaagggcgcgctgccgcctattattggaaatcggtcttccccgaaatggaacgttttgtgcgcgaccgcgagggcgacgcgcccaacaacctgctcaactacggctatgccatcgtcagggcggtggtggcgcgggctttggtggccagcggacttttgcccactttcggcatccatcatcacaaccgttacaatgccttttgtttggccgatgacatcatggaaccgtatcggccatacgttgatgagttggtgatagagattttgcgcagcggcgtggattgcagcgaactgaccaccgacttgaagcgacaactgttgggcttgcccgtgaaggaggtcgtcatcgacggacggcgcagcccgctgatggtggcagttacgcaaaccacggcctcgcttgccaagtgtttcggaggagagttgcgcaaagtggtgtatccgataatggaattatgatggaccgtttcagcgaatacaggattatgtgggtgcttgtgcttttcgatttgccaacggagacgaaaaaggaacgcaaggcctacgccgattttcgcaagcgcatcatggctgacggcttcacgatgttccagttttccatctacttgcggcattgtcccagccgcgaaaacgcggaggtgcatatcaagcgggtgaagtcgttcatgcctgagtttggcgatattgggatattgtgcatcaccgacaaacaatttggcgaaatggaaattttcagcaactgcaaacccaaggcggtggatacgccatgccagcaattggagctgttttgaatgggaaaaactgcggaaacaaaagaaaaatcccgctcggaagggcgggatttttcttttctgaaacaacttttaaaacgttgtggctctttttgttacacatatcgtgttgtttcaaagagcaaagatacaagataaatgcaagcaattcacaactgatatggattacacttatcacatcgaagcgttgtttcaaagagcaaagatacaagataaatgcaagcaattcacaactggcggcgtaggttctgcgactgccgttccgttgtttcaaagagcaaagatacaagataaatgcaagcaattcacaacgcgacgtcatgccatgctattacaacccaagttgtttcaaagagcaaagatacaagataaatgcaagcaattcacaacatgccaagatatacaaaggagtactcaccggttgtttcaaagagcaaagatacaagataaatgcaagcaattcacaacggaaaatgttggtcgccaaatgtggactaagttgtttcaaagagcaaagatacaagataaatgcaagcaattcacaacttggtttcccgtggattgaccttgcagaatgttgtttcaaagagcaaagatacaagataaatgcaagcaattcacaacgataacattaggaacaatcgacgtaacattgttgtttcaaagagcaaagatacaagataaatgcaagcaattcacaaccaaacggggtgtcatccacgtccctacggggttgtttcaaagagcaaagatacaagataaatgcaagcaattcacaaccgtcaataagcgcgcccgtagcccgtagggttgtttcaaagagcaaagatacaagataaatgcaagcaattcacaactatgatgccatcatgggttgagaaggatagttgtttcaaagagcaaagatacaagataaatgcaagcaattcacaaccgcacccgccaagtgtactgcgtggaagacgttgtttcaaagagcaaagatacaagataaatgcaagcaattcacaactgtagttgttgctggtagtcaaaaatgatgttgtttcaaagagcaaagatacaagataaatgcaagcaattcacaacttggtgatttcattcttccaaggcttggtggttgtttcaaagagcaaagatacaagataaatgcaagcaattcacaacaaaatatgccatttttaatcctccttaattgttgtttcaaagagcaaagatacaagataaatgcaagcaattcacaacattttctctgcagttaacattactccaaatgttgtttcaaagagcaaagatacaagataaatgcaagcaattcacaacgctctttgtgtttgagattattcattttcggttgtttcaaagagcaaagatacaagataaatgcaagcaattcacaactgtcttggattgcaatgctttccacttcaagttgtttcaaagagcaaagatacaagataaatgcaagcaattcacaactggttcatcgcctcccaccaatccttgttgttgtttcaaagagcaaagatacaagataaatgcaagcaattcacaacttgcttctggggggttgcggctgctccaatgttgtttcaaagagcaaagatacaagataaatgcaagcaattcacaaccccgtcttgcttaatgtattacttcaactccgttgtttcaaagagcaaagatacaagataaatgcaagcaattcacaacttgacggcaaggtcgacaaagagaatgggtgttgtttcaaagagcaaagatacaagataaatgcaagcaattcacaacttatccaacacaaaccatccatgatggtaagttgtttcaaagagcaaagatacaagataaatgcaagcaattcacaactagcttattacaagtgttcgtcgatgggtcgttgtttcaaagagcaaagatacaagataaatgcaagcaattcacaactttcagtgatgaaagaaaaagctaatcacagttgtttcaaagagcaaagatacaagataaatgcaagcaattcacaaccatactgagtttgtgggtgtactgaacattgttgtttcaaagagcaaagatacaagataaatgcaagcaattcacaacactggcagcaaggaatccgcttgtcacaaggttgtttcaaagagcaaagatacaagataaatgcaagcaattcacaacatatacacttcattgaaacgacttctaccagttgtttcaaagagcaaagatacaagataaatgcaagcaattcacaacctctgtttcagtagtttcattggattttccgttgtttcaaagagcaaagatacaagataaatgcaagcaattcacaacttcgcggcggttacttaatctcgtataatagttgtttcaaagagcaaagatacaagataaatgcaagcaattcacaacttgttgctaaggctaagcctctgattctgcgttgtttcaaagagcaaagatacaagataaatgcaagcaattcacaactaagtatatatccaaggacatggctgttaggttgtttcaaagagcaaagatacaagataaatgcaagcaattcacaacctgcgcgctggcggatatgtcctatttgacgttgtttcaaagagcaaagatacaagataaatgcaagcaattcacaacttctctttcaaaatacttcgaatcgacaatgttgtttcaaagagcaaagatacaagataaatgcaagcaattcacaactaagcagttcgatactatgctactatcttagttgtttcaaagagcaaagatacaagataaatgcaagcaattcacaactttgcttccctgcattccgagcagtttccagttgtttcaaagagcaaagatacaagataaatgcaagcaattcacaaccaagtacaaggcagacgaaggtgtttacttgttgtttcaaagagcaaagatacaagataaatgcaagcaattcacaacagaactgaaggtgtggtacgacgagaagacgttgtttcaaagagcaaagatacaagataaatgcaagcaattcacaacgtatggagacttaatgattgtagcaccatggttgtttcaaagagcaaagatacaagataaatgcaagcaattcacaactacattggcaaatctttcaaattgtgtctggttgtttcaaagagcaaagatacaagataaatgcaagcaattcacaacttgttgtgaggtcatgatgtgtgatgttagagttgtttcaaagagcaaagatacaagataaatgcaagcaattcacaacgccttggattaggtgagtgttgcctgatctgttgtttcaaagagcaaagatacaagataaatgcaagcaattcacaactgtatctcccaccaatagtgaaggcggttggttgtttcaaagagcaaagatacaagataaatgcaagcaattcacaacttgtagaggcaaacgctccggggactcacagttgtttcaaagagcaaagatacaagataaatgcaagcaattcacaaccggaatgaatcggtgtgccggaattggtaagttgtttcaaagagcaaagatacaagataaatgcaagcaattcacaacaagtttatggcggggtcgctatctttgtcggttgtttcaaagagcaaagatacaagataaatgcaagcaattcacaacagtcgtaaagcacggtgtaaaccgttgtatgttgtttcaaagagcaaagatacaagataaatgcaagcaattcacaacggaggaagtgcagtcgttactatttgcaatgttgtttcaaagagcaaagatacaagataaatgcaagcaattcacaacgtccttaatgttgaagtctgcccttgcatagttgtttcaaagagcaaagatacaagataaatgcaagcaattcacaactagtactgcctcacgtatgttgtctatgtgttgtttcaaagagcaaagatacaagataaatgcaagcaattcacaactgacgtcgattaattttggtgatgtcatgcgttgtttcaaagagcaaagatacaagataaatgcaagcaattcacaaccttgccgagcgcgccaatctcggcggtaatgttgtttcaaagagcaaagatacaagataaatgcaagcaattcacaacggcttggatgatgccgaccaaatcaaatgggttgtttcaaagagcaaagatacaagataaatgcaagcaattcacaacttgttgtttgcactacaaagatacgaaaaagttgtttcaaagagcaaagatacaagataaatgcaagcaattcacaacttctcagtgatgagaaaaaaaggtaatcacgttgtttcaaagagcaaagatacaagataaatgcaagcaattcacaacgttgtacgatgcggaacgaagatagaggatgttgtttcaaagagcaaagatacaagataaatgcaagcaattcacaactatactgaaattcaatgtattagtgtttgagttgtttcaaagagcaaagatacaagataaatgcaagcaattcacaacattggcgttgcccttgtagccgttgtaggtgttgtttcaaagagcaaagatacaagataaatgcaagcaattcacaacgccgcaatggcgtaaggaaaaaagcgttttgttgtttcaaagagcaaagatacaagataaatgcaagcaattcacagcttccaaaccgtctccaccttcaaatctgtcttatggttgcacttgatgagcgtcaggccgctgctgatttcgtcgcggtcgttgtagatggtgctgccgatgcgggcatagagcgtcaggttgttgaaaggcttccattttcctaacagatacaccctcatgcccttgccgtaaagcgctggcaccgagaaggaataaagcacgtcgctctcgtaggcatagacgcgggaatcgtagtcgtcggtgtcgaagatggcgtaacggaaggtgaggctgaacggcttgttttcaggcttgtaggccacatcctgacagatgaaaaagccgtggctgttgctgccgtcgtcgttgcggtagtgggcgtattcggccttgttgctgaaatggaagtccctgccaatctgatagttgatgttgaaccgcactgagtttttcgtgtagaaaacggggtagtggctgaagacgaaagcgtcggtcgagttcttcatcttggtcttggaccggatttgcaggtaggcgtttgtccgcctgctgaagctgtggctgaggcgcatgtagtagtcgtggccccaactcggcgcgttgacttgcgaggtgagccaagtaaactggaactggtcggcgtagagcaacaggttccaatatggggctggggcaacctccgcgcccaaatagatgccgcgctggccttggttgcggctgccttcgctgaaggcattggaatagaggttttgattggccttgccataatcgcggtagagcagggtaaaattcagatagccagcgggttttatggtcatcccaaccaaaccggcaaagcgggagagggctgaagtgccttgcaacgaaagcgtatcaggattgatgctcatggcaccctcgccgaagaaagcgaacttgcccttaacatatttgaaatcaatgccttggttggtgagttgtttgccttggaaataaaattggttgtagttggtgggacggatttgcaacggcacgttgagccaagtgtggtgcaaggtgtagccaacctcaaaatgcgcgatggcgtaggaaaaatgtccgcccacgacttgctgacgaatggcatggcggtcttgaagctctcctatagttcggtgataaccagtctcttgcaggctgctgatgagttctgcctcgtccaaactgtcggccacgctgatgttggcatcaaccaagcggttggagtagaacaccgtgcccctgaacgggcctttgccaagggtggccgccgcgccgcgcatgaacattgtctcgttagcggaggtttttggactgatgccgcgtccttgtttcatcacactgctgcccgtacccgccttgccgaaactcattcccgaccacatcgtaagcccttgaccgaaagccaattggtaatcgccaagtgcagcagccttcacgatgcccaaatccttggcatagagatgaaaacctatgtaatcgaagccgcgtcggtagtttttgccaagcagtttttggatggtgtcgctcactttgtcggtgaaaaacatctcgccagggtctttctccaacacgaaacccgcgcgaatcttgttcctgtaattgtaggtgtatttcagttggtagcgttgcggactgcccaaaaaccgcgagttgggtttggctaacagtgccgagtcgctgatgtcgtcgtaacctgcctgtcgctcaaggatttgctcgtaacgacccaagatttgatgcttgccgtaacgcgccaatttgtcaaaagtgattttctctttgcctctatcttgtccgatgtagacggttggcgcgatgatactgatggtcagcgcgtcgaagccttccaccatctccaactcctcaagaaacagaaaatcaccgtaatagcggcgatatttctgcaattcctcgtattggaacacgttgagtagccgcagctccaccaactgcatcacctcgtcgctgttgaggttgacggggttctcgctgtagaaaatgtagttctccaaaaggtcttcaaaatcagtgtcttcgtcgctgtcttcggccaagcgttctatctgctcgatgagcagttcgttcaaggcatcggtactcaaggtgtcgacggcgatttgtgccttcgcgaaaaggcaggaaacaagaactaatatggtgaaaatcagttgtttcatggtcatttaccgatactgaaaatcatgccgatttgaatggaagagccgagttcttgatgcaattgtgccgccgcgtcgatgctgacgaaactgaacgcatagccgagaccaaaggtcaaaattccagggttcgactgcacccccgcgcggaggtagaggtgtttcaatgcctcaaactccaagcctccgcgcaggctgatgccctcgcgctcggtgtttttctcgatttcgcactgcccgacgaagtctttggtgaactggtaggcggcaccgaaacggaacacgaggggcaacttttcttggttgagactttgctgcaaacgaaaactgacgggattgaaaatgtatgtgccaagtcgcagcttttcagtaacttgtgacaggatgcccaactcaaaggtgatggcgctttgtcgaccgtatgtttcgccttggctaatcaataggtaatccaactgcaaacccatttggaagtaaggaccaaagtccttggcataggccaaaccgaacttgttttcactgtatttcgacgatccaaactggttgaaactcaaacctaagcagccaaatttcgtcggcaaggcggctgctccacttttgtaggctgtttcgggtaggaaccatcggttttcataatacagcccgaagctgaacttctctatattggccatgccagcggggttgttttgcatcgcccacagcccgcgcgacgccaccgaactgccacccatcgccgctgcccgtccgccaatgggactgatgaaatcgtgggcgaaagcggtggaaacggtgaaacttataaagataaggagtagaaatctcttcatgtgcaatgttttgatggtgcaaatgtagtggtgttttgcaaaaaatcaaagtttttggcgcggcaggtggcaaaatttcctattttcgcgaactaaaaccaataagtagatgaacaaatttagtttacataatagactgcgagactccgagactgcgggactgcgagtcgaacaaatacccgaagtcccgtgtcccgaagtcccgaagtcaaagaataatgcagtttaattttgaacagttacttattatgaatgtcgttctcatcattgcggccatcttgctcgttcttcttggattggtgggttccatcgtgccgggcatcgtagggcctccgttcagtttcctcggactgttggcgttgtcgtttgtcgacgggatagtgtattctgcaagttttctgatagttatgggcattattgcagccgccgtttttgcgttggattatgtggtgccctcgtggggaacgaagaagtttggcggcacgaaagcgggggtgcgcggcagcactatcggcctgattttgggactgctttttactttggttttcccgataggtttcattgcggtgctgcttgggccgttcattggggcgtatatcggcgagacctcggcggggacagaaagcgatagggcgttgaaggcggccttcggctcgttttttggctttttggtcggcacaggcttgaaagtgatttacgcctgtgtttgtattttttacgtggttaaagatttaatcaaattgatatgataggattgcaaggtttggaaggaaaagcgaagcacattcgcaaactgattttgaccgctttggcggaggctggctcaggacatacgggcggctccttggacttggttgacatcttcacggtgttgtatttcagccatttgcgccataatccaaaaaatcccctttgggaaggccgcgacaaggtggtgctttccatcggacatacggcacctgtgttgtatgcaactttagctacggcgggatatttccctgaagacgagatgcttacgctccgaaaattaggcagccgacttcaaggccatccaa

SEQ ID NO: 1339 - DNA, 16504 bp, synthetic construct
  source 1..16504: mol_type = other DNA
  misc_feature 1..16504: note = Synthetic
taaggactcgcttttctattgtacaaacagggcactggcatctgtaggtacgaacttatttgtgaattactcatatgtataaaattaattttgaatagttacttatgtaattatttttatagagtgattgaagtgctgggatggattgcagatccttttctaaaggctttagtcactctttttttattttttccagttgcgattggttactataccataagctttgcacttgttgagttttaattattttaaaattatgattatggaaaacattgaaaatacaggacttcaaagatttatcgaagcccaaaacgacagttatgaccaagctttgaaagagataataaacggcaggaaattgacgcactggatatggtatatcttcccgcagatgaaaggtcttggtttcagctataattcagagtactatggagttacctccttgcaggaagccagagattatcttgaaaatgaattgctccgtaaaagacttttcgagataacagaaagtctgcttatgcataaaggaaaagacatcgaaagcattatgggagatattgatgctttgaaacttaaatcaagcatgacgctgttcgatgcagtgaagccgggtagcatattcggcgaagtgctcgacggtttttatggaggggagaggtgtagaaggacgttggaaaagatacgttgatatatgggtggtcccaataataaagataccaattagtatttatggataaagagaaaataaaagaaataataggaagtaatctgccttctggtattggtttaagtttttcagatgatacacttgaaatcgtattgaatcgtaagtcagtattcggaaatatgcaggaggatgcatctgcattcgagggatggatattgtgcataaaatcagaattggagaataaaggatatcaggtaaaaaaagtaaacataaagttttgtgacagctttcagatgggtgactctccaaaagagaaacaattctgttaccgtctgtttaaatgtagccggaattatggctggaagataccggaagatgcaatgataatggcaaatgtatcttcactggacagagcggtattgacatgtccgaaaaatgatgcagcaagcatcgaagtggcacagaacgcggaagccagactggaacgcatatacatagaagctcaaaagaagaaaggaaaggttataaaccaacagttgcccatagggctttttaaggacaaagtggccgacgttaacagattgactctgacttcatttctcgatatgtgggaaatagaagaagaaaccatgaaaatctatgaactgaaagccaaaggaaacaataaggtaggtataatatccgaactcctgtattataccaacatgatgtcggacatactcaatggtcgtttctattttgagccgaacagcaaggattttaggggagtggaaacgttaaagaaaagcatcggaaagataaaatatctgaaaggagtatttcttacggatactcttcatccgttaatttctgaaaataagaaaaagcttgccgatgcaatggcgtttgtttccggagctgtaaatgtatcatttacgtttgagaaaaacactgatgatatatcggactatagcgattatatgggaaggtagtgcgagaatcatgaaatttttcttgatgagaaaatgaattgttggataagggggtgtatcgtttggttgatcctcatttgatagtagaaactattgctaaggatgataaatatggggaattggtgaggtatttaagggtacactatagttgagggtaataaagggttactttcattaagcttttgagacataaaaaatcccccgttaaaggacgagggaacctaatgttttcacaacggaataatccttattgtgaattgcttcaaatcatattgcaaatgtaaagaaaaaaatatatgttcaaaatgattttaagtaaaattatattatatttgttgcaaaacatatataatatttaccatgaaaaagattttaggacttgatttgggaaccaacagtataggttgggcagttataaataaagcggaaaacgaaggtaaagatgtcctgtgcggtattgaggctgctggtagtagaattatacctatggacgcaactattatgggggattttgaaaagggtaatagtgtttctcagacaaaagatcgcagggaacatagaagtacaaggcgtttgtacgaaagaggtaaattaagacgcgaaaggttgaatagagttttgtctgtaatggggtttttgcctgatcattatgtttctcaactagacagatatggaaagtttctttccaatacagaacctaaactggcatgggtcagaaatgctgactgcaaatatcattttctttttatggattccttttcagaaatgcttcaggagtttaaaacaaatagtccacaatatatttctgaagaatctaaagttccatacgattggactttgtattatcttcgaaagaaagccttgactcacaaggttactaaagaagaacttgcttggattctgcttaattttaatcagaaaagagggtatttccaacttagagatgaaagtgaagaggaaaagaagccaagtaagatcaggcagtattttgaacatcaaaaggtggtagatattatagatacaaacgaagtttataagggcttgaaagttcttatcgtaatattggcaaatggtatctcaggcaaaatctttaaaaaggaaatacctgattggattggtgttgagaaagatattattgttaaagtagatattgataaggatggtaaagataagtttaatgaagatggttctttgtcgtgcagattcaatatacctaccgaagctgaatgggatacagaatgggaacttataaagcaaaagacacaaaacgaccttgatgcatcaggaaagacagtaggtgagtacattttcgatacactgctgcgtaatccggagcagaagatacgtggaaaacttgtacgtactatagaaagaagatattataaagaagaaatcaacgcaatacttaaaaaacagaaagagtttcatcctgagttaagtgatagagctctttatgagaaatgtgttgaagaattatatcccaacaatccagcacataggaacatgatgctgatacatgatttgtcttatttccttgtaaatgatatattattttaccagagacctttaaagagtaaaaaatctttgatagatgaatgtccttatgaatcacacttatatattgataaaaaatcgggtgaaagaaaaccggtagcagtgaaatgtatagccaaatcccatcctctatatcaggagttcaggctttggcagtttatttcaaatcttcgtatatatcaaaagacaaaagaggtaggtaattctctcaaagtagatgtagatgtaacaaatgagttccttaaaggtgagaatgattatgtagaattatttgattggcttaatactaagaaggaaataaaacaggaagactttttgaagtataagccattcggatttacaaaaggcaatataaacaattaccgttggaattatgtggaggataagatatatccatgtaataaaactcattatacaattttaaaagggcttgaaaaggctgatattacttttgatgagtttataagtcacgattcattagcagaagaaaacttgtggcatatattatattcagtttcgagtaaagaagagttaaaacatgctttggagtcatttgcagataaacgcggtttgagtattaagtttgttgatgcttttataaatactcctgccttcgaaaaatcgtatggtgcatattctgccaaggcaataaagaaacttcttcctctcatgcgtatgggaaaatattggaaggaggaaaatatatgtgattctacacgtgaaagaatagataaaatcattacaggagaatatgacgaaaatatacgcgacagagtaagggagaaatctatcaatcttacagatatcactttgtttagaggtttgccgctatggcttgcgtgctatgtggtgtatgaccgtcattcggaagctggaaatacagagcggtggacatctccttctgatatagaccattatattagaaaattcaagcagcactcattgcgtaatcctatagttgaacagattgtgcttgaaacattgcgaacagttagggatgtgtggactgaagtaggaggtatagatgaaatccatgtggaattaggcagagaaatgaagaatccgtctgacaagagacgcaaaatgagtctgcaaatgcaggagaatgaaaacacgaacttgcgtataaaggctcttttggcagagtttataaacccggaattgggtattgaaaatgttcgtccttattcaccttcacaacaggatttactccgcctttatgaagaaggagcctggaactctcctgaaatagatgaaaagcaagttgacgaaatgcttgccatattgaaaaagtttaatgaaacagactctagtaaacgacctacaaagtctgagattaagcgttaccgtctgtggcttgagcagaagtatagatctccatatacaggtactcctataccattgagtaaactcttcactactgcctacgagatagaacatgtcataccaagatcacgtttttttgatgattcactaacaaataaggttatttgtgaatcagaagtcaataagctgaagggtaatatgcttggttatgagtttataaagagtcattatggagaaaaagtacaattatcatcaggctctgaggtacaaatattttcggtaaatgattatgagaagtttgttaaggatcattattcaaagaataaagcaaaaatgaagaaacttcttatggatgatataccagaaaagttcacagaacgacaaatgaacgacagccgatatataagcagattaattgtttctttgctttcgaatatagtaagagaaaaaggcgaacaggaatcaatttccaagaatgttttggtttgtacgggtggagtgaccgaccgcttgaagaacgattggggtgtgaacgatgtatggaacaagataatacttccgcgtttcaagagaatgaatgagattacagatagtacagattatacctctgtaaatacaagcggacatataatacctgcaatgccactacatttgcagaaggggtttaacaagaaacgtatagatcatcgccatcatgccatggacgctattgtgattgcttgtgcaggaagaaacattgtaaattatcttaataatcaatcctccaagagcgatgtaagccgtcatgatcttcgtaatttattgtgtgaaaaggataaatcagacagaaaagagttgattattaagccgtgggatacatttactcaagacgtttattcggttctatcaagtatcattgtaagtataaagcagaatttgagagttataaacaaaactaaaaacatttatcagcgtaaggaagatggtaaagttataatatcaaaacaggagaataacattaattggtgggctataagaaaacctttgcataaggagactgttagcggtgaagtcaacttgagaaaagagactacaataagtttgaaggaggctattgataatcctgcaagaattatcgataaggattttaagaaaaaattgcgtgaacttattcttatggggtacaatgaaaaacttataaagaagtatttttatgataataatgaaagttggcaggatgtgaatctgaagaagattcctgcatattactttactaaagatacaaatgacaggtattttgcctcgcgtagtctgcttgatgaaaactttgacaaaaagaagatagaaaataaagttacggatacaggtattagaactatcttgttgagacatcttgaggtagaggggggtgattctaaggtcgctttttctccagaaggtcttgagcgtatgaacaaaaatattgaaatcttgaatggagggaagaaacataagccaatctacaaggtgagagaatatgaaaaggcagaaaagtttgcggtaggaatgagaggtaataaagcctcaaaatttgtagaggcagccaaaggcactaatttgttttttgcagtttatgataatggtaagaaacgctcatttgctactgttccgcttaatgaagtaataagactgcaaaaagaagggttgccttctgctcctgctaatgaagaaggtttacttccaaagtttgttttatctcctaatgatttggtatatgtacctacggaagatgaattgaggagtggcttgctgccggaaaatcctgcacctgaaaggatttataagatggtgagttgtacaggatatcaatgcttttttattcattttagtgtttctggagtgctgtgtgataaaaaagaattttcaagtctaaataagatggagagagccatatctggtgaaatgattaaggaaatatgcattccacttaaagtaaatcgtctaggtaagattatgtataacttgtagttaaaactatattaattgtaatgctttatgataaagaagacattgtattttggaaatcctgcgtatttgtcgttaagaaatgcacagctggttataagacttcctgaagtagtaaatagtaattctcttccagactcatttaagcatcagtccgaaataaccaagcctatagaagatataggtgtggttattttggataacaagcaaataaccataacaacaggagctttagatgctcttttggaaaacaattgtgccataattacttgtgatagtagaggtatgcctgttggtatgatgctgccacttgagggaaataccattcaaagtgagcgatttaggaaacagattgatgcatccattcctttgaagaagcaattatggcagcacaccgttcaggctaagatattgaatcaagcatcagtgttatcagtatgcaaaggagaagaaataaaatgtatgcaagtatgggctaatagtgttaaaagcggtgattctgaaaatattgaggcaagggctgctgcttattattggaaatcgttgtttgcagaggtggatggttttacacgcgaaagagatggtgtaccccctaacaatcttttaaactacggttatgcaattttaagagctattgtatcaagagctttagtttcaagtggattactcccaacattgggcatacatcaccataatagatataatgcatattgtttggcggatgatataatggaaccttatagaccgtatgttgatcgtttggtgtacactatttataaaagtatatttgatacttgtgatggtaaaagtattgaattgaataaggaaataaaaacttcattattgtctatccctactatggaagtaattattggtggaaaacgaagtcctttaatggtagcagtagctcagacaacttcttcattgtacaaatgttttgatggagaattaaggcgtattcagtatccaattattccaatttaacgtatatgtaatataaaacttttttagagtaaatattcttttatggaacgatttagtgaatatagggttatgtggatactcgttttttttgatttgccaacagaaacaaaaaaagaaagaaaagctgcatcggattttcgcaaacttcttcagcgagatgggttcactatgtttcagttttccatatatatacgtcattgcgcaagtagtgaaaatgcagatgttcatataaaaagagttcagtcatttttaccagaattgggacaggtaggaattctttgtataactgataagcaatttgcacaaattaagattttttatggtaagaaaattacaagtcctaatgctcctggacaacagctggaattattttaaaacaatataacccgctagaagcgggttatattgttttaaagaacagcatttttttatttctaacaatgcttctaatagattgaagcatagggcgttgtacgtgttgtgctgttcttgttagcacaaagataatgatttgaaagcaattcacaacaacataggaactttccatttaaaatccaaagctgttcttgttagcacaaagataatgatttgaaagcaattcacaacaccaggaccataaagacctgataagcgaatgctgttcttgttagcacaaagataatgatttgaaagcaattcacaacagatgttgatgattgccaaattgaaatgaagctgttcttgttagcacaaagataatgatttgaaagcaattcacaacactgcatttcgtttcgtggatggcaagacggctgttcttgttagcacaaagataatgatttgaaagcaattcacaactggattctataaatcaagaatagatgcaaagctgttcttgttagcacaaagataatgatttgaaagcaattcacaacgccttcttcagtttcaacgccggtaaaaacgctgttcttgttagcacaaagataatgatttgaaagcaattcacaacaggtcacagcccgtacattgattagaatcggctgttcttgttagcacaaagataatgatttgaaagcaattcacaacaatattttgattcatacgatgaagtcagggctgttcttgttagcacaaagataatgatttgaaagcaattcacaaccatgcaacaacaactgcaggatgatgcacagctgttcttgttagcacaaagataatgatttgaaagcaattcacaactcctgaacatccttaataaaatcctcgaagctgttcttgttagcacaaagataatgatttgaaagcaattcacaacttgttctatataattaagctggtttgatggctgttcttgttagcacaaagataatgatttgaaagcaattcacaacaacggagaaattaatttaaaattagaatcagctgttcttgttagcacaaagataatgatttgaaagcaattcacaactatgttcactgagggattatattcacctcgctgttcttgttagcacaaagataatgatttgaaagcaattcacaacgattaggagaatagaggaatttattaaatgctgttcttgttagcacaaagataatgatttgaaagcaattcacaacataattcagtcaaacataagaaacaaaacgctgttcttgttagcacaaagataatgatttgaaagcaattcacaacagatgcacagaacagatgagcgagaaagaagctgttcttgttagcacaaagataatgatttgaaagcaattcacaacatatttcttttttttgccaactttgcacaggctgttcttgttagcacaaagataatgatttgaaagcaattcacaacgtatgactccttattcagtagaaagtactgctgttcttgttagcacaaagataatgatttgaaagcaattcacaaccaagccttgataatcaagaggaagaacccagctgttcttgttagcacaaagataatgatttgaaagcaattcacaacccactataatcgaacagtatctgaatctcgctgttcttgttagcacaaagataatgatttgaaagcaattcacaactgcacaggcaagtgatagttatgatactgagctgttcttgttagcacaaagataatgatttgaaagcaattcacaactcttcatctttcattcacttttacacaaaagctgttcttgttagcacaaagataatgatttgaaagcaattcacaactctttaaacttgcatatattatatattaagctgttcttgttagcacaaagataatgatttgaaagcaattcacaaccatacacaagttttcttgtatccttgtctgctgttcttgttagcacaaagataatgatttgaaagcaattcacaacataatacaagaaatataatgaatatttttagctgttcttgttagcacaaagataatgatttgaaagcaattcacaacagctaatctacattcagaagattaagctggctgttcttgttagcacaaagataatgatttgaaagcaattcacaaccgagttcaaaaatagaggagctacagtctgctgttcttgttagcacaaagataatgatttgaaagcaattcacaacttagaagttttccatactgaatttattctgctgttcttgttagcacaaagataatgatttgaaagcaattcacaacaatattctgggtatgctttggccgcctggagctgttcttgttagcacaaagataatgatttgaaagcaattcacaactatcatgcttatacctttattggtattttgctgttcttgttagcacaaagataatgatttgaaagcaattcacaacagtatcttaaacttatggaacaacagaaaggctgttcttgttagcacaaagataatgatttgaaagcaattcacaacaactgctccatgctgtcaagtccggcgtcagctgttcttgttagcacaaagataatgatttgaaagcaattcacaacgaataccgaacagtacacaacccatacggggctgttcttgttagcacaaagataatgatttgaaagcaattcacaacgatatgcttgtaaacgtcattcttaatatcgctgttcttgttagcacaaagataatgatttgaaagcaattcacaactcttttggattgctcttctaatttagataagctgttcttgttagcacaaagataatgatttgaaagcaattcacaactatcgaagctcgtcatagataccgtgtcctgctgttcttgttagcacaaagataatgatttgaaagcaattcacaacataattactaacgctatttgttctgtcctgctgttcttgttagcacaaagataatgatttgaaagcaattcacgacaacataggaactttccatttaaaatccaaagctgttcttgttagcacaaagataatgatttgaaagcaattcacaacaaagcgtttacgtaaacattatgcaaaatgctgttcttgttagcacaaagataatgatttgaaagcaattcacaactccagagtacttcaaacggaacaaaataagctgttcttgttagcacaaagataatgatttgaaagcaattcacaactatcgcaaatataatctttattctttaagggctgttcttgttagcacaaagataatgatttgaaagcaattcacaactaggaacgataaatagtgtaacagcacgtagctgttcttgttagcacaaagataatgatttgaaagcaattcacaacagttctaccaccgtttactttggtgggcttgctgttcttgttagcacaaagataatgatttgaaagcaattcacaacaccagtcaaagaattttgtaacatctttagctgttcttgttagcacaaagataatgatttgaaagcaattcacaactcttcggaaatagtaaggaaaaattttctggctgttcttgttagcacaaagataatgatttgaaagcaattcacaacgcagattgtataactgatatagataaaaaagctgttcttgttagcacaaagataatgatttgaaagcaattcacaacaatatgacggccgtcctgttcttgataccgctgttcttgttagcacaaagataatgatttgaaagcaattcacaacccgtcaacgtagtgataaacgggaaaatcggctgttcttgttagcacaaagataatgatttgaaagcaattcacaactaggaacgataaatagtgtaacagcacgtagctgttcttgttagcacaaagataatgatttgaaagcaattcacaacataattctataaaacataaaaagcaaaatggctgttcttgttagcacaaagataatgatttgaaagcaattcacaaccaatcaatggcatactactgacagttacatgctgttcttgttagcacaaagataatgatttgaaagcaattcacaactatcagctacattagtatcaacaaggtttggctgttcttgttagcacaaagataatgatttgaaagcaattcacaactcgatgccattttaaatttctattataacgctgttcttgttagcacaaagataatgatttgaaagcaattcacaacagaaggaatgagtgtatatgcgtctgacagctgttcttgttagcacaaagataatgatttgaaataatttacaacaaattaatatttatttctacgatttgttatggtatattttatcgttttgatagaagttatataagataatgcacaaatgttatatactaataattaaaaaaaatatttggataacataaatttattgtatatatttcgtaaacataaatttttgtaacctttagaatttaaacttatgaattcaaaaattaaaatttgcccgaattgtggaaatgatatgaatttgggaaagagattttatttctgtcaagaatgtggcatgtctttgcctataattgacaatattcgttcagttaaaaaactttattcttctagatatgtatttataagttatggacatgattcatatgctgagtttgcgaaccgtttatgtgatgatttaaagataagggggcatcacgtatggactgaccttgaattgaaaataggtaatgattgggagtatagtattgaagatgcattaaacaaagttacatctcataaaccaaatggatgttttgtgctattgatgtcaccacattctgttaggcgtcctgatggctattgtttgaatgaattgtctgttgctattagaagtggattatttcttattcctgtaaaattacagagtatagaacctccgttgtcaatagctagaattcaatatttggatatgtctgaatgcttattgtctggttttagtgaatctatttatcagaggcagttgggacttctagttaacgccatagaaaatgatgaagttaactttgatggaatgcagtctcgtttaataagcctgcttcgtcctattgagttcaagaatgaaataaaaaaatatatgagaaggtttactggacgtcagtgggtccttaaacgaattagggagtggttatatacccctaatgcttcaaaggtattttggctaacgggtggaccaggggtggggaaaactgctttgtctatatggttaagttgtcgtgaaataccggagattcatgcatggcatttgtgtcaacactcggatacgttaacaagtaatcctaaaaattgtgtactttctcttgcatattatttatcttcacatttacaggaatattttgataaattgtgctcaatgaatttggaagagcttgttaatctaactaacgtaaatattaatactttatttactagattattgttggatccgttgaacgagatagaacctccacaaaaacctgttgctattttgatagatgctatagacgaggctggtatggagaacggagaaaatgtattagccaaatttattggacgttatttctcggaatttcctgattgggtaaggcttatagtaacaagtcggccggtattggaagtggaaaagtggtttagacaacttaagccggaaattcttgatacggcagatgctagaaatgtagaggatatacgtttgtatgtaaagaaaagaattgcagataaaaatcttacggtctcagaaaaaatagatatcgaggaggctataataaataaaagtgaaggagtgttcttgtatgcagagtttgtatgtgattctttggataacggagatcttgatgcgttgaaaccttcatcatttcctgccggattgtataatacttatgaggattattttgaacggcgtttcccagtgatagaggtatatgagaaggaaatattacctttccttagtttgattgtagctgcaagggaaccgttgaatttacaggatatagacagattttttggcgtaaagaatgttttatgggaagaagataatatttattttttgacaaagaaagtaggatcgttgttcaaagttaatgataatattattgttccatttcataaatctataatagattggttgactaaagataagaactcaaaatattatattaataaacgtagaggggacatgtgttttattgaatgggctgaggcatttaataatgattacacaaaacttccaaactactttcttaaatttctagtaactcattatattcagttaaggatgtttaaggaagtagagaatgtacttataagttatgaatattttaatcaacaagtttgcagactgggctttgatgatgctttgtccatatatttctctaatttaaagcaatttgcccaatgttgtattgattcattggaaaaaatatatctgtcagacttttttctaaatcttataaataatcatagaagatatcttttagataatggttattttttggatcttagtacaatgaattttagctgtatagtttcaaaattgttgatttctcctgtttgcgaagtttcaaggtatattgggctattgtattattattatgcgattgaagatttttcatcagtaattagccttacgcataaattattggagaattcatcttttataaatgtttcggattattctaaatctcaaatgtatgaggtttatggattaagtcatagaaaattaggaaactttatgatagccagggaagcttttgaaaatacagctaaattaggtaaatcctcaaataactcatatcaagtttcattgggatatgcaaatttggcaaaaatagaatatcatcagttgaattttgaaaaagggtatgaatataatcatttggcttttgaatctttatctagaagtttggatgagttagataaaactaagggagataaaactattagtattcgtttgtttatggctgaatataaaagattagcagctgaaacatatatttggggatatgaattttcaaaagccaaagaatgtttagattatattgaaaacgtatattcgcaaattaaaattagggatagatattatgttaggtatctttacacgtctgctttgtataatatatgtatatctgatttggatttggcgactatgcttttggataaagcgaccatgcattgtagaaatagttatgatatggctactgttttttattataaatcgataataatgctagctaatgattttctttgttgtaaaggtaaaatagatgtcctgataaatgagtcagaaaaattgttttcaaaaattaatgcaaacattgagttgacagaaattaggattcttagattatttgtcgatatgtcagctaaagttgaagtcgatttaaataatatccggtggtttaaatatgtatatgatttttttgttaatttattatctaatgtatatggaattaaaagtattgggaagtggaggatggattccgacaagtgctcgggaaacttgttcttatatagtgaataataatggggatattttgtttcttgatatggggactggtatttcaaggtttgatttgtttgaacatgaaataacaggtgaaagagttaatattgttttgtctcattatcatcttgaccacataataggtcttgtatattttctaaatgtatgtagggataaggatatatatatatgggggccaggaaaggatttttatggcgcaacatgtaaagaaatattagaaaaaataatttcgcctccttattttggaagacctattatgaatttttccaataatgtagttatttctgattttaggattggtgtaaataatataactgataatttgatttttgagacggtaatgcaaaaacattcctcaccgtcttttggtattattgttaataataaagtatattatgccactgatacatctgtattgaatgatacatttaaaagatctgtaaattttgactgtctgcttcatgaatgttggactttggataatgaaatgtcaggatctaaacattcgtcattggtagatataataaaaatgtttgatgaatatagaattgaaaatttgaaattgattcacattaatcccaattggagagagattgaatttgaaaaagctggtaagatgataggaaaacgtaatatatcatttgcaaatgatggtgacatctattttttagataaatgttcgtataaatctgttaatttagaaaatttgtaattatggaaactaaatctgctcaagtggttattttttcatcaggaagtcagaggaatactatattgaagctttctgaggaactggaaaaaaagaattgtaattgtacgttatggacaaacctgtttacccgtcagaatgataacagtaaatttgctttgttgcctaccttgctgaaaaaaatcccaactttcgacttcgctataattctggctacacccgatgattcggttaacagaatacgcgacggggtagaagaaaatttccagtgtatgagggataatgtaatttttgaaataggattgtgtgtcatggcactgggggccaaccgtacaattatacttcagaatgagagtgtacacttgtttgatgacctgataggggtgtctggtgtaaataatact

SEQ ID NO: 1340 - DNA, 16500 bp, synthetic construct
  misc_feature 1..16500: note = Synthetic
  source 1..16500: mol_type = other DNA
aagaacgacggagaaacggcggtaacgcttgaagtgaacctttgggggatgcccgaaggcgagtttataagcacgcgatttgaaacaggctggaatcccgaaattatacgcgaggtaaaagccacaagtttaactaacgcccttgtttggggctattaaaacatactattatgggcatattcataggcataggcaacacgaagcctacatttccttacgactactattatggcgtgaagattgacttaaacgtagcagaccctgcactcgtcagagtgggaagacccgaactgcacgtttcgttacccgttcagtcgttgatgcgccgctgtttgcttgacgacgaaggcaaggtaacggcatacttgcatccgacagacagcacgaagacagacacgggcgcagccgccgacctttcgggagcttccggcatggtcatggtggagatacccaagcactaccgtaaattcgagttcgacgggcagaccgtaaccgcgcttatttcgttgtacccccttccgggcttccacgttgtgccgaagatgtaccgaagcgcatacgaagccacggtagaccgcacggcatcggctacgccaaaacttgcaagcgtggtaaacactaccgaagccttccggggtggaaacaataacgccgcatacgatggaacgtatagaaccttcctcgggcttccggctacgcagatttcattaaccaacttccgcaagtacgcacgaaacagaggaacggcagggcttaacggcgcagggtggaactgcgacctttacgccgcgcagcttgcaacatattggctttacgtcattgagtacgcaaaccgcaactgccaagccgcatacaacgcagaacctacaagcgaggggtacaagcaaggcggattgggagacggcgttaccacattgaacggtacgaaatggaacaactacaacggttattacccgtttgtgccttgcggctttacaaacagtttgggaaaccgtaccggaatagttgagttcacgatgccggacgaatacgacacgggggtagtaaccaaggtaaacgtaccttcttatcgaggtgtagaaaatccgtttgggcatttgtggaagtggacggacggctgcaagtgcgagatacaaagcgacacggacggagctttatcgaagttctacgtttgcttagacccttccaagttccaagacagtagttataacgactacgatttgcgcggagaattgccgagaaaagaggggtacgttaagcgaatgatgataggcgaacacggcgacattatgccgacggaggtaggcgcaagttctacaacccactttgcggactacttctataccaatataccggcttccggcgcggctatgaggggtgtcttgttcggtggtagcgcgaatcacggcgcgcttgccgggctctcgtatgcgaatacgactcgcacggcttcgtatacgtatgcgagcgtcggctctcggctttgctttattccggcgtagcattacgtcacgaaacggcaacagaaaacacgccccaaccgccgcgccattattggcggttggggtataacagaactaaaaacaaattcagtcatgaacgaaaataacaatacccggaaggaacagcaggaagatgacggcagtttgtcgtttttggcaattccgcaagacgaaggaaacaagcatttcaactgcagggaaacgacccagcagaaattaatcaaccttacgttttgggtttgcgacttcatagaaggagttaaaacgaaattcggcgcggaacgcttcttagtgaagataaagaagaaccgggatgacaaagacagcgaagccgaaaagttctttaccaattcaagcgaaataaagtacgttttgaaggagataaagaaacggaacgctttccctcgccgggttacgatgagagcaagcggaacacgctattactttgagtaaaaatatgacggttgtttgttcttcgggtgtcttgttcggtggtaacgcgaataacagcgcgaatgccgggctctcgtatgcgaatacgaataacacggcttcgaatacgaatgcgaacatcggctctcagctatactgatactttttgtaaagcaatataaggacaaagaccgcgccgacaaaaaggcggaaaacagtaaacattaacgggatttggtagggaaaccgaagaaccccatttaatcagcaaagcaagttatgaaaaggttgggcaacctatacgataaaattataagtttggaaaacttacggctcgcagacaagcgggctcgtaagggcaaacttaacacctacggcgttaaggtacatgaccgccacgccgaagccgaccttttggctttgcacgaagcattgaaggcaggaacttacaagacttcggaatatagcaccttctttatttacgaaccaaaagaacgtgagattttcagactaccgtactttcccgaccgcattgtacaccacgcagtaatgaacgtgttagaatctgtatgggtgtccatattcacggcggacacatacagttgcatcaaagggcgaggaatacaagcggcagcggacaagttacggcacgtgatagaccgggacaaacccggttgcgcctattgtctgaaaattgacatacgaaagttttacccttccattgaccacgctatattaaaacggattgttcgccggaagattaaggacacacggctacttagacttcttgacgaaataatagacagcgcggacggactgcccatcggcaactacctaagccaattcttagcaaacctcatgcttgcgtactttgaccattgggttaaggaaaccaagcgcgtaaggtattatttcagatacgccgacgatattgtagtattgcacagcgacaaaagggtattacgtgccttgcttgccgactttgaacggtatttgaacacggaactaaatctgtttgtcaaagacaacaaacagattttcccggtagcgaaagaccacaaagaccggcacgggcgcggcattgactttttgggttatgtgttttaccacaacgaaacacggctaagaaagcgtatcaaacagaacttttgccggaaggtagccaagttgaggaaacgtaagaagccgataggcgaagcgcagtttatgcaagccgttgccgcgtggtggggctgggcgaaacatagcgatagcgagtattttattaacaagttaaataaaatttcaccttatgaaatcaaattcaaacgttagaccggctattattcaagatttgggtaacggctcgttccattacaactacaacgtaacggaaagaaagatagaagacgaaaaagtaggcgaaaagaccgtttacgactacgatactgtgcaggtgtgggaaaagccgacttacgagaacttgacacgcgccatcatacgcagcgagatagacgaaaccgaagaattttctttgattaacgactactacgccgcacagttgggaatagaaacggacgaagaccgcaagaaaaaagccgtaaacgactacaagacctacctcgcgcacgttgcggagataaagcagatggtaagggatgaccttgctacggtaggattggacgaaagcgcataagcctatggggacattaacagaaacggtaaacgtgattgtcggcatagtcgcatcacttggcggcataagtctgattaagttccttttcttcatgcgtccggaaaggcgcaaggcacaggcggaagccgggcttaaagaagttgagaaagaagaacgtgagttgggcgtaatgaaaaaacttgtagaaagtttgcagcagcgaatagaacagcaagaccaaaagattaaggagcttaacgggcgcatggataagctgtatgttcagttgcacgaacaggagcgagagaataacgccctaattcgcgaaaacaacgaattgcggctcgcgttgaaggaagcggaatataacgtatgtgtacgcccggacgatgaatgcttcaaagggcggttgccgaagcgaacttattgcaggttgaaaaaacttgcgcaaggcgactatgacgctttctataaggacaacgacgacacggaagaagaaaccgataataaaaccgggaacaatgaggataacggaatacttgaaaagtctgataagggctaacagctttgacagtagcaagagtttcgcccttgtgctttccgtgttggttggcgcattgattgggctttgtgtttgcttctgccttttgtgggatgtgtgcagtaacggacatttggaaaccgacctcgaagggttggggatattcctgctttgtactggtgcgttcatggcagggggcggagtaaacaaagccctttcagagcggaaaaagactttgaataaagacggaggtattaacaacaaaaaggattaagctatggcaaagattgagattttagcaccgttcattttgagttgggaaggcggattttcaaaccacccggcagacaaaggaggtgctaccaacaaaggcgtaaccattgccacatggaagcaagtaggttacgacaaagacggcgacggggatatagacgtaagcgacttgcggctcattacagaagaagacgcggtaaaccgggtaatgaaaccgcactattgggataggtggaaagccgaccggatagaaagccaatcaatcgcaaatatagtggttgattgggtatggggaagcggaaagcacggcattacgggagtgcaaaagctgttgggggtgacggtggacggcattgtaggggaaaagaccttagccgccatcaacgcgcaagagccgcacgcactttttgaccgcatcaaacagacgcgcgtagagttcatcgaaaattttgtaaggcgtaacccgtcgcaaaaggttttccgcgccggttggttgcttaggctttcatatataaactacggaagtctgacgtacaacgctgtaccgcctacaaaacattcattcacggaaagataaccaaagacgacgtatgaaatggataggatatattatattgtggattttcctgccgatattgatatccgggtgcagttcaacacggaaggctgtaaaaggaaagtcagaaacgaacgtagccgccacgcaggaaacagaaagccgggaaacagaaaaccgtttggcggaagtgataaccgctaccgaaacaaacgaccgtacaaacgtggttatcgagttcacgaggacggaatacaacgacgggagtacggaaacaacggcagaacatgccgggcagatttccggcacgccggagcagaaccgggcagacctgcacaatccgaaagccgggaagaaaggcggcataaagtctgttaccaccggacggataaacatcaacggcgacaggacggaagcgactacgacgacacggaacgaagaaagccaaaagactacggacacaaatgtaggaacagacataacggcaagccggacagaaagccaagaagcggaagaaaagaaaacacctaaaacgggcttccttgattggattttcttagccgggatagtagtcgcagcttgcgccgccgggattacatacgctatccggcgtagaaagtagtaagtaagaaagcaaaaaagtacccgaaaaagcaaattcgggtactttttcgggtacttaattcttaacttgctgatattcagcgttagcagcggagagacagggtccaggaatgggcgctgaggtcacggagcgtcttgaagtcattggctgtagagacggtagtgatgccgacatcctgacgggcagtcatgtcaccgccgactatgagcgcctgcggcgaagggactatgctgttgttcgatgtccactcaaagccgccaccctgtgctgtacggtgcacccagcgtgtactattgttgagtgcaagcgatctgtagtgcaatgtttgcgttgtcgcactggctgtaccatacccctcattccattttccggacagagagagggtgttgttcaggaattccttgccggaattcttctcgtatgtgagtttcaagtcggctgcattggtgtgggtgcggtcgaaaatgtcttccgttagcagtctgctggtaccgtcgggcaggatataggtggttctggcatacgatgaaccgcgcgagaggttatggctgtagttgaggttgtagttgaatgtgacatcctccgacagctttgccaggttgttgagatttacgccgtgacggtagccgaacaggctgttgccgactggtgatgtgccgtggcccagaatgcccaccatgcttggggcatcttttgtgtcaatgccgtaatgcgctgttgccgcttcgccgcctcggcccatgttgtcgccgctgtacctcagctggtgctgttcgccactgctgaaatacatggcctgcagcgtggcatcccacagcggaccatcagcgtagccccctgcgcccaagtccatgctctttgtccaaacgccctttgccttgtccttgagcttcaggttgatggccgcgctttccggcggcacctggtcttgaagcgccttgacgtgctcgtggttctccatcacctgcactgttgccacatcttcggccttgataccctctgtggcgagattgtagcgcccctgcagcatgtcgaggttctctatgtagaaacggttgataggtgtgcccatataattgattgtaccgtcatcttcgatagtgattcccggtaactggcgcagcacgtcggcaatggtgcgatcgtgcccgcgtgtgtaggcagaaacaagatagttcagcgtgtcgcggtttccccacagcttctgcgcctttatgacgacctcgcgcaatttcatgttttcctcttccaccgtaatgttgcacgtctgcgaacggctttctatgcgcatcactttgggctttatgttgaatccggttgcccttatcagcatttcatcggacgcggctgcggcatccagcaaatagcgtccctgctcgtcggttacggaataagctacgatgctggagtcggaaggctggaccatggtgacgataacttcatttgctggttcggtgccgcaacgcacttgtccgctcacgtttatcgtgccggtttgggcgcaggagtcaatatagccccacgtcaaacaaactatcatcaatattattcttcccatgccgcaacatatcagtaatcaagcggttggaactttgccggcttcgtatcaatcggaactcgacccaatatcagcgtacctccaagtacagtaacattactcaattctgccggcttgatataatatgcgggattagaaacataattaggattgccgaataaccgattgcgcagttttacgaatttggagcgtgaacatttcatggcttcttcaggtacactgtaggttacagcttctttgacagcctcaacgttacggcattcaaagcagtggatgccgtcatcagatactgcccgcatgataagacccggcagaccattcaaccgccacggcccccagcgggtaggcaagctctctgcgaaccatacattccataacctgccgccgtattctcctgtagctttctgacaagggtggccgcatatcgtatcgtattcggcctgcaatgtccaatttatcttttctagtttttcagatgtaagatatcggtagggcggtacggtttccaccgatgtgatatttccttgcggatagttcagccatgtggtcggcacgtacagcagttgttctgacctgtcattctcaccattatgtcgcttctgccccattgtgcatgccatgtccttggccacctgtaacgtaagaccgtaattcacatccgtgtcttcgccttgtgcatttgaggtatggcacgtataatcatagtcagccactaaaaaagtatgagcgatactgtctttcgtctgcccataagcagcaaaagagaaaatacataacattgcaaaaacaattttcttcttcatagtatatagtttaattacaaatattcagcgattattgtctgtggtttttcttggtataatcttttttactaaaacgaatatacttctaaaaatataaaatgcaaattatgcaattattttggttagtgtattttaagacagtttaaaacagatttaaaataataataaaatatgtttcactgaaatctgaaatatggcgataaaatcgtagaatttatagtgtcgaattatagtatttaaacgattacgactattttccctgagtttaaggttacacagatttatttgaaatacctatatccttatcaggtacgtcgacagtatacaacttataactaaactgaaaagttgcataacattcttatgatatacgaaaaggaaaaccgttgtggtatggggaaagtatggtgattatatgtaatttagtgttgaattttatgtcggtggtataaaactaaaaaaagcgacactgtgtgccgctttaaatgtttacacaacggaataatccttattgtgaattgcttcaatttagttccgcaaatatattattactatttggtaaatgcaaatcagagattgaattatttttaccataatgacttttcatcgtatttatatgctgtatttggtatgaagtatttgcagtttactttattttttttgatgaacttcgaattatttataaattatttaattttaatttcatacatttggaaattgaaactaaatacttaaatatatgagaaaaatattaggattggatatcggaacaaacagtataggttgggcggttattgattcagttataaatagtgaaaataaagaagagcttcgaggaatatcttctgcaggtagtcgtataataccgatggatgcggctgcattgagcgatttcgacaagggaaataccaagtcgcagaccagcgagcgtacgagttttcgtggtaaaagaaggctattgcagagaaaagttctaagaagggaacgtcttcatcgtgtattggcacgtatgggatttttgcctgaacattatcttaagcatattgacagatttggaaaatttatcgattcgcaagaaccgaagatggtttggcgtaaggatgattccggaaaacagtcttttctttttatggatgctttcaacgaaatgttgtcggacttccggcaaaacaatccagatttgattgaaaatggaaagaaagttccttacgactggaccctttactatctgcggaagaaagctttgagaactaaagtaagtaaagaagaacttgcttggatactcctctctttcaatcagaaacgaggttacaaccaactgcgtggtgaagaggaggaagaagacaacaaaaaggatgtcaagtattatgccttgaaagtaatttcggtagaagattcaggcgaacgtaaaggcaaggatatatggtacaatgtttatctggaaaatggttttgtttatcgtagggcaagcagtgtgccattggattgggttgggaaaatcaaggagtttgtcgtgacaacggaacttgatgataatggtcagcccaagcgtgacaaaaatggtgaagtaaagaggtctttccgtgctcctgctccagatgaatgggctttgattaaagtgcggacacaggagcagatagataagagcggaaaaactgtcggtgaatatatctacgattctttgctaggcaatccgatgcagaaggtcagaggcaagcttgtgcatacaattgaccgcagatactacaaagatgaactatacataatacttgaagaacagaggaaacatcatgaagaactgagagatgcttctttgctggcagagtgtgttgcagagctctatcagcacaatgaatcgcataggaacatacttttgtctaaggggttcactaattttctgttgaatgacattcttttctatcagcgtcctctaaaaagcaagaaatctctgatagatgactgtcagtatgagtatcgagtatataaaaaggatggcaaactatgccgtgaatatcttaaatgtgttcctaagtcacatcctttatatcaggaattccgtatatggcaatttatttcttcactccgcatctataagcgcgagatgaaggtcggtgatgctttgaagacagatgtcgatgtaacccatgattttctttcctgcgaagacgattatgttaagttgtacgatatcctgagcgatatggaaaccattgagcaaaaaactttcttgggactcaaatttcttggcataagcaaaaaggaacagtcttcgttcagatggaattatgttgaggataaaaaatatccttgcggtagtacaagagcgcagattatttcaagactgaaaaaggcaggggtgaaccacgattttctcacaaaggatgctgaaatagaactttggcacatactttactcagtgtcagacaggacagagctttacaaggcactgaagaaatttgcttctaaaaacagtcttgatgaagcatttgcggaagctttgtcaaaaatgccggcttttgattctgagtatggagcctattctctcaaagctcttaaaaagctgcttccgctcatgcgtatgggcaaatattggagtgaagatgccattgatcaacacaccagggaacgcatcgaaaaaatcataacaggggagtatgatgaaagcatcagaaatcgggtacgtgagaaatctgtgcatctgacagatgtaacttcattcagaggcttgcctctatggttggcatgctatgttgtatatgaccgtcattccgaatctggcgaagatgtaagatggaaacaaccatctgatattgatgactatctgaagaagttcaaacagcactcactgcgcaatcctgtagtggagcaggtaataatggagacattgcgcgttgtccgcgatatttggcagaaagaaggacaaattgatgaaatacacgttgaacttggacgtgaaatgaaaaatccttcagacaagcgtaaaaagatgactgcgcagatgcttgagaatgagtatacaaatctgcgcatcaaggcaatgcttctggaattcatgaatcctgagttcggcatagagaacgtacgcccgaattctccgagccagcaagatatattgaggatttatgaggaaggcgcaattcagagttgcgacgacaaggacatgcctgaagatattgtggctataataaagaaattccgtgaaaacgatttttcaaaacgtcctacaaggactgaagtgatgcgttataagctatggctcgaacaacgctatctttcgccgtatacaggaaagcctatacctttagccaaattgtttactcctgcatatcagatagaacatgtaattccgagatccagatatttcgacgattctctttccaataaggtaatatgtgaagctgctgtgaatagggaaaagggcaatatgcttgcatacgagttcatcaagaattgtcacggtaagaaaattgaacttggtggaggtgattcaccggtaaatgtttttgaagttgaggaatatgagaagtttgtaaaggaccattacgctaaaaacaatgccaaactgaagaaacttcttctcgaagatattcctgatgccttcatagaacgtcagatgaacgatacacggtatatcagtaaggttgtaaagtcgctgttgtccaatatcgtacgtgaagaaggagagcaggaggctacatcaaagaatttggttgtatgtacaggcggtataactgacagattgaagaaagactggggagtcaatgatgtatggaacagaataattcttcctcgttttcagcgtcttaatgccatgacaggcacgtcggaatttacagctgaaaatcaatcaggccatctgattccggttgttccgcttcgtttccaaaaaggattcagcaagaaacgaattgaccatcgtcatcatgctatggatgcaatagtcattgcgtgtgcagaccgcaatattgttaactacctgaacaacctgtctgcatgcagtaatgccaagttgaagcgtcaggacctgcagcaaatgctttgcgacaaagtgaagacaagcgagaacagcggttatacacgactgttacggaagccgtgggcaacgttcacgcaggatgtctatagtgtgctttcaaacataatagtcagcttcaaacagaatttgagggtaataaacaggacttcaaataaatatcagcattatgacgacctatatttgaagaagataatgaagcttcagtcggccaatgaaaactgctgggctatacgtaaatctttgcataaggatacttattatggacaagtaaacctgcgtagaaagaagtctgtacctttgaaagttgctatagaaaacatcgatgcaatagttgaaaagtcactgaaaaagaagctgaaggaactcattacgaaacagtacggaatgaaggatatcatgcgatattttgaagagaatgcagatgtatggcaggatataaaccttaaaaagattgatatttactattttgccaatgattcagatgaaaggttttttgcaacgcgtaaacctttagatacaagttttggcaaatcgaaaattgaagatgaaataactgatactggtattcagaaaatactgctgaaacatttgcagaatagcggaggaaatccacaagtagctttctctcctgacggtattgaacgtatgaatcagaatttatctgcgcttaatgatggaaaaccgcatttacctatatataaagtaagagttttcgaaaaggccgacaaatatgccgtaggacagaaaggaagaaaaggttccaaatacgttgaagccgcaaaaggtacaaatttgttctttgctgtttatgagaaaactatcgaagatgtgaaaactggcaatgtcattaaaaaacgtatgtttgaatcaatttctttggttgacgcaataaggcaacagaaagagattgctttgaatggttcaagaaatacaagtaacaaaaatgaaccgctatttattctttcgcctaacgatttagtgtacttgcagacaaaagaagagatggaaagtggtaagattataaaacctatagatacacagagagtgtataaggttgtaagttttacaggtgggagaatgtttgttataccgtatggagttgcttccgtaattgttgacaaagttgaatattgttctttaaataaaatagaacttacagatgacaaggtatcaataaaggagcgttgcgtaccacttgatgttgacaggttgggaaatgttgtaattaaatcataaagcattgcctatgataaagaaaactttgtatttcggcaatccggcatatctttcattgcgtgacagtcagcttgtaataaagcttccggaggttgagcaaaatgctcagcttccggaaagcttcaaggctgaagcaacagtgactaaaccgattgaagatataggcattgttgtattagataacaaaaggattaccattaccgctggtgtgcttgaagcattgcttgaaaataatgtaggagtgattacgtgcgacagcagaagcatgccggttggtttgatgcttccgttgaacggaaacactttgcagagcgagcgtttcaatgaacagatttcggcctctgtacctttgaagaaacagctgtggcaacaaacagttaaaacaaagattcttaatcagtatgcagtgttgaaaaattgcagaggaaaagattttaattgcatgaaagtctgggctgacagtgtgcgaagcggtgatggtgacaatcttgaggccagagcggccgcgttttattggaaaaacatgtttccgcatataaaagggtttacgcgtgagcgtgaaggccggtgtccgaataatttgctcaattatggatacgcaattcttagggcagttattgcacgagcccttgtaggcagtggacttttacccactttaggtatacatcaccataataggtacaatgcttattgcttggctgatgacataatggagccgtacaggccttatgttgatgaacttgtgtgtgaaatagttgaagagatgtgtgatgatgttgaattgactagagatgttaaggcaaggttgctcactgtgccaacattggatgttgtaattaatggcaaacgtaatccgttaatgattgcagcttcgcttacaacatcttcgttatataaatgtttcagcgtggaactacgaaaaatttcttttcctgaaaaatagccataggtttgatatggacagatacagtgaatatcgtattatgtggattctcgtattttttgacttgcccacgcagacaaagaaagataaaaaacaatatgcactttttcgtaagaatctccagcgtgatggttttacaatgtttcagttctctatatatgtaagacattgtgcaagttcagaaaacatggatgtacatataaaaagagttaaatctttcttgccggaatatggacaggtgggaattctttgtattaccgataagcagtttgggcaaattcaattgttttatggagagaaagcaaaacctgtaccttcacaggggtggcaactagaactattttgaatatgaaaaagtcccacaaacgtgggactttatttcattatgcacagcaaattttattttctaaatctagttgtaatttattgtatatcaataattaatacagattcagttgtttgctgtagtgcaaaaatactaaattgaaagcaaatcacaaccgaaatacgggtattcagcaagtatcgcggttgtttgctgtagtgcaaaaatactaaattgaaagcaaatcacaaccaatatgagttaccctattcttacccttaagttgtttgctgtagtgcaaaaatactaaattgaaagcaaatcacaacaagtccgtagggttataactagacgcctgagttgtttgctgtagtgcaaaaatactaaattgaaagcaaatcacaacaatgagtacatgcttcagtttgagacgggggttgtttgctgtagtgcaaaaatactaaattgaaagcaaatcacaactcgagatgcacgacgtaacagaggacaagggttgtttgctgtagtgcaaaaatactaaattgaaagcaaatcacaacctatttcgtttgctagctcagcgcttgtaagttgtttgctgtagtgcaaaaatactaaattgaaagcaaatcacaacataagctgttgtattttaattgttagtatgttgtttgctgtagtgcaaaaatactaaattgaaagcaaatcacaaccgcgaatttcagcgttaccgaagaagacggttgtttgctgtagtgcaaaaatactaaattgaaagcaaatcacaacactagtttattaaatcgtgcctcatgcagggttgtttgctgtagtgcaaaaatactaaattgaaagcaaatcacaacaggcattagtatggataatgactttaagcggttgtttgctgtagtgcaaaaatactaaattgaaagcaaatcacaacgtactcttcgatgttatcaataataaattgttgtttgctgtagtgcaaaaatactaaattgaaagcaaatcacaaccatcccggcacagttgtacaactaccttaagttgtttgctgtagtgcaaaaatactaaattgaaagcaaatcacaaccagttagacttaaaagccttgtgagaatttgttgtttgctgtagtgcaaaaatactaaattgaaagcaaatcacaacatattctccctgtgcctgttcaccgtcgtgttgtttgctgtagtgcaaaaatactaaattgaaagcaaatcacaactccattccttcagggtacaagtcttctaagttgtttgctgtagtgcaaaaatactaatttgaaagcaaatcacaacaaactctaggctatgacgtcatagtatagttgtttgctgtagtgcaaaaatactaaattgaaagcaaatcacaacaaaaaagcagtattacaattttcaatgccagttgtttgcagtagtgcaaaaatactaaattgaaagcaaagttgtacatatactttctatataatctaaattgcatgttggtaattgtgctgtatttattaaattccttatctcggatagttgtgcctttccccctttccgccagtcggagtgtttccaaaaaaagatatatctttgcatctggtaaaaactttattctctgaatatcttcaaaaactgagatggacaatcgttatctggaagaactgaatgatgaacagcgcgcggcaatcgaatattgcggcgggccttcgctggtgattgccggtgcgggttcgggcaagacgcgcgtactgacatataagattgcctacctgctcgaacacggctacgaaccgtggtcgatactggcgctgaccttcaccaacaaggccgccagcgagatgaaggcgcgtatagcaaggcaggtgggagaggaacagtcgaagtatctttggatgggcaccttccactccatattcctgcgcatactgcgcatggagcacgagctgacgggattttcgcccaacttcaccatctacgactcggccgacagcaagagcctgct

SEQ ID NO: 1341 - DNA, 16488 bp, synthetic construct
  source 1..16488: mol_type = other DNA
  misc_feature 1..16488: note = Synthetic
cttgactgcggacggggtggcggtctttgttaccggggcgttgcagaggttgaaagatttggcttcgtagcccttgatttcgatgtagtccacgtcgatccagccccagctattggtgatggcgatggtgttctcaccggcggcaaggttcatgaccgtttcgacgtcaacgaatttgcccttgtcggtcacgtcgaacgtgactgcagaggaagttccgccaacttcgacgttgttgatcttggaaccaccgtaattgttcatatagtgaatgacgatggtgtatttgcccgctttttcgacggaaaccttagaaaaagtaatgtcgccgccgttcattttgacgtacttttcgccagaagcagcggtgcttgtgccgactgctgcgtcgccagagagggttgctgcttcagcttcgtactgaaccgcaaatgccgagcatgcggcagaaaggctgcatgcgagaagggcttttttgaaatccatgttcactccttaaatttatgttctcaaaaatataatgaaaaaagcaaaaatgcaacaacatttttgcttgggaaggaaaaaatatgtttatagataatttaagggtgcttttgaccgattttaggcgtttttctcgaccgttgccccgaatgtgaacgtgcgggattcgccgggcctgatgacgatcaagtcgcggtggtggttcaatgtatcaggttctgcggtcatcggctcgatggcaatgctcatgcggtcaggtggcgtgtagatctggatggcgttatattgttcttcaccggccttttgccagattcggagcgtcttggagtcgcttttgagttccgtgacggctaaaatgttctcaaaatttttcttgtttttgagaacgaacgggttttcgccctgattcaggcagaagcagtcgttgatgaactcgtcgttgatgaggcgtccacccacaaagcgggtgtccagcttgaattcgcctgtcgggatgtcggccttgtcaagaaccgcaaggtaggtttctgggagcgtcataacgagattgttgattttttcgccgagcgtgtagtaggggtgccaaccttcagaataggggaggtctttaggaccgatgttcgtgacggtcgattcgacgctgtagctttcgccggagaaagtgaccttgttcaccgcgcggaaggggaacgggaacccggtaaaagcacccggccagtcgatgccgaatgtagccgtgcatttttcgtcgtcgctttcaaagctgagcagcttccattccttgttctgcaaaaagccgtggagggcgtgcggtgcccagctcacgttgttcacgagctggtagtcgtttccgttccagttgaacttggcgtaggccacgcgtcccgggaagggggcgagtcggcagccggcgttcgtgtcgggacccatcttgtaaatgtcgtcgccttcgcggtagccgaacaaaaggtcggacataagcccgtttgctcctggaatgcgccatgcgttgaggccagcgccgtatccgctcagaatttcaaattcagcgccgtcgtcacgctgcaaaacaaagcactctacagtgctgataggacgggaaatgattttaaacttgctcatgtttttaatttagcaattaccgcctacttcctacttcttactgtctactaaaaaagctatctttcttcatatggattctcagacgattgttgccccgatgacgccagctggcgtgagtgcgattgccgcgcttcgagtcagcggttccaaggtgcgtgaagtggtgcgcctgctgtttggcgaatcggcgttcaagaatttgaagcctcgcgaagcaaaacttgcgaccgcgagagattaccgtaccgtcgtgaatggcgaacggaaaacggcccagatcatcgatagcctcctctacatcttttttgaaggtccgaattcttacacgggcgaagatgtgctggagctttatccgcacggaaacccgatcatcgtacgcgagcttttgcaggtcatcaaaagtgtcgagggcgtgcgtcttgccgaaccgggcgagtatacgcgtcgtgcatttttgaatggccggatggacttggtacaggcggaatccgtggccgacgtgatccactcggcgaaccgtgctgaactcaagaatgcccaccgtttgttgggcggtgcgctctcgaaaaaggtcaagacgctcacggatcaggtgatggacatttcggcccgtttggagctggatgtcgactttgccgaagaagaagccgatccggattacgcaaactgggaaaaaaagattgaagccatccgcgaaagcgtggaatccatcttgaagagtttcaagggaaatgctgccgtacgacgtttgccgctcgctgttctttacggcgctccgaatgcgggcaagtccagtctcgtgaacgctctcctcggtgaagaccgaatcctcgtgagcaacatcccggggacgacccgtgactttgtcgaagtccgcctgttccttgccggtggcgaaatccgtctggtcgataccgctggcattgccgacaaggcgaccgatgcgctcgatgccctcagtatggaaaagagcaaggaaatcctcgccgaagccgatatgaagattctcgtcgtcgacggatcagataaaaatggtgctttttcgtcatcctcgaccgaagggaggggatccattatttcttgtgttcgcaatagtgacgaagcaatccatcctgacttggtcgtcatttcaaagtcagacttgtttgacgctccgtcatcctcgaacgaagtgaggggatccagtgacgtctcccttcgcatttcttcgaaaacaggcgagggtctcgagtctctgacgaacgccatgaatgcacgcctgttcgccaacaacgatgagtccgaagacctctggatcacgagcgaacgcgaaaagacctgcctcgaagaagctcttgccggcatcgaccgtacgctttcgcttatccgcaccaatccggccgtagagcttatcgctttcgaaatgcaactggtgcgtcgtgcgctacaaagtataacgggcgaaatctcgtccgaagacgttttacaaaaaatatttgcggggttctgcattgggaaatagttacgttggtctcttgcttgccgtctttgctttcggcacttacatggtccctctcaaggcttggtccaagttctcgtcgtgggcgtacctctcctgtatggcctttggcatgttccttgggcagctttgcatttcgtttgctacggactcgttccgctttttgccggtgggcctcctttgcggattcctctgggtgattgcgggtgctttctgcttctgggcggtcaaggccgaacaggacctgacgggtgccggtgtgcgctcgatgggcgtgagcatcctggcttcgtttgtgagtggtgtgcttgtattctcggaatccacgctgctttatttttcgattccggcaatccttttgttgcttttcggcttgagcaggcttgcccctccgcaagggaacatctttagaaattggcgctcgcttttgggcggtctcatctttggcctgttcctcattccttacaagtttgccgaagtccccatactcgaattcatgggctcgttcgccctgggcatttttgtttccgcagaacttttggttgcaattttaagtataaagcgtcgtgcgctttttgaatatggctttgcaccgtctgtaacgtccatgttcatgggtgtcctgtgggtcattggacagcatggttgtttctgggctatcgattcgaacggtgcgctcggctatgctgtgggttatccgctcacgcagctgaacctgttggtgaacttgctctggggagtggtggtttttcatgaatacccgacaaaaccagaacgaattaagcttgctattgcggtttttgtcatcctttgcggtggtgccctgctcgccctgtcaaaaatgtgattttttgttccgtttttttagtgggcgttgaggttcgttaccaatctgtcaacgaaaaaacgtgtaaaataacttacaataaaaagttttgctcatataattggttatgtttatgatatgagcatctggaaatctataatagtgggatctttgtttagcctcgccgcggcgtgggctattccggcacctccgttcccgatcaaaaccgtacagcccgacggttccgttgtgcctgtcaggattgtgggtaacgagcatttccactatacggtgaccagtgaggacagtgtccttgttgtccgtgattctagcggatactggaattatgccgacgaaaatggtaaaaagacgggaattcgtgtccattccaagtctaaacgtgaccaaaaagaaaaaaacttcctcaaaaaacgcaattctcgtggcattctcggcaagttccgcgaaaagcacttgaaaaagcttcgtgaacgtcgcgaaaatgaaaattcccagaattctccgaccccccaaaaggttcagtccagttcgactatgccgatgaaggccaataactggtggaactggggacgtccgaccgagcctacggtcacgcatacggattggccgatgcgcccggctggatctactgtaaaaaagcagggccaggtccgcggtatcgtcattctggtcgagttcagcgacgtaaagttcagctcctctgatgccaatgccgaatttacggattacctcaataaagaagggtattccaaatatcatatgagcggaagcgtccgtgacttctttgtccaaaactctatgggaacctacgagccgacatttgatgtctatggtccgatcgccgtttctggaacccgttattcttacggcgtgcatctggatctctatgatgtgtcgaagggtgcggtgaaggctcttaacgaagccctggacaagcttgtggagcagggtgtggatttttccccttatgatagtgatggcgataaggtcattgattttatctatatgatttatgccggtaccggtgccgcggatacgggtgatgaagccgccatttggccgcattcgcactttttgtctaagcgcctcaattcggggtatcgtacggaccgttacgcatgttctggcgaactggatggacaggcgtacgtgtatgcaaggtcctgggggcgaaaatcgaccgtgctgagtggcatcggaacgttctgccatgaattcagccatgtgcttggacttatggaccattatgacgtgaacgacgacggatccggtacgtctactctttatacgccgaatgcctgggatctgatggacgccggctcttatgattgcccttcgaattcggactattcgacgggatgctctcctgcgaacttgtcggcgtttgaacgctttagcctgggctggctggaaccaagacgtttggaaatttcggataccacgttcgtcttgaatcccattacggaaaatgacggcctggttttgacctcggaaaacgatgatgaatattattttgtcgatttccggttgcaagagggctttgatgtaggactccctaacaagggcatgcttatttggcatatcaagtacagctatacggcctggtataacaatatgctgaatgtccaggacccgatgtgtgtggacttggtcgaagccgatggcaagactggggtcaattccattaaggatgatgcgttcccgacaagccgagtcaatggatacaatggatttaccacatggagtggtacagaccttggccttgaagtatacgacatcaagattgtggataggcatgtagaattcaagactcgcggaacccgtgtttcgcccgtttcgtcaagttcttcgagcatggctgtgtcgtcgtctagtgccaaatcttcttcgagtgtgcgttcttcgtccagtgcgaagtcgtcctccagttctgttgaagaagtctcgtcgtctagcgaaagttcttcgtctacggagttgagcagttccagctcgttgcaagaagcgagctcgtcgagcaatttcatgcctgtcgttccgataagctcgtcttcgtccgaaataccgctgaattccggaaagacctttgccaataaggatatccgcttctcagtgaatcagggcgtcttgaccgtgaatgccaatgtgaacggacgcaagaccattcgcttgttcgatgtcaatggaacgctgctcctgacaaaggcttttaatggcgaatcctgtgaaatccggatgagttccttgccgggcaaatcgtttgttgtgggctcgctagaaatcaatgggcggaccgtcaaaacgataaaaatccaaaaccgttaaaattggggcgcaagcccctttttttgtgcagtcattcctcgcttgacggggaatcttcctgttctttttatctaaattgttttatatgagaaaacttttcgctaaaattgccatgagctgcgctctggtacctgcgcttttggcaggaacgtctaaggccgctgtaaatttgcccgtacacaaggaagtcctggacaatggactgacggtgcttttgtatcctaacaagcaggcccccacggtgagcttccgcctgttttatgtgacgggttctgttcatgaagtcccgggcaagtccggcctcgctcatattctagagcatgaactgttcaagggcacaaaaaaggtcggcatttctgatagcattgccgatgcgaagttcattgcgactcaggattccctgcaggcgctgatccgtccggcgaaactggcgaacgatacggctttgctgaaaaagctgacggcagaacatgactccgtgctgaacgaacaccgcaagatattcatcaaggacgaactctggggcgcctatcaggctgccggtggcacaggcctcaatgcatttacgagcgacttgctgaccgcctatacggtgacgcttcccaagaacaagatggaactgttcatgtggctcgaatcggaccgtatgcagaatgccgttttgcgcgaattctattcggaacgctctgtcgtccgtgaagaacgccgtatgcgttacgacgaccgtccgacgggacgtttttacgaaacgctcaattccatgatttacgaggccttcccgtatcgtgtgccgaccattggctggccgagcgatatcgacaacctgacccgcgaacaggccgaagaacattaccgcaagtactacaagccgcgcaatgccatactcgtgttggcgggcgacctggatacgcttgagacgatgaagctcgtcaagaagtactttgctccgatcccgacaggcgatgccttcccgccgctcacggtccgcgacccggaacaggctggcgaaaagcgtctggtcgtaaagcgcaaggatgccccgaacctttacacgctcgtcttcaagactccggccgttggcgatagcacgctctatgcgctcgatattgccgaaggcgtcttgaacggtcgttctggcagactctacaagcgccttgtcgaagaagaaaagcttgccgtcagcgtgagcgcaagcaacagcccgaacaagtacatctccgaattctccgtccgcgtgaaccttcgcccggatgccaaccgcgaaaaggtcgagaaaattgtgtgggaagaacttgaaaagctcaagacccaccaggtgagcgaccgcgaattccagaaggttaagaaccgcgcttacgcaggcctcgtccgtagcttgactgatatggaaaaagtcgcgacgatgcttggctggtacgaaatctatggcgattaccgcatcttcctcaactgggcggacaatctggataaagtaaacgctgccgacgtgcagaacgtcgcaaagaaaaccttcatccgcgaaaagtcaaccgccggcttcttggtgaaagaataaagcatattgtcatcccggacaccgttccggggtcaccttataaggcatctatttcttcttttgagaacccgaatgtttctgcaatgatgtctattggaacacccttatttttttgcaattttgctttttctttcagaaccttctcgtcgtgctttttgaacgcatctgaatcgtgctgctcaatgtagtccagcacaacctcgttatcccacctggcgttcttcatcataagatattcctcaagcttgtcgccctttaaattagatatttggtaaatcggcgtgtaccgatttacctttctttcatactttcttgaattttcacgatgacttctgtgggggttacaaaatctaggacgctgaatgcggtcatctcgttgcccatatctttgaacgaagccccgaagtgatacaccttatcgtcaacgagcaagaatcggtcgtgaatcgtacgcattgtctttaaatctaggcctggatattgctttttgtgcaaatctgcggccgccttgaattcgggagtgatacgtgcggaataaataactgcctgcacaccctttgcacgcattgctgcaaatttcagcacctcagtcgtggcgtatgggtcgatgaacaccacagaacgcttggccgacttcacgagatctgcaatcaacacaagcccgtcgaaccgagttcctgtggcgagaatgccgccagttggcgcctgtgctgcgtttacaaagaagtctattcgctgttcgactgcagaaagacggatattctgttcggctacggacttttgaacatccgtgattgctgctccctgtttatcgatgagttgtctctgttcatgaaattggttagcgatttgcatccccgttgcgaccattcgttggttcaccgcatagcccttgagcgtgtagtctttaaggacttgattcgcccaacgacggaattttatgccatttgcagattttacacggtaaccgatggaaagaaccatatcgagattgtagtgttctaccattctagatacagaacgggatccctccttttgaactgtcgcaaaatttgcgacagttgccaaatcctttaattcttcttttaaagcgtttgagatatgtttgccaattgtcttgacatcacgtttaaacaatatcgctaattgctggcgatttaaccacactgtctcgttttcgacgcgtacctccagccgcacctctccctccggctgatacatcacaatttcgccgatggattccgttgttgactgagaatccgtggttgtaacttctttattcttcatcataaactccgtttgctatagacaggtgcgaaactgtagcgcttagatggttgcttggggactgtactctgtttagttgctattactgactcgtcgtaggctcatcattgcaggcctcgatttcttctttggatagtcctgtgaattcgatgatttcttcgatgggctttttcttcgcaagcatcttctttgcgaattctttagcttgtgttgatcgttcatcctttcgaaccttctcgtcgtgctttttgaatgctgctggattatgttgctcaatatagtccagcacaacctcgttatcccatctagtgtttttcatcataagatatgccttgaatttcgtttcactttaaaatagatgcttgcgaaactgcagtcaagtgcgcggatttttgcagagatcttgtcattcccggccccgaccgggaatctcctatgtaaaaaagcggggtacattcctcgcctgtagatggacataggggctttctaccagcccaatgatgatgtacatgttttcatcaggaaatcaataggatgatgaataaaaaagaggacgatgcttgcgcaccgccctaaatgttttcacaacggaataatccttattgtgaattgctttcagattatgcaatgaatatagacaattattttttgaaggtcaagtggttctgtcaaaaaaagtgaaactatttattttgaaagaattttttctagaatttttatgaatgacattaaatgtcattgtttttgatttatatttataaagatgtacttttgataaaaatgagaaaaatgcagaaattagcacaaaaaaggcgtttttgcactaaaagaacgtatatttgtaatatcttattagaaaaagtttggagtaatcctttttatgaagaaaattcttggtcttgatttgggtacgaacagcatcggttgggccgtggtgaatgcggatgaaaaaaatcgcgatgatggctcgacttatttaaaaccctatggcatatctgctgccggtagtcgcattattcctatgtcggcagatattcttggtgattttgaaaaagggaacactgtttcccagactgcagaacgaactagactaagaatggctcggcgattgcacgaaagggctcttttgaggagagaacgtttaattcgtgtcttgaatcttatgggctttctgccgaagcatttctcggacaaggttaatcgctatggtaagtttattgatgatagtgaaccaaagttggcctggcgtaaaaatgcagaaggaaaatatgaattcgtatttcaagaatcgtttaacgaaatgctggaggattttaaaaagattcagcctgaactcgttgctggtggaaataaaattccttatgattggaccgtctattttcttcgtaaaaaagcgcttactcaaaggatttctaaagaagaattttcttggttgttgcttcagttcaaccaaaaacgcggatattatcaattaagaggtgaagaagaggaagaaaaggcgaacgaaacagttgaaatcattgccgcaaaggttttatcggtagaacgaaaagaaaaagacaaaaaatacgataaatactggtacgaaatgcctctagacaatggtctgacgtatcgtgcttctttttacaacgacgtatcctcctggaaaaacgaaacaaaagaattcgtgttgaaaacgaccattttaaaggatggtagtaaaaaagaagagctttcatttttgccgacacccgaagaaattgagttgatggatgctccgaaaaaagggaaaatgtacgcaaaaataaaattgagaactgaaaagaatattgaaaatagtcataaaacggttggttgctacatttatgattcgttgttaaacaaccctaaacaaaagattattggaaaactagttcgtactgttgaacgaaaattttataaagatgaattgactaaaattcttaggaaacaagtggaattcattcctgaatttcaggatgaaaatctgtataagaagtgtattgaagagctttatccaattaatgaggcacatagaaataacatagcaaaaccagattttgtaaatctatttattaatgatatcttattctatcagcgtccattaaagagtaagaagtcgcagattgacaactgcccttatgaaaaccatatttatatctataagaatcaagaaaaaaatattgaagaaaagagaattgctcctgtaaaatgtattgcgaaatcaaaccccttgttccaagaatttaggctttggcagttcgtccaaaatcttagaatctatcagcgtgaaaaagaaaaagacggcaaactcttaacagacattgatattacaagcgaatgtttgaaatctgagtatgattacgtaaaactttttgagtggttaaatgatagagaaattattgatcaggaagaactgttaaagcatctttttaatactaaaaaatctaaaaataaagaattaccgtatcgatggaattatgttgaagataaaacttatccttgcaacgaaacccgtgctgcaattttgaaaggattttcaaaatgttgcatcgacatttcagttctttcgcctgaattggaatatgctttgtggcatattctttattctgttgaagataaaaatgaagtcgaaaaggctttgacgcattttgcgcaaaaacagggctggaatgaaaattttgcaaaaatattctccaaaataaaaccttttcagaaagactatggttcatattcagaaaaagcgataaaaaaattacttcctcttatgcgaatgggcaaattttggagtcaagacaatattgataaaaacacgcttgatagaatagacaaaatcattaatggtgaatatgataaggaaatttctaatagagttcgcgataatgcgataaacttgagagacgtaaatgattttagaggtttaccggtttggctagcctgctatatcgtatatgatagacattcagaagcgaaaaattgctacaaatggaactcgcccgaagatatagatgcatatcttaaggattttaaacaacactccttgcgtaatcctattgtagagcaggttgtcacagaaactttgagaacagttcgagacatttggaagcaggaaggacaaattgatgaaattcatctggaacttggacgcgacttaaagaatcctgcggataaacgcaagaaaatgtccgaaaatatcctgaagaacgaaaatacgaaccttcgaataaaagccatgctaatggaatttatgaatccaagtatgggtgttgaaaatgttcgtccgtactcgccaagtcaacaagacattttgcgtatttacgaagaaaatgctcttgacaatcttactaaggaagatgaggactttgattttatttcaaaaatatctaaacaggcacaaccatcaaaatcagatatagtccgttacaaatgttggctagaacaaaagtatcgttccccgtacacgggtaaaacaatctcgctttccaagctatttacatcggcatacgaaatagagcatattattcctcagtcgcgatattttgatgattccttcagcaataaggtcatttgtgaagcagaagtcaacaagcttaaggatcgtcaattgggatatgagtttattgcggaacatcatggagaaaaaattcaactaagtcaaggcgaagttgttgaaatattctctgtaaacgcttatgaaaaatttgttaaagaaaattatgcgtccaatcgcttgaaaatgaaaaaactgttgatggaaaatattcctgatgaattcatagaacgccagttgaacgatagccgatacatcagcaagattgttaaagacttgttgtctaatatagttcgcgaaaagattgacgaggaaaactatgaacaggaagctgtctcgaagaaccttatttcgtgcaacggaacaattacagatcggttgaagaaagattggggaatgaatgatgtgtggaatagcattgttctaccaagatttattcgaatgaacaatttgacaaaaagaataagcaatgttgaacttgcaaatgaatttaaacgtttattcgaatcagaactgtcttgctttgcaaaggctgagggtgttgttatttcagaatcattccctgatttttataaaacattgaagacgaatcagcaaagaactattatagacaatgttgtaaaacagttgccaataacagattcgttcttatctgtcaataatgagggacatataattcccaatatgccattgaaacttcaaaaggggttcaacaagaaaagaattgatcaccgccatcatgcgatggatgctattgtgatcgcttgcgctacgcgtgatcacgtaaatctgctaaataatgaagctgctcattcaagatacaatgtaaatagatttcagctgcaaagaaaattgagacgctttgaaaaaactgtcattgatggtgaagaaagaaatgttgcgaaggaattccttaagccttgggattcttttgcaaaggacgctaaatcggtaatagaaaatattattgtaagtttcaaacaaaaccagcgcgtgattaataaaacaacaaacgtctatcagcattttgatcaagactgtaaaaaaatatttgttaaacaagaaaaaggtgatagttgggctatccgaaaatcaatgcataaggcaacattctacggagaaatcaatttacgaaaaataaagtctgtctcgttaacagaagcaataaaatcacatgaaagaattctaaacaaaataattagggataaagtttcagaattgaagaaaaataatgtcaaaatccaaaatattaagaaatttatagaagataatcatatcggtggattcggtctaaataaatctaagatagacatctatttctatacaaaagaaaccaaggaacgtttttttgcgacaagaaaatctctcgatatgtcatttgataaaaataaaattgaaaatagtcttgccgattctggaattcaaaaaatccttttagctcatttggaacgaaagaacggaaacgcagaacaagcattttctcctgacggcattgacgaaatgaacaagaacattgttgaattgaacaaaggcaaatttcatcagccgattctaaaggttcgtgtttacgagaaagcggaaaaatttgttgttggacagaacggcaataaaaaattcaaatttgttgaagccgccaagggaacaaatatgttctttgctgtttttgaaaagaatggaaaacgctcttatttgaccattcctctaaatgtaatgattgattgtcaaaagaaatacggtaatcagtggaaaaataatattgagtcttatttaaaagaaaataagcttaccgagaatgatgttaagctattgtttattctttctccaaatgatttggtgtatttgccaactgctgaagaattgaaagagaaggtcaaatctgtaaacaaggacagaatatacaagtttattgatccaaatagcgacaagggaaattttgttccttattcctctgcaaacgttattttctcaattaatttctcggatcaaaaaaagagaggtgtgtcgtatccaattcaagatgaatttggggttggctcacagggttcaaaaaattcacgagctattactggtgaaatgattaaggaaacttgtgttcctataaaagttgatagacttggcaacataacagagttggatggtcgacgattatgattaaacggacactgtattttgggaatcaggcctatttaagtctgaaggacaaccagcttgtcattaagaaacgcgacgatgaaatcgtcaccgcggctattgaagatgttgcttacattgtccttgattcaccccaaattacagtgaccaatgctttgcttggagctctgttagaaaataactgtgccattattaactgcgataaaactcatttgccttcggggttgttgcttccactttcggggaatactttgcaaagcgaacgcttccaagcacaaatagaagcctcgttaccgttgaaaaaacaattgtggcagcaaactgttcaacaaaaaattttgaatcaggcggctgttttaaaaagtgcgagaaatgttgaaatcggcaatatgactgcttgggcgaactccgtgcggagtggtgatgttgataaccgtgaagctgttgctgcagcttattattggaaagaaatttttcctgaaattccgaattttgttcgcgaccgcaatggggttccaccgaataatatgttaaactacggttatgccatattacgtggggtggttgcgagagctttagtttctagcggacttttgcctacgttgggtattcaccaccataatcgttataatgcttattgtttggctgatgatattatggagccatatcgacctattgtggataaactagtcttggaaatagtcactgaaattgaagaatatcctacagatctttcaaccgaaataaaagcaaagcttttaagtatacctgtacttgattgtgttattgatggaaatcgaagccccttgatgaatgctgtttccacaactacggcttcgcttgccaagtgctatttaggaactacaaggaaattgctctatccggaggtgtaggatggatcgatttagcgagtacagaattatgtggattatgtgtttctttgatttgccaacggagacgaaaattgagcggcaaagacacagcgaatttcgtaaaaatctattgaaagatgggtttacgagatttcaattatccatatacattcggcattgtgcttctgtggaaaatgcagaggttcatattgctcgcgtaaagagctttatgccgccagatggttcggtaagtattctttgtattactgataagcagtttggtaaaattcaagttttttatggtcgtaaagagaaaacgaagccaaaagcaacggggcaattggagctttttctgtagaaaaaagtggctctaaaaaagaaaaaatcggctcaaaagggccgattttttctttttgcaatatcacatctaactcgtttatagctgtatagttacaacaagtcagttgttattgcactagttaaactagaaaatctgaaagcaattcacaacaccttgccttgctttactttccggatacaagttgttattgcactagttaaactagaaaatctgaaagcaattcacaactgttttcagccatcacttccttctgagtcggttgttattgcactagttaaactagaaaatctgaaagcaattcacaacggcttgcaggtcttgccgtatgcagaccggttgttattgcactagttaaactagaaaatctgaaagcaattcacaacggttttgcgcccttacgtgcgtcttaaggagttgttattgcactagttaaa

SEQ ID NO: 1342 - DNA, 16446 bp, synthetic construct
  misc_feature 1..16446: note = Synthetic
  source 1..16446: mol_type = other DNA
ctgcttcaaaatagtctaaaacaatagcttgattataataattaaaatctaatttttttgaagttacataggcactgtttttggctgtaaacctttgatatgtattgtattggccgaaaccaactactgttaaaattattagtaataataaaattattaattgtttcatgatgttttttttcttataacaattacaaatgtaattaattcttatgataaaaagcactgtttatgaaaccaacaaaaagtatcaatttataagttgttaatctcatttttagcgcattataacgttgttttcaataatcttacctaaataattttagataaatagagtatttaactatatttgacttcaatctttaatatacaaatggaaaaacaaaacttaaaaattttactaattgatgatgatcctattgaagctttaaaattcaatagagcagtttccgactcctcacaccataaaattgaggtggttacagatggagatgctgctatggaaaagctagaaacctttcgacctaatataattttactagacttaaatatgccattaacagatggcatagaatttttaggttttttaaagtcaaatgatagtttacgacaaattcctgttattattttaaccacctcagacaatgactccgatttacgttattgttataacattggtattgcgggctatatgattaagccattgagctatgaggcttatgaagaaaaaattagagggattttaaattattggagtttaaataactttgtaaaagcctagtgaaaggaatcatatttagagaatttttagaatctatagaacttaactatagtctttctgttttagatacagtaattagcaaagcaaatttaccgtctggcgcagcttacactactgttggtacctatagtttttctgaaatgttattacttttaaatagcctgagtagcactacaggaaaatcgatagatgatttattgttaagcttcgggcatcatttttttggtgtagttaaaagagattacagctcgcttctaaaaagttataagaatgccttagatatgatttcatccgtagaaagtcatattcatatagaggttagaaaaatttatccggatgcagaacttcctcattttaaaattcttgaatcatcagataaccgtttaacaatgttgtatagttctagtagggcaatgcattattttggtttaggttagatggaaaaagtatttaatcattttaacgaaaaagcaattatagagctagaaaagttaaatgataaaggaactttagttaaatattcgattacaaaaaaacagtgaaaaaagaagaagttgacatattaaaacgtgctttagagagagaaaaaaaagctcgaaaagaagctgaaaagattttagaaacaaaatctttagagctttataatactacgttggcgttaaaaaaaaccaatcaacaattagaaaaaaatatttatgagaatcaatctcaaataaaaggtttttttaaaagttttaatgatgcttttgtacaaatagacattcatggaaatgtaaaaaacatgaataacaatgctagtgctttatttgaatatgatttaagtaaagagtctcttaatgtagtagatgtaatttataaagaagattttgactatgcaatgaaatcttttaaagaacttttggcaaaaggttatttttctaattatacagcaagaattattaccaagagtaagcaaattaaatgggttcatattaatgcaagtgtggtttacgataaagataataaaccacttatagcacaaggaattgttagagatattactggagatagattagcagaggaaagtttaaaaaaatctgaaagcagactttacaatattatttcaaacttagaaacaggaattttactagaagatgaagatggcaaaattgttttgaccaattctcaattttgtaagttgattaatattaagtcaacaccaaaagaattgattggaaaagattgttatggggagtttttaaaaagcaaagatatttttaaagatcctacttctatttttaagagaattggaaatattatatcaaaaaaaattaaaacattaggagaagaaatagttttaaaagatggtactattttagaaagagattttgtgccaattactgtaaataatgtttattatggtcatttgtggtcatataaagatgttactttaaatagaaattattacaagagtttagagatagaaaaagaaaagtatcgcagtacaattgccaatatgaatttaggtttattagaagtagatttagacgataagataattttggcaaataacagttttaccgaaatttctgggtattctcaagaagagttactaggtaaagtagctagagatttactggcagtaagcgaccaaaaagaggtaattaataacgaaatactaaaaagagaaaaaggaaaatcgaataaatacgaaattactattttaaacaaagcaggtaaaaagagaatatggttagttagtggtgctccaaattataatcttaaaggagaattaattggctctattggtattcatttagatattacagatttaaaaaacttagagcaacaaaaagctcaaatgcttcaaaaactggccagaagtaatcaagaattagaagaatatgcacatattgtttctcacgatttaaaatcgccattaagaagtattcatgcacttttatcgtggataaagcaagataatttaactcatttcgatactcaaactttgggtaattttgaccttttgtttagaactgttgaaaaaatggagagcttaattaccaatgttttagaatactctaaagtaaatgctaattcagtatctaacattacgttagatttagatgagttggtaaaagattgtatagaaattttaatgattccttctcatatagatgttcgtattattaaaaaattaccctcaatttatgccgataaaacaaagataaggcagttgtttcagaatttaataagcaatgcagttaagttctcagacaagcaaaaagggtacatagaaatagattataaagagaaagatgcgttttatgaatttagtattcgtgataacggaataggtataaaacaaaaacattttaaaaatatatttaaggtgtttcaatctttaaacccacaaaaacaatctacaggaataggactatcaattgttaaaaaagtggtgcaaatatatggtggagaggtatggttaacctctacattcggagaaggaacaactttttattttacgattagaaaagaataatggaaacaccaaatttagaatatatcgataaaattgctaacggtagtgaaatattaaaagcaaaaattataaaaattgttagagaagaattatctttggactcagaaaaatactatgagttaaaagatactaaagacctcaaaaactttaaagtatacattcataggataaaaaataaaatgactgtattggggttaatagaatcttataagatagcaagtaactatgaaaaaaatattgaaaatgttacagatgaagaaaagaagtttttcgaaaatacactcgcccacatgattgaattcattgataatatttaatttttcccccaatgatgaaaggtatagtaatagatgatgagcttcttgcaagaacagttttaaaagagctcgcagcccagttgccagacgtaactattgttgcagattttccgaatgcaatgagtgccataaagtatttgaattctaatgacgtagattttatatttttagatattcacatgccagattttgatggcttcgattttttagaaagtttaaaaaaaacacccaaagtagtacttaccacctcagacgatcaacaagctttaaaagcttttaaatataaatttgtggtagattatattcttaagccactagagttagataggtttaaagactctatcgacaaattaaaatcttttatgattgtaaaagagcgtaatgatgaggttaaagaagaaaaaaagaatgtatatcaagattttttgtttgtaaacgtagacaaaagattgataaaaattaccttttcagatattcttatcatccaagcaagcagaaactatattcttttaaaaacagccaatcaaacatacaaagtacatagtcctctaaaaaagattttaacaaagttgcctcctcaagattttttaagaatccataagtcttttatcgttaatttaaatagtgttgtagatatagaagacaacagtattttaattggtaaagaggttattcctgtaggaaaaacatacagagcaaaactaaaaaagaggctcaaccttttataaagtttcatatttctttctaaatcccttaaagtacaatattacggttcgttggtgtacagaaaagtatactttcgtccaaatttgtaaaatatattttcaagtatactttaaatttgcagcatgttaggaaagatacgaaagtatcggtttttgattcttaacttctttttaagcttacagtttttaaagaatgtaaagagttagttatttaagtatagttgacaggctattatagataccccttcttattaagaaacttttattttagtttgtcaacttttaaaaatcccccaactttccatacataaatcccccaactaattaaaatttcatcttatcaaaagcccattctgaagagaatgggcttttgactttttgtggtaagtttttttcctgtttttgtaaaaatattaaataatttaatattgtaattcctatctaattttatacgggtacctttaataacacctttctttacacaataaaaccacattttttttctttcaataattagaagtagaaaagaaacgattatctttgttttgtataaaaagaagatatgaccttaataaaatcaatttcaggaattagaggaacaataggtggtaaaccatcagaaaacttaaccccaatagatgctgttaaatttgctgcagcttatgggactttcatcaaaagccgaaatgtatctaaagagtccctaactgttgtaataggaagagatgcaagaatttctggtaaaatgattgctagtttggtagcaaatacacttgttggtctaggaattaatgtaatcgatttagggctatctactactcctacagtagaggtggctgttccattagaaaacgcagacggaggtatcatactaactgcctcacacaacccaaaacaatggaatgctttaaagctacttaacgaaaaaggagagtttttaaacggacaagaaggagaaaagattttggagatagccgaaaatgaagaccttacttttgctgaggtcgataatttggggacttactctaaaaacaatacgtatttagacaaacacatacaagaagttttaaatttagaattggtagatgtagatgctattaaaaatgccaattttaaggtggtggttgatggagtaaattctacaggaggtatttttattcctgcactattaaaggctttaaatgtaacttgtgtagaactgtattgtacaccaaacggagaatttcctcataacccagaacctcttaaagagcacttaacagatatatctgaattggttgttaaagaacaagcagatttaggaattgtggtagatcctgacgtagatagattggctattatttctgaagatggttctatgtttggcgaagagtatacgttggttgcctgcgcagattatgtgttgggtaagttaggtggcggaaacactgtttctaatttatcatcttcaagagcgttacgagatgtaaccaaacaacacggaggtaattatactgcagcagcagtaggagaggttaatgtagttcagaaaatgaaagaaaccaatactgtaattggaggagagggaaatggaggtattatttaccctgcttctcattatggtagagattctttagtaggagtggccctgtttttatctcatttagccaataaaaaagtttcttgtaaaacgttaagagatagttatcctagttattacatgagtaaaaataagattgaattaacaccgcaaattaatgttgatgcaattttagaaacgatggctaaaaactatcaaaatgaagaggttaacactatagatggagtaaaaattgattttaaaaataaatggattcatctaagaaaatcgaatacagagccaattataagaatatacaccgaagctacatctcagaaggatgcagatgatttggctgttcgatttataaatgaaattaaagcaattacttaacattttgtgtaatgaatttagagcgttatttcagtcagtttagagaaaatatagtgggtgtagaccaagtttttacatcaccttttggagaaaaaaaaattatatatacagattggacagctagcggacgattatatcgtccgatagaagaaaaattgttgcataaattcggaccatttgttgccaatactcatacagaaaccactacgtctggtgcggcaatgacattggcatatcatgaagctcgaaaaattataaaaaagcatgtaaatgccaatgaaaatgatgtgctaattacagcaggatctggcatgacaggtgtagttaataagtttcaaagaattttaggactcaaagtttctgaaagtttacgaaattatacgactattccgggagctctaaaacctattgtttttatttcacacatggagcatcactctaatcaaacatcgtggttagagactattgcagatgttgtagtagttccttgtgatgatgatggtttgttgtgtttaaaaagcttcgaaaaatgcattcaaaaacacgaatatagagccgtaaaaattgcttcaattacctcttgttctaatgttactggtattaaaaccaattaccacgaagtagcaaaattaattcataaatacaacggattgtgttttgtagattttgcttgttgtgctccttatgtacctataaatatgcatccgtcggagcccgacgaatatttggatgctatttttttctcgcctcacaaatttttaggaggtcctggcgcagcgggagttttagtatttaataaaaacttatacaaaaataccattccagataatcctggtggcggtacggttagttacacaaacccttggggacatcacgattattttgaagatgtagaaactagagaagatggcggaactccggcttttttgcaaacgataaaaattgccctggcaattcagctaaaggagcaaatgggaactgataaaattaaagaaagagaagatgaaattaacaaggtagttttcgaaactttagagagtttagaaggtgtacatattttagcgcctaagcaaaaaaatagattgagtattttttcgttctatttcgaaaaatatcatttcaatttggtggttaaacttctaaacgatcgttttggtattcaaaccagaggtggctgttcttgtgcaggaacttatggtcattttttattaaatgtagatgaagaaacttctcataaaataaaagatgaaatattgcaaggctgcaatacaaaaaaaccgggctgggtaagactttctttacacccaacagtaagttcagaagaactacattttatttgcaattcccttaaagagttggcaaataatatagaaagttggtctaaagattatgtttatcatcccgtaaaaaacgattatacacataaaacaatagcaccaatagagcaaagtttggtaaaagattggttcgaattataagaactcttttggtactttatctctatgtttaaagcgtttgtgagaccataaatagaatgctggttgcgctaaaatatttttttctgtaagagaggtatatttatcggtaatttggtagttatcaaaactttttggagtatcggtaattaattgaaatgtggtttcgtaatagcctctttttacttttttgctaacatagtttattaccactaaatcaaatcttttagaaagcatttctgcacccgtatgcacaggtacttttacattaaaaaagtttctccaataataggttttgtgtggttgtggagattggtcgcttagtaaaatatataagccttgtatattttcagaaaagtttttttgcatccctttaatcatgtctgaagttttaaaacctttaacgccaaatttttctctagagcttcttacttttttctcgaaatatttattgtttagctttgtataggcaccaaaacagtctatatcgatcaccttacctaaactggtagaccactcccaatttgcttggtgtgcacctactaaggcaatactttttccttgttttgcaaaattattaaccagctctgggttcttatatcgatacctttttagaatctcattttcagaaatagaaaaagcttttacactttccatcatcaaatccattaaatgtttaaaaaactttttacgaatattgtaaagctcttctattgatttttctggaaaagccagttgtaaattttctaaaactacttttttacgatatccaaaaacatagaaaatcagcaggtaaaaaatatcagattttaggtataaaactctcattggtagtttagaaagtaaccaaataaaaggataagaaattgcgaaaattaaaaattgcatacgttgtttttagaagtacaaatatcgcatataaatttaaaatgaaaagagttattaatacttgctttttagtatgtttgtcttatgggattaaacatacatcaaatagtacttatcataattatagccaatgtattggtgtcaatgaaaggttttagcgattattcttttttaaataaatacaagtttcaagttcaaaaagtgcttcaaggagaaaaaataagaatgcttacttctggttttttgcacgtaaatttgcctcatttactatttaatatgtatgcactttatctttttggtaatattgtggtaaatgttttagggacttctaattttttaattatttatctaggaagtttattatttggtagtttatacactttaaggtatcataaaaatgatgcttattactctgctgttggtgcgtcaggggctgtttcgggtattatatatgcatctatattgctgtacccaagtatgagtttatacttgttttttattcccattcctattcctggttatatttttggtgttggctatttgttatattctatttacggtatgaaaaagcagttgggcaacgttgggcacgcagcacatttaggtggtgcaatgggaggttttttaattaccttgctgttaaaccctatactatttaaagtcaatttacttttagtaattgctttggcagtgccaattattttagtgttggtttttgaaagtaaattaaaaaatcactaaatctttaaaagagataggcatacaagtttctttaccattttttcagaaaaatacatttctttaagagtattattattattattattattattattcaattagtttttaattgaagaggaaaatttttcacaaaaaaaaagacttcataaattatgaagtcttttgagcgaaagaccaggttcgaactggcgacattcagcttggaaggctgacgctctaccaactgagctactttcgcatggtaaagagctgcaaatataatatgatttttaacatttacaatgctttttttataaaaaagatgctttcttgtaaaggatacttataatgaaatgattagcaaataaaaaagtattaaaaagtagggtggaagtaaaaaattacacaaaaaaaaagcgacatgtaaatgccgctttaaatgttttcacaacggaataatccttattgtgaattgatttcaaattgttctcaaatataataaaaaattagttatttaactattttttttatatttttatagaaaattgctaaaataaattcattttacttaaaattatattatcacttagccttatgtattaaggttaaaaaaagttacgttatgaaaaaaatattaggattagatttaggaaccaactctattggttgggcgttggtagctcaaaattttcaaaaaaaagaaggaaatattaaaggtttaggaagtcgaattattcctatgtcccaagatattttagggaaatttgatgcaggacaatcacattcacaaacttccgaaagaacaagttaccgaggtgttcgacgattacgacagcgaactttattacgaagagaacgcttacatagagtgttgaatattttaaactttttacccgagcattatcaaaaagcgattgattttgaaaagcattttggaaagtttaagcacaacagtgaagttaaattaaattataaagaaaattcagatggaaaacacgagtttttgtttatggaatcatttaatgaaatggtttcagactttaaagctcttcatcaagaaactaatataccgttagattggacgctatattacttgcgtaaaaaagcacttactcataaaatcaccaaacatgagttagcttggattttgttaaattttaaccaaaaaagaggatattatcaattaaggggtgaggaagaagatgacgattcgggtaaacaaataacttttgaacgcttattggtaactgaggtaaaagacactggagaggttttgaaaaaaacaaatgaacctttatatgagatattttttgagaatggttggaaatatgataagcaaaccactaagccccataattggctaaataagtataaagagtttattgtaactattagtacactaaaaagtggtgaggaaaaaataacgtataaagctgtggattctgaaaaagactggattgctattaaaaagaaaacagagcaagaaattgagcagcgcaatgtaactgtgggaaaatttatatatgaaacactgcttaaaaatccatcacaaaaaataagaggtaagcttgttaaaactattgagcgtaagttttataaagaagaattaaaaaaaaatatagaaactcaaatccagtttcatcctgcattgcaagatgaaaaaatatacaccgcttgtgtaaatgagttgtaccccaaaaacgtagcgcaccaaaatgcaataaaaaataaagattttgcatatttgtttttagaggatatcattttttatcaacgacctttaaaaagtaaaaaatctactatttcaaattgtccttatgagcaacgctattttataaaagatggcattaaaaatatacagcctttaaaatgtataccaaaatcacacccattatttcaagaatttaggttgtggcaatttctacaaaatttaaaaatctacttaatagacgatattgaaaataacaaaaaagatgtagatgtaacacctactttttttaataccgagcaagattgggttgctttatttgattatttaaataccaaaaaagatatagatcaaaaacagcttatagcttatttggtgaaacttggaaaaataaaaaaacttgaaaaagaaaattaccgctggaattatgttgaagacaaaaagtatcctgctaacgaaactaaagcctcatttttaagtaaactcaataaagtggaaggattagatgcagtagcttttttaaccactgatgtagaattacatttatggcatataatttattcggttaatgatattacagcctatgaaaaggcacttaaaacatttgcaaataaacatcacataagagaagatgcttttgtagcggctttcttaaaattttcaccttttaaaaatgaatacggtgcttattccgaaaaagcgataaagaaattattacttttaatgcgaatgggttcctactggaatgaaaatcatatatccaacgaagttaaacttcgtgtggagagtattaaagagcgtttagaaagtatacagtatgatgaagcggtgtttaaaaaagactcaaataatctgctacagcgtattgccgatgatgaggtgcctaaacaacttttaaaaagttttttaagctttaaaggtaaaaatcatttaaaaggattaaatacctaccaagcttgttacgctgtttatgaacgccactccgagttaggtaccatacagcaatggcattcaccacaggatattaccaattatttaaacgaatttaagcaacatagtttgcgaaatcctattgtggagcaagtagttaccgaaacgttacgtgtagtaagagatatttgggtgcaattgggtgaaagtaaaaaaggtttttttaaccaaatacacttggaattgggcagagaaatgaaaaactcggcgaagaaaagagagaccatttccaaacgtaatgcagaaaacgagaaaacaaatacaagaataaaagcacttttagaggaattaaaagctgaaactaacgctgatattaggtctttttcgcctagtcatcaagaaattttaaaaatttacgaagaaggtgtatcccaaaacccaaatgttagttacgcgaacttaagtgaagacgatgtaaataaaattagaaaaaatagcgcacccacaaaagccgagataaataagtataagctatggttaacacaaggttatttgtccccttataccggtgaaatcattccgttaagtaaattattttcggtagattatcaaatagaacacattattccgcaatcgcgctattttgataactcaatgagtaataaaattatttgcgaaagcgacgtaaaccagttaaaaggaagtaaaactgcctacgaatttttaaaaagcgaaaaaggtagaattgtaagccttagcaatggcaaacaagtaaagttatttaatttagagcagtacgaaaaccactgtaaccaatattttaaaggtaaccgaacaaaacttaaaaacctacttgcagaagaaatacccgaaggttttattaatcgccagttaaacgatagtcgttatattagtaagtttatcaaaagcttgcttagtaatattgtgcgcgaagaaaacgaaaaagaagctacggttaaaaatttactacccgttagcggtgcggtaacctcaaagttaaagcaagattggggattaaatgataaatggaacgaaatagtggctccacgatttatgcgattaaacgagctcactaaaactaacgattatggcgaatgggatagtaaaattaatgcttttagaagtaaagtacccaacgaaatagcaagttgttttagtaaaaagcgaatagatcatcgccaccatgctttagatgctttagtaattgcttgttgtacgcgtgagcattctaattaccttaactctttaaacgctcaaaaagaaaattatggtttaaaagaccaattgttaattaaaaacaaagaaggtcattataccaaacattttaagttgccatggagtaattttactacagatgctaaaaataacttagagaaaaccgtaattagtttcaagcaaaatttacgtattattaataaaaccaataataaaacttggcaatggcaaccgcaggaaaacggtacatttaaaaaagtattggtaaagcaaaaaggacctggccaatccaataacaaaaccaattgggcaattagaaaacctatgcacaaggaaaccgtttcgggtgcggtacaaataaaaagacttaaaaaaggcgaacataatattgctaactatgtaactacgcccaacttaattgttaataaagccatacgtaataaattgcttagggtaattgaagtatttaataacgatattaaaaaagtaaaaaagcacataaaagataatcccatacaactacaaggtaaaaaagtaactaaagtaaaagtgtacgaatggacacaaaatgctacggctacacgcgttgcacttaccgaaaagtttacacgtaaacaattaaacgcggttaccgatagtggtgtacgcaccatacttaataaccatgtaaaaatgtatgttaatgaaaagcaagaggaacaatttaacctagcttttaataccgatggtaatgaggcattaaataataacattgttcgccttaataacggaaaaaaacatcagcctatatacaaagtaagattgtatgaagaaggtagtaagtttaaagtgggcgaaaccggaaataaaacttctaaatatgtagaagccgcaaaagggactaacttattttttgctatttattataatgaagaaaagcaaaaaagagtgtatgaaaccataccattagataaagtaatagcacaccaaaaacaaacggctaacataccacaaaatgagaagttgctcatacagcccgattataccaaaggaaagtttttgttttcgctatcgcctaatgacttggtgtatgtgcctaccgaagaagaaatacttaataacaacttagttgattttagtaatttatcacccgagcaagtaggacgaatttataaaatggtgagctcaactggagcagaatgtcattttataaataatcatatatctaaattaattaagagctatgactcaaaaaccaaaattggagagtttggaagcttaaataagtctgaattatcatatgatgatagtagaataaaagaacgctgttggaaactagaagtaaatcgtttgggtaaagtagtaaaagtgctagctaatgattaagcgcaccatttacataggtaatcctgcatatttaaagttacagcaacaacaactcgtagtgcaggagcctcaaagtaaaacaattaaaggtacggtgcctattgaggatattgcactgcttatgctcgatcattatcaaataacgctaagcaaccaactattaatacaactacaaggaaataatgtagctgtaattagctgcgatgcgcaacatttaccctttggggtaatgttgcctttatatgggcatacccaatacgccgagcgtgtacggcatcaaatggttgcgtccgagccacttaaaaagcaattatggaaacaaacggtaacgcaaaaaatagccaatcaagccacacttttggccttgcattataaaaataacgacactatgttgcagtatcagcacgatgtaaaaagtggcgatactaccaaccgcgaaggaatggcggctcaatactattggaaacatatattagacaattttgctagacatcgcgaaggcgatgcgccaaataatttactaaattttggttatggtgtgttacggagtatagtagcacgtgccttggtatgtagtggtttgctcccggtattggggatatttcataaaaataaatacaacccatacgctttggccgatgatattatggaaccttatcggccatttgtagataaattggtaataaattatataaacaatacccaacagtctacacagcaattaacaccaaaggtaaaagcacaccttttaaccattgccacacaagatgtttttattgatagtttagagcgccctttgtttgttgcggtaactactaccactgccagcttgtataaatgttatactggagaattaagacaaattaaatatccagaattagattaaaaccaaaatgtcagctagtagatttagcgcttatagaattatgtgggtactcgttctttttgatttgccaactgaaaccaaaaaagagcgaaaggctgctaatttatttcgtaaaaaccttattaaagatggttttggtatgtttcagttttctatttatttaagacattgcccaagtagagaaaatgctaaagtacacactaaaagagttaaagctaatttaccaaaacatggtaaagtttgtattttagaaattacagacaaacagtttggtagcatggagttatttcacggtgtaaaagaggtaaatttaccgcagccttcacaacaactacaattattttaatttgtattcattttaaaataagaacaataaaaatagttattttaacaataataggaggtcgtagaaatataaaaatgagtaaaaattttatctacaaattaaaaatcctgtaatttttataattctaaaaaagaatcccaaagtattgattttactcaatattttgggattgaccttgtgattgctcacgtaaagatataatttgaaatcaattcacaacctaaaatttcttgtgttctaatgcatccgccttgtgattgctcacgtaaagatataatttgaaatcaattcacaacctaattcatcaataacattcgcagcggttacttgtgattgctcacgtaaagatataatttgaaatcaattcacaacaaccaatttcccttagcttcggttacaattcttgtgattgctcacgtaaagatataatttgaaatcaattcacaacttatttgggtgtcttccgttattaggcatacttgtgattgctcacgtaaagatataatttgaaatcaattcacaaccctttcggtaagtgttataaattgagtaatcttgtgattgctcacgtaaagatacaatttgaaatcaattcac

SEQ ID NO: 1343 - DNA, 16426 bp, synthetic construct
  source 1..16426: mol_type = other DNA
  misc_feature 1..16426: note = Synthetic
cctaaataatatacatccaaagttaatcaatctatatcaaaaaatatatttcttttttatttggagacaaataaaaaaagaagataatattacagatctctttgtgattagagggtataagattcctgtctctttcatcgaaaagctaaaaaaaagatttcctgatataaaaatgacgatgtatcaatgggattctataaaaaacaactcctatgaacacctaattccttattttgataagacatttacctttgactatgaagattttaagcaaagaaatgatttaaattttttacaattattttacacagaggatattagaaaaataagagaaatagaaaaaaatattcaatatgattttttcctttttaactcatttacattagaacgttatcaagctataacaaagatattagattattgcaaaaagaaagacttaacagtaaagcagttttgttatattccttatcagacatattttaagtatagatatttaaaacgtatttcactaaacaaaacattactttcgtttaatccaatgagccgtttggagtatatacaatatttgtcaaaatgtaatattgtagttgatattaatcattctacacaaacagggttgtcaatgagaataatagagactttgggagctgggaagaaggtattaactactaataaaaacatagaaaaagatcctctgtatagtaaggaaaggattcaatgttttgatataaaagatattaagatttttccttttaaggaagaagaaaaaaattttattataaatgaattatatatagacaactggttaaaaactattttataagaaattgatggttttaaaaaaaataatatctatattaaagttaataataatattcttaatacttcttaattttggaggagtattaagtgttttttttcctgcatcattatcttttgcaatctttttactatctattgttttatttgctttaacgagaaaatatattataaagaaaaaacttattcttttcttatttttttcttatttaataataagtatctctattttccttaatgatgttctatttattgactataaaggaatattcatattcctcttatcaagtataattatattttcctcttttgaaaatattgaggaagtaaaaaaaaatctcataagggcatctaaaatagtaatgtggttggccattataaacttctttttaacttcaatattatctaatttgtatgtagaagctattagtgatgatggttataggatatttaccattttttatatttttaacaatttaggagtaacttatcattttgtagggattaatttttttagaaatcaaggtgttttttgggagccaggaattcttcaaatcataatgaacatattggtttattattatttatttgaagaaaaaaaatcattaaaacatatattggcacctgtctttgtcttgttgactacagcatccactactggattaattatttttacatttctttttatcgtaaaaaacttaaaaaaaatcaacataaaaaaagtttttgttttcatattgacaggtattgtttttgctcctattttaatgaacgatataaaccataagttcaaaggagatgcaaaagagtcctcacaattaagaacttatgatgcattaatagggatttatttaatatctaaacaccctcttacaggaataggtattagtgaagataaatatctaaaagaaataaggctttcttccgtaaaaataaatggagaaaacttaactattgagcgcggtaatactaattctattatattgttatgtctttattttggtatccctttaacaataattattctatatatgatgtatcatcaaaatttatttaaaaaaaaatggatattttttataattttaataacatgcttagcttcagagcctgtagttatacgtatgttttcttttctactaatagtaagttctgttaaaataagaagcaataactataatacaaaaacttaataaaattatcttgataaatgacaatatctgtagttatacctatgtacaatgctgaaaatactattgtaacagcattagactctataaaaaatcaaacctataaatgtaattatcaaattttagtaatcaatgatggatccaatgataattcaaaaaaaaaggtagaagaatatatccttgaaaatccaaagatgaatataacattagtcaatcaagctaatagtggtgtttcaaaagcaagaaatgaaggtttaaggcgaacagaaggtgattatatcgccttgttagatagtgatgatgaatggttgcctgagaaaattgaaaaacaaatagctttatttgagaaagataataatatagatttgttaggtacaaatagaaataacgagtatttcaaaagttttttaggatttaaattcaattatctaacaagaattagctctaaattattgttgttaaaaacatttttagttactccctccgttatctttaaaaagaaagtcttgttaaatacaggtttttttgatgaaaaacaaaaatttgcagaagaaggcgattattggattagaatttgtaataaaaataattgttatttagtaaatgaaagtttggttataacaggcggaggaaaacctaattttggattttctggactatcttcaaatctatacaaaatggaaaaaggagaattgaagaatataagaactgctttaaatttaaaaataattaacattttcgaatactcttttttagtcatatactctatttctaaatttattagaagattgataattgtcaaacttagaaaataatgggtaaatattctatttttcaaatattttgcttgatcttttacaaggtcagaggctggttcattttaaaaaatgcacgacttattcgtttccctttccgtgtaagaggaaaacaatatataaaaattggaaaaggttttacaactggatttaattgtagaatagatgctttaaatataaataatcttagtgaaaaatatcttatagaaataggagaaaatgtagagataaatgatgaggttcatattggtgcaactcaaaaaattatcatagaagataatgttctgatagcaagcaaagtatatatatctgatcataatcatggatgttataagggagatgaaccagattcccctatgtctatccctaaagaacgaaagatacattcttctcctatcaaaatagaaaagaatgtatggattggagaattgtgttgtattttacaaggtgttactataggcgaaggttcaattataggagctatgagtgtagtaacaaaggatataccaccatatactattgcagtaggctctcctgctaaattaattaaaagatataattttgaaaataaaaaatgggataaaatatgaaactttcagcatccattgttctatataacacaaaaatagatgaattaaaaagggttattgatagctattttacttatccaggaaaaaaacaacttttcttagtagacaattctccctctgatagccttaaagaaatagtaaaaatataccccaataatgatatatattatatttttaataatgaaaatatgggatatggtaaagcccataatattgctatcaaaaaaagtatagagcaagggctttcctatcacattatcctaaatcctgatatcattattgaaaagggttcgttagaaaaacttactgaatatatggaacaacatcctgaggtggggaatattatgcccaagattatctaccccgatggtgagttacaatatctatgtaaacttctcccctctcctattgatcttatattcaggcgttttatccctattaaaaattggaaagaggctataaacaaacgatatgaattacactcgtttggatatgatcaaataatgaatattcctaatctatctggatgctttatgtttctacgtactgaagcactcaagcaagtaggcttatttgatgaaaatatcttcatgtatttagaggacattgatctaaatagaagaattcattctaaatataagacaatctattatcctgatgctacagttattcatgagcatcaaaaagaatcctacaaaagtaaaagactcctaaaagcacatatccaatctgctatttattatttcaataaatatggatggttctttgataaagagagaacaaatattaacaagaatgtttttaaagaactatccggaaaataaaataaaattcgtacctttgcctcaaaatctatacttatgcaactcacacaaaagctcaaacaaatctttataagtgatttagaaaaatactccccttttatggagcgagatctgaagaaattgcttatgaatgtctctatcccttatctcaatggtaaggaggtagcgcatgtggtggccttttgttttgagtatgactatgaggatcttaccatttccttttgggcattgggagaaaataatgaaattatctctgaaatactcgaacttcctaccgaaagggacgaaaaacacttcccctcagataagtttgttgtagaagaagaggacttggaggacttattatatgaaacagagctggaggagaatgaaattgaggatttgcttatcgaataccgacaggaaaaactagctatcttcaccaactggtttatagctcgttggaaaaatgttaccgaacagcttaatgttaccattgatgcctatttttctaaactcaatgctttctataagacagatctgaacaccttagagcctatcagttcagaggaaattcaggagaaatatacaaatccagaaaatgaaatataacactttattacacatgagaacatttgctcaggtcttttgtttaagttggctctttttttacggtagtttagctacaaatgctcagacaaaaggacatttttccgataaaagattacaaacagacacttcaacagcaagttatgatgggccttatatcttttataataaagaaaaagccatcataaagcagattattgagaaaaaagggcaacccacaagtgtaagtgaagaactggcatatcccattgctggtaagaagcttaaatgttatgtgaatgacaaagagcatttctctttcaaggtacaggaattactacaaaaccagccttctgtatatgccatgcctgaaaagctcattgctatttctgatatagaggggcgttttgaggagttcaaggactttctcattgccaataaggtgatggataagcactacaaatggacttttggtaaaggacatttggttactgtaggtgatttctttgatcgaggtttgttagtcacccaaacactttggcttatttattccttggaagaacaagctgaaaaggcaggaggcaaggtgcactttatccttggcaaccatgatcttatgaatatgaacaatgattttcgctatgttcgtaagaaataccttgagaatgccaaactcatgggacaagaatattatgatttctacaaacctaatactgaattagggcgttggttagctactaaaaatattctggagaaaataggagactatatctttgttcatgcaggcatttccaaagaggtaagtgatctgaatatgggggttgaggggatcaataagtatgcacgaggctactatttccataacagagaggcagcattgggaactgatcccgtaggaaaaaccatctatatgtttggtaaaagtcccatgtggtatcgtggttatggaaagcagactattgataaagcagaatttgcagctattgcccaaaatatgggtactaagaaatttgtcattgggcataccctccacgaatcagtaacttatcttatggataagcaagtcattgaccttgatgtgctccatgctaaaggaattactcagggattactgatagaaaatggacaagaatatatggtagatattcagggacaaaagtcagctatcaaggatcaagccaaagaagttgatgattaattattatatttaaattgtttttatttactcatgaacatgaaaaatcaatttggaatactctttgtttattctgagttgatttttcccctttatgaacattacctcaaatgaaattccaattagtatccgatttcaagcctatgggcgaccagcctgctgctattgcctctttggtcaatggtatcaatgaccaagagaaataccaaacgctcttgggtgttacaggctctggaaagacctttactatagccaatgtagtggaacaggtacaggtgcctactctggtcttagcgcataataagacccttgccgctcagctctatagtgagttcaaggctttctttcccaacaatgcagtggagtactttgtatcttattatgactactaccagcctgaggcttatatccctacaacaggggtatatatagagaaggatttgtccatcaatgaggatattgagcgaatgcgcctcagtactacctcttctctactctctggccgccgtgatgtactcgtggtagcgtctgtctcatgcctatatggtatcggaaaccccttggagttccagaagaacgtcatttctatagaggaaggacaaacactcactcgtaccaagtttatgcaccaacttgtacagagcctctacgcacgtaccacagctgactttctacatgggaatttcagggtaaaaggagatgtcattgatgtctttcctggctatagcgaaacgcctattcgagtacatttcttcggcaatgaaatcgagctgatagaaacctttgaccgcgagacgaataagaccatagaacggttggaaaagctcaatatctatcccgccaatatgtttgttacctctcctgaaatactacaagcagctatcagggagattcaggacgatttggtcaagcaaatagcgttctttcaatcggtagggaaaaacctggaagcaaagcgcttggaggagcgtaccaattttgacctagagatgatacgtgagttgggctattgctctggaatagagaactattcccgctacttggacaggcgccctccagggagtcgccccttctgcctgatagactatttccctaaggacttccttatggtgatagacgagagccatgctactgttccccaagtacgcgctatgtatgggggcgacaggagcaggaaagagaacttagtagaatacggattccgccttccggcagcgatggacaaccgtccacttaagttcgaagagttcgaagcactacaaaatcaggtgatctatgtcagtgctacccctgcggactacgaattgcagaagtgtggaggcgtatatgtggaacaggtcattcgccctactggtttgctcgaccctaagatagaagtacgccccagcaaaaatcagatagatgatctcttggaggagatacaaaagtgcgtagaggaagaccagcgcgtactggtaaccactcttaccaagcgtatggcggaggagctaaccaagtatttgaccaagatggaggtacgttgccgctatgtacatagtgatgtggatacgctggagcgtatcgagattatgcaagaccttagaaaaggactttttgatgtacttataggggtcaatctgctcagggagggactggacttgcctgaagtatctttagttgctatcttggacgctgataaagaaggctttttacgttctgcacgttccatgacccaaacagtaggacgcgctgcccgtaatatagatggccgtgctattatgtatgctgacaaaatgactgatagtatgcgtgtaaccattgaggaaaccgcctaccgaagggaaaaacagatgaactacaacctcacccacggcattaccccgcagccattacataagaaaatagagaatcctcttagcaaaagccctattacggaatttcattacgaaaatactccgaaaaagaaagaacactcccctaccaagcctatgagcagaggagaacttgagaaagaaatacaacagactcgcaagctgatggaagcagcttccaaagaattggacttcattcaggcggcacactaccgtgacctactcaaggaacttcaagaaaagcttcaagcaagctccttataggcattgtgtatcaaaagataatcagcaagcaccaaggcagacatcgcctctacgatgggtaccgcacgaggtactacacaggggtcatgtctgccttttccttggaactgcaccacctcccctgccctattgatcgtctcttgctcctgcatgagcgttactactggcttgaagactacgcggaaatagatatccattccattggaaatgcccccttgtatgcctcctgagtagttggtacgagtcgtcccatcaggtaggaatatatcattgttttggctacctctttttctagtagaagcaaatccccctccgtactcaaatccctttacggcattgatagaaagcatggccttacctagttcagcgtgtaagcggtcaaaaacgggttcgcccaatcctacaggcacgccttgtatcacacaggagacaatacctccaactgtatctccgtccttgcgtacctccctgatataggcttccatttgttctgccagtacgggatctggacagcgtacaggattttcttctatttgggaaaaatcaagcaattggtaatccttttcaggcaatgccaactcccctacggctgatacataggctgtaatttttatcccttttaggaactgcttggcaatagctcccgccactacacgaacggctgtttctcgagcagaactacgtccgcccccacgatggtcacgtaagccatatttctgctcatagacataatcagcatgggaggggcgatataaatccttcaaatggtcatagtcctgagaatgttgttgggtattggctatgataaagccaataggtacccctgtggtctttccctcaaagatacccgaaagaaactgtaccttatcagcttccttacgttgggttacgatagccgactgcccaggccgacgcctatcaagttccctttgtatttcctcgaagtccaatgcgattcccgcagggcaaccatcaattacgcctcctatagctgccccatgtgattcgccaaaggtagtgagtctaaacaaatgtccaaatgtattccctgccatagtcctaatcttctaatttttcaatagtaacctcataaagttgctcaaaaagctgttctacatagctggcttctgccttgcgtacctctacaagtagcgtacagttcatctccatggtctgtgaaactatggtgagattcctgtccttaataattttcatcaccttattcatatccttgtaatcaaagacaattttgtaggtaaggtcaatggtgcgttcctctatttcagcctcttgaagagtgagctgagcggtagttttgtaggcggtaataaggccacttacccccagcttgataccaccaaagtagcgcactacaatcagcagtacattggtcaactcaaaggactgtatctgcctgtagataggtagtcctgccgtaccgctaggctctccatcgtcattcgccctataagtaacgtgctctttgcccaactgataagcataacaccagtgccgtgccgaaaagtgttctttcttaaccgcctccaagtgctttttcacttcctcctctgtggtaataggatacaaataacctataaacttactgctcttatccttatagataatgtcagtaacaggctggctaatagtcttataggtatctgtcataggagtgaagaatgaatagtgaaaggtgaaaaataaagtgcaaagatataaaaacaacccctatattactataggggctcctttagatgttttcacaacggaataatccttattgtgagttgctttcaaatatgggacaaaagtacaacattttttttaaataacaaacttaaatgtaattttttttattaaatttgtagcgaattaaacttattaaatatatgaaatatataaaatacatattaggattagacataggttccaactccattggttgggcacttattcagctgttcattgaagaaaagcaaggaaaaattattgctacaggaagtagaattatccctatggatcaagggattttaggaaattttgaaaaaggaaatactgtttcgcaaacagcagatcgaactttttatcgtagtgctcgcaagctccgagcgcgacatttgcttcgtcgtgaacgtcttcatagagtgctccatatcttaggtttcctgcccactcactatgataagcagattgatttttcaaagagatatggcaaatttgtagataatacagaacctaaaatagcctataacgaagggaaattcctctttatggatagttttcaggagatgctagctgattttaaatcacatcagcctgatttattctataccaaaaagaatggagaagaaagtaaaatcccctatgactggacaatttattaccttagaaaaaaagcactttcacagaaaatcagcaaagaagagttggcttggattattctgaattttaaccaaaagagaggttattaccaattacgtggggaggaagaggctgaaaaccctaacaaagaagtagcttattactccctaatggttaccgatgttaccgttgaagcacctaataaaaaaggagagatttggtattccatacaattagaaaatggttgggtatatcgccgtacaagcaaaattcctttagatgattggaaaggaaaggttcgcgattttattgttactactgaacttgaagaagatggaagtgtaaaacgagacaaagatggcaaggaaaagcgttcgtttagagctcctagcgaagacgactggaatctacttaagaaaaagaccgaacaggatataaatacctcacgaaaaacagtaggatgctatatctatgatcatattctgcaaaaccctaatgaaaaaatcaaagggaaattggtccgtaccattgaacgaaaatattacaaagaagagctaagggctattttagaaaaacaaatagttctacagcctgaactatttacagatcaattgtttaccgattgtattcgagaactctatagcaagaatgaagcacaacagcgaaaccttgcagcaagagattttgtacatttgcttgtagaagatatcattttctaccaacgtcctttgcgcagccagaaatcaactcttgctaattgtagcttggagtctcgttcctacatagataaggatagccatactcgtaaagaagtccctttgaaggtatgtcccaaatctaacccttattatcaagagtttagagtactccaatggttgcaaaaccttaaaatatacaagatagataccgatcaggaagtaacccatgaatttataaagaccttagaagacaaacagcaactctttgattttctgatgaatcagaaagagattgattgtgaggaattactaaagtatttcctcaaccagacttatccaaatgccaaagaaaaagcactaaagagtgagttgaagaaatggaaagatacttatcgctggaactatgtatatgatataggagaaaaatcgtccaagaaatatcctatgaatgagaccagatatgagcttaagcgacatttagaaaaagtagccaacttacctgatgatttcctttcctcagaggtagaatacctgctatggcatctgatctattcggttaccgataaggtagcatatgagaaaggtctaaagaaatttgctcaaaaacatcacttagataaagattcttttgtagaaagtttcaagaaattcaaaccctaccccagtgaatatggtagtttttcagaaaaagctatccgaaagttacttcctctgatgcgttttggctcttattgggacttcaatcatatagataagaatactcaaaaacgtatagaagaccttatcacaggggtagaaaatgaggaaatacgtactattctccgagaaaaagccgaaaagtatcagcttgaaagggaaactgattttcaagacttacctctttggttggctcaatatattgtctataaccgacatgctgaggcttcctctcttgagaaatggacttcagtgaatgacttggagacctacctcaatgagttcaagcaacattcgcttagaaaccctatagtagaacaagtagttacggaaaccctacgtgtagtcagagatatttggcaacaatatggacaaggacaagccgatttctttgatgaaattcatatagaactcggaagagagcttaagaaaaccgctaaagaaagggaagaactatccaagcaaaaccagaagaatgaagatatcaacttgcgtatcaaggcgttacttgcagagttaggtgaagataatactatagaaaatgtacgtccctactcacttatgcagcaagaattgcttaagatatatgaggaaggcgtatttagttcctctatggaaatagaagaagaaatagagaaaatccataaaaaagcatctcccagtaaaactgaattacaacgctataagctttggttagaacaaaaatacaagtccccttatacagggcaaatcatctctctaaaaaggctctttacggaagattatgaaatagagcatataatcccacaaagccgctattatgatgatagtctttccaataaagtaatctgtgaatcagctgtaaataagctcaaaggcaatcagttaggtttggaatttatcaaaaatcactatggcgagaaagtacatgctgctggtaaggaagtaagtatattgactgaggaacaatataaggaatttgccaagaaccactatgctaataactcaggaaaaatgaaaaaacttctcttagaggatattcctgaaaagatggtagctcgacagatgaatgatacacgctatatcagtaagtatatttcagaaatactctctaggatagtacgttcagatgagcgagatgaaggtgttaattctaagaatgttatcttatgtacaggtaagattacctccgctcttaagcaagattggggcgtaaatgatgtatggaatgaccttattttgcctcgttttgagcgaatgaatgcccttacccagagtacgctctttactacctataatgaaagataccaaaaatatctacccacagtacctatggaatatagtaatggtttccaaaagaagcgtatagatcaccgtcatcacgctatggatgctattatcattgcttgtgctaccagagagcatattaactatataaataaccaacatgctttagaaaaaggaaaagataaaaaggaaaaacaaaaagaacatgataaacttagagaaaaactttgcatcaaaaagtacaataaaggaagtgaagaaaattatagttggatattcaaaaagccttgggcacattttactcaagaagtacgaacagccttagaaggtattgtggtaagtttcaagcaaaacctacgtgtgattaacaaggccaccaactattatgaatgttgggtagaagaaaatggtaggtatattaagaaaatggtcaagcaggagggtactaactgggctatccgaaaacctctgcatgaggaaaccatttcaggtaaaatttatttagatagagagaaaataactaagaatgatatacttactgctactagaaaaactgttgatagtagttttgatgaaaaaagaataaaaaaaattacagacacagggattcaaaagatactacttaattatcttaagtataaaggaagtccagaaatagccttttctcccgaaggattagaagaacttaataaaaatttatctatttataatgatgggaagcctcacaaacctatctataaagtaagaatctatgaaaagggaagtggtcgatttgcgttaggagaaaaaggtagaaaatataaaaaatacgtacagggagctcctaatctatattttggcatatatcaaggggctaacaagcgttcctttgctaccattccgctcaatgaagtgattgaacgacagaaacaaggacgctcttctgttcctgaatataatgaaaaaggagatcccttactctttagcctatctcctaatgacttggtatacgtacctatagaaggagaaaacatagaaaatattgatttccaaaacttttctaaggaacaaaaagaaaggatatataatgtaaatgatttttcttctacttgttattttacgcctaatagaattgcaaaagctattttccctaaggaagttgatttgcaaagaaaaggagataaattatctggttcttatgatactaaaacagcaagtctggaaggaattcaaataaaagaagtctgtatcaaactaaaagtagaccgtttaggaaatcttagtaaagcataagatttttactcatctaatatcaataagctatgttgtaccgttctatttatataggtaaccctgcttatttgaagctgaaagacaaacaattaaaggttaccgacccagaaaccaaagaagaaaaaggcagtgtccctatagaagatatagggctactgatgtttgaccattaccaaatcaccctctctcaccagctgatacaggaactgatgaaaaacaatgtgatccttatcagctgtgatgaacggcacttacccttggcaaggagaatgccgaggtacatatcaaccgtgtcaagcaatggctccctgagtttggaaaagtagccatatttactatcactgacaaacaatttgaaggaatagagatcttctattgtcaatcaaagaaagatcctcctaaagattgtatccagttcactcttttttaaattttagaaaacgaaaaaccttcctttttattcctaagatagaatagaaaagaaggttttttctttttgaacttttgtaataacctacagacaatcaatctctttaaaagattgaggttgtttgaggtcacaaagttacgaatttgaaagcaactcacaacacatggcaaaattactacaaaaattattctgttgtttgaggtcacaaagttacgaatttgaaagcaactcacaaccaaatatagcaagggaagagacgcgctatagttgtttgaggtcacaaagttacaaatttgaaagcaactcacaacgcgagatttttgacccaaaaatcatgacaagttgtttgaggtcacaaagttacgaatttgaaagcaactcacaacggtgcagtgcgccacttctcataagcctgggttgtttgaggtcacaaagttacgaatttgaaagcaactcacaactagctccatccttcttctttattctctaatgttgtttgaggtcacaaaattacgaatttgaaagcaactcacaactagggctaggagacttggtagaaaagcagagttgtttgagggcacaaagttacgaatttgaaagcaactcacaaccagttctgtagcaggtactgccaagtggagttgtttgaggtcacaaagttacgaatttgaaagcaactcacaacaaacgttccttgtcacttttatccttttcagttgtttgaggtcacaaagttacgaatttgaaagcaactcacaacaatactttcctatccctgtactcaagagaagttgtttgaggtcacaaagttacgaatttgaaagcaactcacaacaagtatctttgccatgttaaaaattttgttgttgtttgagatcacaaagttacgaatttgaaagcaactcacaactatctttttagttgccaatgctcattctgttgtttgaggtcacaaagttacgaatttgaaagcaactcacaacatgatatcatccacatctactccataacctgttgtttgaggtcacaaagttacgaatttgaaagcaactcacaacggactgtaaggcgtagtacatagtaataatgttgtttgaggtcacaaagttacgaatttgaaagcaactcacaacgtggttactcggttgctgtctcgtcgtgcagttgtttgaggtcataaagttacgaatttgaaagcaactcacaacttatcgtgccatcagcaagtttaatatttcgttgtttgaggtcacaaagttacgaatttgaaagcaactcacaacaaaggctaccgagtcaatcaggggagaccgttgtttgaggtcacaaagttacgaatttgaaagcaactcacaaccaaacgttccttgtcccttttatccttttcgttgtttgaggtcacaaagttacgaatttgaaagcaactcacaacttattatctaaccactctaaagcttcatgagttgtttgaggtcacaaagttacgaatttgaaagcaactcacaacactttttaaatggaatatactcggtaacttgttgtttgaggtcacaaagttacgaatttgaaagcaactcacaacaatactttcc

SEQ ID NO: 1344 - DNA, 16424 bp, synthetic construct
  misc_feature 1..16424: note = Synthetic
  source 1..16424: mol_type = other DNA
catccttgcctatttctgtcaccgagtcgggaagcacaattccagtcaggctgttacaatcagaaaatacagcgttaccaatttttgttagtgacttgccaagtgttgccgacttgagcttcatgcaaccggaaaacgcaaaatcgccgatatatgcaaccgaatcgggaacaacaaccgatgttagttcgttgcagtcgccaaatgcgttgcgagcgataccccttgtgccttccgctattgtcaaagagcctgaaagtgatttgcccttgcatccgagacaccatccatcaagatacaaaactccgttgggctggctgttgtaccacgcggtgccgaagaatgtactattggctatgcttgtaagtgattcgggaattgtaatgcccgcaagtccgctacagcccgaaaaagcgtgtggcataatgcaagttaccgaacttggaactgtcagtgctataagccctgtgcaaccgagaaatgcgctccatcctatgctagttacggaatcggggatttttaccgatttcaagcaagtcgcatacgaaaaggcaaaagcgtttatttccgatatggaatcgggaataaccaagtcggtaaccagctcgttattaatgtatagtttatgtgctttattaagcggatttgcatgcaggtcaccaaaaaatattttgcaccagccggcaatatcaccgccaaaatgcacagcagtcaaactgtcacagtcccaaaaagcagaatctggaataccttttacattgctaccaatatttattgtcgtaagcgatgtgcaaccatcgaatatgctataattacaaccctcctcgtcgtcaaatcctattgacatacaatcagttgcattgtagttgatggttttcagactgctacattggtcaaatgcacctgtaccgattgttgtaacagacttgccaattgtcacttctactagacctttgcaactatcaaaggcataactgtcaatttccattaccgaatctggaattacaactgatgtcaatttatcacagccataaaatgcttggttgtcaatctttttcacggaatcaggaattaccagttctccactgaaatcacaatcgcactctacaagtacgccatcttcaatctttaatgctttttctaagtctttcatatacatttatttttaattaattttcaattcatcattcctcttgctccctaaccgcttcggtcaatccccaaaatagaccggaagcggaagggaaaacagcaaggcattttttcattttttcatggtactattttcggtgttcattcacgagacaaaggtaaagggcatttttatgcacctttggtttttgctagtagcagaacacttgttgctgattatcaacacataaaaaaaggacggcttgtgaccgtccaattgttttgttttaaagctagtgtaaaatattggctctagttcgatattgaactgattttttgtggtttttataacagatagattatcattatgttaagaaaagagaccgtcattccacaagtcagaacatacacgcgatacggaacggggagcgttgtaatgttcgactatgcggaatctcatttgtgtacttaatggggattccgtataagtgaactcacaagcaacgttccttatgctgttcgttcaactttacggaatgacggcaaagggttggcaaaaaaatcagaataatttcagttgtttgtaaaactagagccctgttttaaagttagtgtaaaatattatctggaaaaactttccgattctatttttctgtacaatctaagatacgactcgtttctcgcactgaacttgcctaaatctatgtattcctgggaaagaccgatgccatagcttgaattgccgtatgaatccttgcccttaatttccaaaagatatgatttgttatactcttcctttaaagtttctacatcaaattcttctttgaaaaatttatttattgcggtaacagcaggcaagaatgtgttcacacccttgtcccaccatgacataatatctgcttcactcttactgccggagccacttatatcccaataaattgacagcaaaacttccttgtaattctccagctcgacctgagaaaccaatttcggcaagctaaaattatacccaaaaagttctatctgctgcagataaaaaatgtataacactttggatacattgcctctaccgaacgacacctttttgttttctttttcggagattttaaggtaaatgttattgtccttgatgaaaatcggacatacctttctcagtttgccctttctctgtttctcgttcagatatgttgacataagttcttcaggagtaatgccgatattgtgtgcaattcgttccaatttttcatcaatctccgataatccctgttgcatagctctagttactctcctaggctctggcagattagtaacctgaaaacccatcatcagcccgaagccactcgacgacggacctggatactggtcaaacctatcatattctttttcgcgctgatattcagcataggatttacccatcagccgtctgaaatccgtctctgccacataacgggcaaacgattttgctttcccaaaagcattttccgcggaaattgagtcaaaatcctgatagtaacaaaccgcgtaatcgtcttccatcacattgccaatggtgaacttcggcacgcaacgggcggtaagacttccgcctttgtcggcgcaaaggcactcgcgcatattttctacaacttcgtcaacttcttcggcatcgtatttgtcgcccaactgcgagcgcaaatagtcgccatcaagttccttttgcgacacatactgcaactttatcgcgaacggcaacatatccatatctctgaacagcggaccttcatgttgcaactggcgcattgtgtcgttcagagcctcgttgtcgagactttccacatagtaaattgtgtcgtagcgaagcggcactgggctgggaagcgaggtggttgtatagtcgaaaatcatcctgttatgtttttgtttagttctatattatttaaaccatagacatcacaaaattacatattattgcggaaatatcaaaattaagaatgatttacggcttttatttaaaaactaaattccgtaccctttcgctccctgagccttcgctccctttcgctccctgagcttgtcgaagggtcgaaggggcgaaggctcaggttattgtgcattatatcatttcgtcaccttgacttcccttcgaccatgctcagtgcggcgcgacaagctcacttcgactggctcacttcggcaagctcagtacatagcagcacatcgcagccagcggtttgttcaaacactaacatccgagaaaactatatttccatcttttcccttgtccagtttatactttccacccagtagctcattctgaacatatcgtacttcttcccgccattgattacattgtcaatgctatcgagcctattcctgattttatcaatggagtcgtatggcagaaaaagtttcagcacacaagtcctgtcgatttttatgtagagcgacatcgacttgaagtttcgttttatgtggtattcgcacccaagcgacttcattttcttctttaccagcgccgtaacgcccaaatccccaacttccttcgacatttccagctttttattctctatgttccatccgtccaactcgtcattccaaacagggaacatcttgtccagttgcttcagttgctccacaccaatctccttatagtaaaatttcttcatacaattatcggagacacggattatgatacagttgtcttttgctattaccgagaagttttcaaatgatatgtccgcatcttccaaggttttgttaagcgaggcacctgttcctgtattttcgcggttttccagaagaaacgactctatcctgtattccagaatgcgagccacagaacatttccctttcaacacccaattgcgctgtctttcctttattttgatgccgagcgtatctctcaggtcggcaaactccttttcccattcgggcatcctgcggtcaacctccttcatgtattcaataaagttaggaattttgtcaacatacagcggagaccaatggatattcttttttatttcaacgattttattcttgacatgcgcacttacatgaaaatccacatttttaagttttaccagcaaatcgtcatagtaatgtccgattttttttattgtcgcatccgggaaaaaactttctattgtctcgacattgcaatttgtgagcatttcctttatgtccgatgtctgtttctggttatgttgtgcaagtagcatttccagcttttcatcataaaatgccctctggatgtcctgtggatacaatgcaaattccttaatccttttctctatttccatatttccttactttgatttcaatgcaaaataatggaatatatggatgcggacgggagttttgctagtagcagagtttttgcagcggtaaaaaaaatggaaattcagacgatttttggtgtataggaaatgcaatcggagcgaacccaatcgtcaatccaaaaatctaaaatcctcaatcgtaattcgtaaatcgtaaatccctttaccacttcacttcttccctatttatcggcatggtcatgcaccttgcaccaccaccgccacggggaagttcgctgccggcaaaggttactacaaacttttcgtagttgtgcatatcaaccgagcccttgcaaacatcagcagccttaagtacggcaaaaccggccttgtccaaagcctcgatagttttccagttacgctcgtaacctatgaccttgccttcgcccaaagcaaagaagtttgctccgctgtgccactgttcgcgctgctgaacccaggcatcgtcgccaccgcagacgacaggatttaggtcgaagcccaaatcacgtgcgccctgcaggaaattcggtttctggtgatatgttattttcccgttatctatctctatatgagttgtctgcaagtgcgaatacttggcattcttgcggatgattggttcaaacatcatgcaacggtccttgtcgaggaaggtgaacaccatatcgagatgaatgaacgactcgggcgtttcgggcaattcctgaacaagaatgttgaacttgggcttgcgtgtcttgaaatattcggcaaggaattctattcctttcttgttggttctgatgccattacctataaacaaagtatcgtcgcgggctatcagcacatcgccgccttcggtgcgtgcagatgcgtcccattcgccagcatttatcgactcgcaaccgaaatagttctcaaaaatagcacggtagatgatgttttcgcgcatacgcaccttgaacgacattgtgttcataagaagcatattgtacattgacgatgcagcatcgcgggtaaagaacaaattgtacaacggcttgagaatgaagcgctcgtcctcgtattttgcagggtcaacccctctcctgtattcaaagccttcgacaagttcgcgagccaatgtcttctcatcgtgcgacaggagttcgtcacaaaggaaaccgcagtcgtcaagacgacaggaagtttccacgagatttttctttacattctcattcttaagcacttcggcaagcaaatcgacgacctgataagtctttgtccaacgcgagagcacaccctcgaaattggcatattcgccatcgaccaactttttgttcaaaatatcgctgtacaatgcttcgtgtgcattttcgggagtcatacgctcgatttcgattcccggacgatgcagcagaaccgcattgagttttcctatttcagaataaagtctaaccttgttatccataaattattttttaggtcacggagaacatcagccaaaacattctccgtcaagcagaaaagccgtttcacgacaacaattccactctggcgcaaagataagacaattttcggaatttatgggttccgacaaaatttatttggtgttatatagcacggctctttcatttgaccgccccctgagcctgtcgaagggtaaggttagtagcattatatcatttcgttaccttgacttcgacaagctcagccagcggatttattcaaatgctaactgtctgtatcacaagtaacaacattgtccaaatgaaagaaccgtggttataaagcagaaatctcaagagaaacaaatagttatctcaacaaaaaaagcgactttcgtcgcttttttattacagcagatgaaaactagccgtcagtcccgccatcacaatgctgaccatactcatcagcttgataaggatgttcaacgacggtcccgacgtatccttgaacgggtcgccgactgtatccccgacgactgttgccttgtgattttcagaacctttaccgccgaagttcccttcctcgacatacttcttggcattgtcccacgcgccacctgcattagccataaacacggcaagcacaaatccgcacgacaatccgcctacaagaagtccaatcactccgggaacgccaaggaacagacctgtgagaatcggcactactatcgccagaatcgacggcaacagcatttccctctgcgcaccgcgtgtcgaaatagccacgcaacgctcgtagtcgggttcggccttgccttccaatatgcccttgatggtggcaaactgtcggcgcacctcctccaccatcttctgggcggcacgacctaccgcattcattgtcataccgcagaaaacaaacgccatcatagcaccaatgaacacgccgacaagcactatcgggttcataaggttcacattgtaggcatccataaagtcaaccaaagtagcctttgccgcctcaacaccattgggcaggttctcgcccacacgcacaagcgcaatcttgatttcctcgatgtacgatgccagaagtgcaagtgccgtcagtgccgccgagccaattgcaaagcccttgcctgtagcggctgtggtatttccaagagcatcaagggcatcggtacgcttgcggacttcggggtcaagaccgctcatctcggcattgccaccggcattgtcggctataggtccgtaggcatcggtagcaagggtgattccaagcgtcgaaagcattcctacggctgcaattccgattccgtaaagtcctgtctgcaagttcattgcagtaaattcaatgttgaaaccatttgcacaaagatatgccagaacaattgctacgccgaccgtcacaactggaattgccgtggaaagcataccgagtcccaagcccgaaattatcaccgtagcaggacctgtcttcgaactttcggcaaccttctgtgttggcctgaaactttgtgaagtatagtattccgttgattttccaattattacaccagcaagcagaccaactaccaccgaaagcgaagtctgccaccactggtttgtctcggtgccgaacagccaagcgaagattccaaatgtcgccactgcgataaggacagaagccacattggtaccgcgcgacaaagcaccgagaagattcttcatattggcgttttccttagtgcggacaaggaatatacctattatagataatagcactccgaccgacgcaataagcataggcgcaagcacagccttaacctgcatatcggcgcctgcagcactttcggaagcagctgtggcaaatgccgaagcaccgagagccatcgtcgcaaggatagaacctgcgtacgattcgtacaagtcagcccccatacctgccacatcgcctacattgtcgccaacgttatcggcaattgtcgcaggattgcgcgggtcgtcctcgggaatgttgaattcggtcttgcctacaaggtcggcaccaacatcggcagccttggtgtagatacctccgccgacacgtgcaaacagagcctgagtggaagcacccataccgaaagtaagcattgtggtggttatcgttataaggtcgccctgagcaccgaccagttcgagcaacttggtgtatttcagcacgagaaaccacaccgaaacatcaagcagggcaagccccacgacgaccagacccatcaccgcacccgaacggaaagccactttcagaccgctgttcagcgagttgcgggcagcattggcggtacgggcagaagcgtaggttgcagtcttcataccgaagaaaccggcaagagccgagaagaaaccgccagtgaggaaagcaaaccaaacgatgccgttctgcaggtggaaataagccattacgccgaaaactacagccagcacagcgaacacaatgcccacgaccttatactgctgtttcaggtaagccattgcgccgttgcggacgtgtctggcaatctttttcatcaaatcggtaccttcatcctccttcatcatctgcttgaaaaagatgaaagcaaacaggagagccaaaaccgatgctcccaacgtcaaaaatataatccagtccataacataaataattaacaattaacaatttataattaacaattaacaattacaaaatcataaaattttcaaatcatcaacaatctcaacgttctgtcgtggctcgccgcgacgcaacaattcaacgttcagtcgtggcacaccgcgacgcaacaattcaacgttcagtcgtggcacaccgcgacgcaacaattcaacgttcagtcgtggcacaccgcgacgcaacaaatttacacccttttccgaagatagaattatttttttgaaaaattagcctaacggcatagatgcttgcaaataataattaaatttgcacccgaaaattaacaaacatcggctattgcagttgtttggataacaacgctgtgacagccacaaatttatctgtaatatgagaaataaatatagaacattaaacgcaaacgagttcgacagcgcaattgccgacagccataccacaattcttgatgcacgctcagcaaaagatttcgccgaggagcacatccgcaatgcaataaacattgatgtgagcagccccgatttcatctacgaagccaatgcaagactgcatagggataaccaaattgccgtttactgcaaaagcggtgtccgtagcaaaatggcagccaccctcctctccaaccaaggattcgacatcgtttacctaaacggaggaatatcggaatggaaaaaggctggcaaggcaacggaaaggtaaaatgcatgaaacgaaccgtaataatattaatcgtcatcgccatcgttgcggtgggcgtgaccgcaataatttacttcagcaatatgaacagcaagtttaccacgttgaatgccaacgactttgaaaaagcaatctccgacagcgcaaccatagtccttgatgtgcgcagtgccgacgaatatgccggcggacacatccccaacgccataaacatcgatgtgaaccgcgctggtttcctctacgaagccgacgagcgactgcccaaggacaagaccattgccgtatattgccacggcggagtgcgcagtagaaaagccgcttccctcctctccgacaacggcttctgcatcctcaacctcgacggcggaatcaaggaatggatgagcgcaggaaaagaaacgacggtggattagatggctaacagtctaacggtctaacagtctaacggtctaacagaccgacggacgaaaaggatgaaaggctgacggacgagaagccaaaagagaacaacagcaacagcaataatgtacggacgcaaaattttgcgtctcaatcctgaaacggcaaagccattgaattcttctgtaaagtcgttgcgcgcaacgactctacaacagaacccattgaacgttaaacaattgaaccttgaaccccttgaacatctccgtaggcacaaaaaaaagcgacacccgaaagtgccacctttaatgttttcacaacggaataatccttattgtgattcgcaaaaaaatgtattgcaaagatattaacaaaactgtttcctgcaaagaattttttttatttttgcaaaaaatatatttcatatgaagaaaattctaggtttggacttgggtaccaacagtataggttgggcagtggtaaatgcggatgaaactaaccgcgaaaatgaaacaaaatacttgaaaccaacagaaatcagtgcggcaggaagtagaatcattccaatgtctgctgacatattgggtgaatttgaaaaaggaaattcagtatcacaaacagcagaacgcactggattcagaggtactcgtcgcctattggaacgaaacttattaaggcgagaacgcctgcttcgcgtgttgaacctcatgaattttctgccagaacattatgcaacacatataaataggtatggaaaattcaccgatgacagcgaacctaaattgccttggtgcaagaacgaacaaggaaaattagagttcatttttaccgattcgttctatgaaatgcttgcagattttgcgaaataccaaccacaaattgtagcaaacggcaaaaaagttccatacgactggacaatatattatctccgcaaaaaagccttgacagatgcaatcaccaaagaagaacttgcttggattctgcttcagttcaaccaaaagcgtggttattaccaacttcgtggcgaagaagaggaagaaaacaaggacaaattagttgaatttcttgcccaaaaagtaatcaaggttgaagcaacagacgaaaagaaaggcgatgatatatggtataatgtttatttggaaaacggtatgatatatcgccgcactagtcgcattccgcttgactgggaaggaaaaataaaggaatttattgttactaccgacttggagaaagacgggactcccaagaaagacaaggaaggcaacatcaaacgctcattccgtgcaccaaaagaagacgattggactcttgttaaaaagaaaacggagtacgacatagaaaacagcaacaagactgtcggatactatatttacgacaacttactgcagaatccaaatcaaaaaatcataggaaaacttgtaagaacaatcgaacgcaaattctacaaagaagaattacgactgattcttgaaaaacaaaaagaatttatccccgaattgcgtgacgaaaatctataccttgaatgtataaatgaactttatccgataaacgaagcacataggaacaacattgccaaaccagactttaccaatctgtttatcaacgatatactattctaccaacgcccacttaagagcaaaaaatctttgataagcgattgcccgtatgaatctcgtttcgacaaagacggaaccgaacatcctgtaaaatgtatcgcaaaatccaatccgttatttcaggaattcaggttgtggcaattcgtgcagaatttgaaaatttatgaacgtgaaaaagaattaaatgggaaacttcaaaccgatgttgatgttactgccgaatttctaactacagaagacgactatgtcaaattgttcgaatggcttaacgacagagctggcattaagcaagacaccttattgaactcatatttcaagataaaaaaagcgaaaggtcaggaaaaatatccgtatcgttggaactatgtggaagacaaagacaattatccttgtaacgaaacaagagctactatactttcgggtcttgcaaaatgcaatataagttctgattttcttacacacgagcaggaaatggctttatggcacattctttattctgtagaagacaaaattgaaatcggcaaagcattgaaaaagtatgccgaaaagaataatctccctgaatcgtttgccgaagtatttgccagaataaaaccatttccaaaagaatacggctcatactcagaaaaagcaatcaagaaattgcttccgctaatgcgtatgggcaaatattggaatgcggatgaaatagaagacagcaccaaaaagcgcattgaaaaaattttatctggcgaattcgatgaaaacattatgaatcgagtacgcgaaaaagcaattaatctaacagaattaaaccaattcaagggattacccacttggcttgcttgctatatagtgtacgaccgacattccgaagcaaaggaaattgaaaaatgggaaaagcccgaagacattgacaaatacctaaagcatttcaaacagcactcgctaaggaatccaattgttgagcaagtcattactgaaaccttgcgcacagttcgcgacatctggaaacaagaaggtcaaattgacgaaatacacattgaacttgggcgcgacatgaagaatcctgccgacaagcgcaagaaaatgacagaacgcatacagcagaatgaaaatacaaacatgagaataaaagccctgcttatggagttcgcaagtcccgaaatggaaattgacaatgtccgcccccactctccaagtcaacaggacattttgcgcatatatgaagaaaatgcactcgacaatctttccaaagatgacaaggactatgattttatctcaaaaatatcaaagaccgcacagccgtcaaaatcagatattataaggtataaatgctggcttgaacaaaaataccattctccatatacaggagaacctatttcattgggcaaacttttcacatcggcatacgaaattgaacatgtaatcccacaatcaagatattttgatgattcattcagcaacaaggttatttgcgaagccgaaattaacaaactgaaagacaggcaactcggatacgaattcatcaagaaccatcacggagaaaaagttcaactttcactgggcaaaacagttgaaatcctatcagttgacgcatacgagagatttgtcaaggacaaatactccaacaaccctccaaaaatgaaaaaacttctcatggatgatattccagacggattcatcgaacgccaactaaacgacagccgttacataagcaaagttgtcaaaggattgctatcaaacattgtgcgcgaaaaacttgcaaacggagaatacgaacaggaagccgtttcaaagaacctgatttcgtgcaacggcacaattaccgactacctgaaaaaggattggggcatcaacgatgtgtggaacagaataattctgccgcgtttcgagagaatgaacaaaattacaggaaaagattgctttacaacaaccacaacagaaggacacctgattccgaatatgccttttgaactatcgaaaggattcaataagaagcgtatcgaccatcgccaccatgctatggatgcaatcgtaatcgcttgcacaacgcgcgaccatgtgaacctcctgaacaatgaagcagcacattccaaaaacaatgcaaaccgttatcagttgtcaaggaaattaagacgatatgaaaaaatcactataaacggaaaagaagaacgcgaagtcccgaaggaatttataaagccttgggattcttttactacggatgtgcagaaatcattggaaaacattattgtaagtttcaagcagaatttgcgcgtaatcaacaagactactaaccattccgaacattttgaagacggcaagaaagttcttgtaaaacaagaaaaaggcgacagttgggcaattcgcaaaccgatgcacaaagatactgtttacggagaaataaatcttcgcaaaataaagactgtttcactaaacgaagcattaaaaacgccaaccaacattgtaaataaggatttcaaacaaaagattcgcgaactgctggcagaaggcaatgatgcaaagttcatcaaaaaatatcttgaggaaaacaaagatgtatggtctgatataaatcctgccaagatagaggttttctatttttcacaagatgaaaagaaaaagaatggagaacctaaagaacgctattttgcgacacgcaaaaaccttgacacatcattcgacaaaaagactattgtggaaaacatagccgatacaggcatacagaaaattcttctggcacatttggctagcaaaggcaacaatccagaacttgcattctcgcccgatggcattgaagaaatgaatcgtaatattattgcattgaataacggtaagttccaccaaccaattattaaagtaaggaaatacgaaaaagcagataagtttgctgtaggtcagaatggaaacaagtctaaaaaatttgtagaagcagccaaaggcacaaatctattctttgcaattttcgtatctgaaaaagaaaacaaggaaactggagaaacagaaaaagtacgctcatattataccatccctcttaatgttatgattgattgtcagaaaaaatatggttcgaaatggaacgacaacattgaaacatatctaaaagaaaaagaaatagtttctaatgatgtgaaactattgttcattctctcgcctaatgatttggtatatttgccaacaaaagaagatttaaataaagaaataaaagtaattgacaaaaatagattatataagtttattgaccccaatgataataaaggaagtttcgttcctttatccacagcaaatgtcattttctccataaaattctcggatcaaaacaaaataggcatatcctatcctattcaaaatgaatttggtgtaggaagtcaacattcaaaaagtcctagagcaataacaggtgaaatgataaaagaaacatgcgttccaataaaagttgacaggcttggcaatatcattgaaattaatggtaaatctataaaatagaattaactatgattaagcgcaccctctatttcggaaatccagcctatctttcgctgaaaaacgcacaacttgttgtaaagattccaaatgccgaaggcgatgatactgttcgtaccattccaatagaggacattggctttgtgatactcgacaatcagcagattaccatcacacacggagccttgggtgcattggtcgaaaacaacaccgccgtagttacctgcgacagccgacatatgccggcaggtctgctattgccaaccgaaggcaataccacgcagagcgaacgctaccgcaaccagattgaagcctcgctcccactgcgcaagcaaatatggcagcagactgtgcaggcaaaaatccgaaatcaggcggcagcactcgagaaacgacgtggcaaaagtttcggcaatatgctcgcttgggctgatgatgtgcgcagcggcgacagcgaaaaccttgaagcacgcgcagcggtattctactgggacaacctgtttgccgtagagatagacaagttccgccgcgaccctgatggcgacatgccaaacagcatgctcaactacggctacgccatacttagggcgattatagcacgggctctggtcggaagcggcctcctacccaccctcggcgttcaccaccgcaaccgctacaacgcctactgccttgccgacgacattatggaaccctaccgtccgtatgttgaccttatggtgtgcgacatcctcgatgacattggaatgcccaaggaaatgaaccgcgatataaaggcacggctacttacaattccgaccatcgatgtaatgatagatggaaaacggtctccgcttatgatagctgcatcgcagacaacagcatctctcgcccgatgctacgcaggcgaaatccgcaaggtaagttatcccgaaatgtaatggaacgattcagtgaataccgaataatgtgggtgctagtattcttcgaccttccgaccgaaaccaagaaagaacgcaaggtatatgccgatttccgcaagaaactcattgccgatggcttcacaatgttccagttttcaatatacataaggcactgtcccagccgcgaaaatgccgatgtacatatacgtcgcgtaaagatgcacctacccgaagctggcagtgttggaatcctctgcatcaccgacaagcagttcggcagtatggaaattttcttcggacagaagcaggaatccgcaaatccagtagttcagcagttggaattgttctaaggctgacgcagtttcaagggttcaaggttcaaagcttaaagttcaagattcacgacaaaaaatcctcccttttcgggaggatttaaactctaaacaacattcttttttcaattctaatgcgccctttaaccctttgtgtttcaaccacttttcagcatcgtgttgtttaaagagcgttcaaagatacattttttttgcgaatcacaactctaaaactttgtagttatggcttggagtagttgtttaaagagcgttcaaagatacattttttttgcgaatcacaacaatttgtggtcattattccgcattaccctagttgtttaaagagcgttcaaagatacattttttttgcgaatcacaacgtgcgcatatatgagcctttttatgagattgttgtttaaagagcgttcaaagatacattttttttgcgaatcacaacgtgatgagtaagcagggacaaatgaatttcgttgtttaaagagcgttcaaagatacattttttttgcgaatcacaacaaa

SEQ ID NO: 1345 - DNA, 16354 bp, synthetic construct
  source 1..16354: mol_type = other DNA
  misc_feature 1..16354: note = Synthetic
ggttacggttccggtatgcttcatacaaggctataccatatgaattgtccggagaaaccagtgatacattggcccccatatattgttcccagcttttcccgttaagagacgaaaagttggaagctatctgatatgaattacttacaggatctttcgtaataatattaatagtacctcccacggcattggcaccaaatagggcagagcctccaccacgtaccacttctaccctttcaatcatgttcaccggaatatgttccagcccgtatactcccgaaagagcactgattacaggacggctattgataagtatctgtgaatacggcccctccagtccgttgatgcgaacctgaggaaatccacagttctgacaattattctctacacggagtcccgactgataggaaagtgatttggccaagtcggtcgagttgaccgtttcaaacagttttgtattcaagacattgaccactaccggagcatctcttctgctcacttcatttctattggccgaaaccactacctcatctgttgtaaaaacggcctcttccagaaagaaatgcactacggtagcatattctctttttacatctactttcttttcctgagccttataccccacggcatgtactttcagcgtataactaccttcgggcaaaccttttatctgaaactgtccgttttcattggctactgctccttttcccggttgttccactacctgtacggttgcataaggaacattctcttcagttcccttcactacgacgtgcccgtctataatattcccctgccgaatttggtccacggcataaagagtcataaccacccatgtgagtacaacaaataatatgtattttttcattgaattctgattatgaataaataaaactgataaaatctctctttttatttatccaatacagggaggagcacgtaataatacattctttaaatgaatgtcttcaacagtcagtgacttcgttgcaggttccagataatagaatacatgcggcttaaagtcaatgaaagaaacaacattcggggtttcagcctgaaaatgacttaactgacccaataccagcaattgagtctttgtgtgtgtatgattcttatctttagaagggtgagagtgtacaatcactgcaccatctacatagtgcatatggcagaacattgtaataccggcctggtatgaaacaaacacggccaataaaaacaatggaactatgattcttttaaatactctcaactgtttcttatttgcagatttaccttacaaaggtaaaaacaaaatctctcatattatgaaaactacataaagaattagaaacaagaatattttttaacttgcaaataatctgtcaaaaagaaaagattcatgcatatttaaagtccccatacataaaagacattacatacacataaaaaacaaagataaaagattatctttgtaacaccttattcccctgttaaccatatattattagggtgattgctgtaaagaattcattctatcctgtcttgtttaaagaataattttttaccggaacgagtcctgcagcattataaattaaataaatatataatatgagaaaaacactattcatgtttatatcaatgcttatcactgtattgatatcagcttctgccgagataaaaccggcaccagtattcaccgacaacatggttatccaacaagaaaaagatatccatatctggggtaaagctacacccggagaaagagttaccgtaaaattcatgaagcagacggttcataccacaaccaatgacaaaggagaatggagtgccatactgaaaccggtcaaagcctgcaaccgccctcaatcattgattataaaaggtacttccggcaaaattgaattcaagaacgtactcgttggtgaggtatggcttgcttccggtcagtctaatatggaatattccatgaataaccatcctcatcatgcacgaccgaaaaagggcgatcctgaaaaactgtataaagaattcaaggcagccagcaatcccgacatacgtgtaatgtatatcaaatattcatataacggagaaatccttcctaccaccggctggcaaacactttctgacgaaacactggctcccatttcggccgcaggatacttttttgcaaagactgtatccgacagtctgcatgtgccggtaggaattatttcatcttcatggggaggctctcttattgaatcatggactccacgagaggcctacgaatcttcctctgtactccataaaggaatgcacgacggaaaatattacggactcccggtaggaaaccactattatcccatgatagctcccctggccccttacagtatgcgcggttttctctggtatcagggagaggccaatgtgcttgaccaaagaggagccggttatgatatcaaacaaagagcgctgatagaaagttggcgtaaagcatggcaagacaaaaccatgccattctatttcgtacagttagctccatacctttattccagcagaacaatggacgaacaaggcgtggcatgggatgcacttcccaaattctggaagatgcaggaagcaaccctcgatgttccatacacaggaatggccgtcatcagtgatctggtagacaaactgaacgacatacatccgccttataaatggattgtaggagaacgtctggctagaattgctctcaacaagacttatggaaagaatattgtctgtgatagccctaaattcaaagaaatgaacgttgacgcagataaagtcatcatcacattcgaccatgcctgcggattaaagaccagagacggaaaagctcccgattgcttcaaactgaaaaatttcaaaggatactacttcaaagcaaaggcagagctcataaacaataaagtggttcttcaacttgattccacacatgcccgccctgcctgcgtacgttttgcctgggacgaaaaggcacaacccaatctctgcaaccaggaaggattaccggccattccattttatgcaacagaaaaatctgaaaaacagaaataaaacaagcaacactaaaaagttttccttatttctcttcttcctgagcagagagaaataaggaaaacaatgcaaaaatcaatctgtcctagaacaaaccattttgcctggaaacaactgtaaacttattaaaaacaactatactttaaatatatttcttctgttctggttttccttcttgtcatccgacggacgatgtgacggacgagacggctttttatccggtttcactgacggacgggaaggccgcacattggaaggacgattctcatgagacggttttaccgacggacggtgattcggacgagatggtttattgtccggctttaccgatgggtgagaaggacgccctgcagacggacgttccggacgaacggaaggtttataatccggtcgtgaaggtctatgttccggacgtgctaccggatgattcggacgtgacggcggacgaaccactactcccggacgatgaggcggagctaccggctgattggggcgtgacacataaggcggacgcgtcggacgaccggcaatacccggtccgaagtcatgatgacgatacgttacataatgaacatgatggctcggacgagtccacggccctacatagcgagcatgatgataacggttgcaataataaccattcacataatgcactctgctatgaatgcccacataagtcagaaagttcagcggagccgcaaaataataaaatgacggattatcatattccagatacagacgaatcgtacaatgcttgttctctacatatatcggacgataaaaataatccttattcataaaacgttcaaactgtctgcgggtaagaacgtaacttaagtcttcattccgaaggtccagactattataatactgatcaatggcataggtatatccataagccagatcatccattatgtcacgcactccataaaagaaatcataattgatttcatacacatcgttacgctgcatactgcttaacgaaagttcatgtgccatgcggtctgtcataaaacgtgcattgtttctgatttccgatacagtcattgcagcccggccagtctgaactacaaacaaacaaagcaccatccatatcagtctccttacacttctcatatttatctgtttttacggtttgacaataacaatcatttttctatgtcaacaaagataaaagaaggaaaaaccttaatcaacagtttttccctaaaattaaatagggatttccctattctgatttatccacatttgttacggacaactacctttagataaaattattgtatatatttgtattcaaatgaatctctacaattatgaaagcaaaactactccttattctttttagcttgtcgctatgtagcggactgacatcatgcatccatatcaagcacgcaaagaaaccgcataaagtaatacctcccggacatgcaaagaaaatcaaaggtaagaaggccgcaaagttttatgctccgggacatcgtcattaaaaacaaaagctccgttgttcgcacattaccgacaacggagcttttcatatatcttataccagccttattccattctcttcaagaactatcaggcgtttcttatacaaatcaccgacagcctttttaaatgttttcttgcttacgccgaaggtttcatatatctcttcggccggacttttatcattgaaaccagtatagccgtcatgattacggatatactcaagcagaacaattgagaagtcatccaccttgcgtgctcctccccgctgaagttcgaggtcgatctttccatccggacgtacctgcttgatatacacctccagacggtcaccaatattaaccggctgaaatatctcattggcataaatcataccggcaaagcggttttctataattgccttgaatcccaaatcggtcttctgccataccagcacttccaccttttcacccggacggtagtcgggcatttccttcgagaggaagtgctctaccttggccgacgccatgatacggtaactgtcttcgtcaatatgcacgtgcaccacataactgtttcctttctgcattttcattttctgctctctgaaaggaacaaacaagtctttcatcagtccccaatcaagaaaagccccgaattcgtttgtccatgccactttgagacaagcaaactcccctacctgaacatacggagtaagcgtcgttgcaataagccgctcttcgttatccagataaataaacacattgagcatatctcccggtttacatccggcagggacataacgtgtgggaagcagaatttcaccatcgtcacctccgtcaaggtatacgccgaaatctactgtcttaaccacttccagctgattatactttcctaattgtacgtgcatatcggtttaagtttattgaaaaatactctttaaatacctggcatttgtgccataattcttcttcacgttgtgaacatcgttcttgtcgcgtgagcgttccatcacgagccatccgctccatcccatacggtcgagtgtctgtttcacttttttcaagtccagacgcgtattgtccggcaaggttacaccgtcggtatccgtacagtgaatctggcagatgttctcttttcccagaatctcaagctcgctgcacacatcacgtccggcatccagtgcattctggaacttgaagtagatttttattccttcagaatttatctccttcagcagttcaagctcaccttttgcgtcgagcgatgtctctatgcctatcaccattcctttgcgtgcagccatatcccctacaaccttcatccgctttaccagttccggacgcagttcaggattctttgtcaggttgcatactcccaaaggaaggaaagcaatcttcacacccatagcctccatggtgttcagacagtcctgaaccaggtctacataattgtcacgctctacaaacgactgtccgtaaaagcccgacatggcaatggatgaaatttcaacatcaaattcctgtgccttttctctgaacagcttctgaaaatgaggataccgcagcttattgtcaaacgtatctctttttcccagtccgcccatatccacctctataccgtcacaacctatctcacgtgccagctggaattcaccgattttctgtcttttcagaatcatccagtcacacaccgatatcttataacgctgctctttcgatgattgtgccaatacaaattcaggcgaaagaaccaacaggaacaataatgtcagaataatacttccttttgttttcataatttcagattaacgtttggttatttagctgcaaagaaagaggatatttttttatttttagaatgatttgtcataaaaaaaagaaatatgctacttttgcatacagaaacaaaaaacgctcacaatatggttcttaattatatatggatagctttctttctgatagcttttctcatggctttgggaaaactggtcatcttcggtgacacctcagtgtttcctgccattatcgattccactttcgcctcatcaaagacagctttcgagatatcgctcggacttaccggcgtattgtcactctggctgggcatcatgcgcataggcgagaaaggcggtgtggtagccatcattgcccgttggctgagcccgctgttctgcaggctttttcccgatattcccaaggggcaccccgtaacaggaaccattttcatgaacatatcggccaacatgctgggactggacaatgccgccactcccatgggactgaaagccatggaacagcttcaggaaatgaaccggcagaaagacactgccaccaatcccatgattatgtttctggtactgaacacatcgggactgaccatcatccctatcagcatcatggtataccgggcacagatgggagcggcacaacctaccgatgtattcattccacttctgctggccacattcttctctacgctggccggaatcatctgcgtaagcctgtatcagcgcatcaacctgcttaaccgtaccctgctgcttgccctgggaggcgcctctgtggttgtagccgctatcatatggggattcggccgcctgtcacaaacacagattgacgttgtctcgacctctgccgcaaacatcattctgtttctgattatcatcgctttcatcatagccggcatacggcgcaaaataaacgtatacgacgcctttatcgaaggcgcaaaagacggcttccagactgccgtgcgcatcattccctatctggtagcgatactggtagccatcggcgtattccgtgcttcgggcgccatggacatgcttatcagcggcatagagtggctggtagccgtatgcggaggcgatactgattttgtgggcgcactgcctaccgctctgatgaaaccgctgagtggaagcggagctcgcggactgatggtcgacgccatgaacacctacggccccgactcgtttgtaggacgactggcctgtattttccaaggctctaccgataccaccttttacatactggctgtatatttcggcagcgtaggcatcaagcatacccgccatgccgtatcgtgcggactgctggccgatttggccggagtactggcagccatattcattgcctatttcttctttgcataaacttaaaaactgaataatatgataagttatcagaccgaaggcgtaaaaatgcctcagataaaaaaacgtgagaacaatgcctggataaaggctgttgccgcttcatacggcaagaaagtgggcgaaatagcctatatcttttgcaatgacgaaaagattcttgaagtaaaccgtgaatacctgcaacacgattattataccgacatcatcacgttcgattattgtgaaggcaacgtaatcagtggtgacctgttcatcagcctcgacaccgtgcgcagcaatgccgaaatggtaggaagtacttatgacgaggaactgcatcgcgtaatcatacacggcatcctgcatttgtgcggcatcaatgacaaggggccgggcgaacgtgaaatcatggaagctgccgaaaacaaggcgctcgccatgagacagaacaatgcctgaccagcatacataaaaaaggacacgtactcttgcagaaaagcacgtgtcctttttttaaaagcacgcattctttccgacaaaagaacacgtgcttttttatatgattattccttcagatttacctccttaccgtttatcttcagattactgaaattcacatccgcagcaccgcttacgctatagtctttctctacgtttgagaagttgcaatcctttacgcttacatgttccacattgacagcgtctttcaatccgataatgagcacaccgtatttgcttttaccgctggtaatattctgcagatatacattctttaccgtaggcgggaagttcctgtcgcaatcttcgttcggttcatattccagattgattttaagcacagcctccttgcactgacctaccgtaatattgcgtgcatatacgttttcaaccacacctccgcgacaagtattggtcttgattcggattacgcggtcaagctccggactgtccatcttacagttttctacaaacaggtttctgaatcctcccgagatctcgctgcctatcaccacacctccgtgaccgtttttcatataacagtctctcaccacaatgttttcactcggcacattccatttgcgtccgtcggcattacggcccgacttaatggcaatgcagtcatcacccgtatcgaaataacatttctctatcagcacgttgctgcatgattcggggtcacatccgtcaccgttgggacccagattatggatggtcacatcgcgcacaatcatgtccttgcagagcaacgggtgtatcatccagaacggagaatttttcaacgttactccctcaataagaatggtattgcagaaatacaggttcaccatctgcgggcgcagtgcatcctctatcgtaaaaatgcgctctatcacaggcttcagattctcggccgattcgagcagacggttgcggcttccattcttttgtgaaggaattccctctttccaaccgaagcgcggatttccgttccagctccaccaggtatcgttcgacgcctgtccgtcaataataccggagccggtaatggcaatattgctctcaccatacgcatatatcagcggactggtattgtagcagtccactccctcccagcgggtaagcaccgacggcatataaagcttggggtctgtagcaaatttcagtacggctccatcttccagatgcaggttgacattactcttcagcaccaccggaccggtaaggaattcgccccggggtaccagcacgatacctcctccgttctgattgcaggtaacaatggccttgttgatagcttcggtcgaaagcacgtgaccgccttcgcgcgccccgaaatctacgatgttataaaacttttgcgggaacgatgtcttccggatgctgtttactatctggtttgccttgtcccaatccggctgtcccatcagataatttcctactccagtcacaaaaatcaaaagtaataaaagtgtttttttcatgtgcatagtattttttgtttaattgattagtccgttttaaaaatacaggctataaattattttttcataagttatgattttcaaaattatatcctgtattctctaaaatcaccgttatgaaaataaaaatataggctatgatttttttattctgcaatgataccatccttcatatgaatagtacgatcggtcagacgggccagttcttcatcgtgaataaaaaaacccccgttaaaggacgagggcaacctaaatgtttacacaacggaataatccttattgtgatttgcttcatttatgatgtaaaaatacgtctattttttggaacttaaaatttttccgttgaaataatttatatatttttgaagaaatctataaaaaataacttatgagaaagattttaggcctcgatttaggaaccaacagcataggatggtctgttgttaaagcagaaagcaacgaagacggaaaagaagtattacgtggtatagaagctgcaggaagtcgtattattcctatggatgcatcagttctagccgattttgacaaaggtgtttcaaaatcacaaacagctgaaaggacaagattaagaggaatcagacgtctgtatgaacgttccattttacgccgtgaacgtttacacagagttcttgacttattgggatttttaccaacacattatgcagaatcccttacacgatacggaaaattcaaacaacctgacggatgtaaacttgcatggaaaaagaatgatgatggttcctacgaatttatttttcaagaatcgtttgatgaaatggttgctgaattcaaagcacatcatcctgagttattgcaaaacgggaaaaaaattccatatgactggaccatatattacctgcgaaccaaagctctaaaagaaaaaataaaaaaagaagagcttgcatggatattattaaacttcaatcaaaaacgcggataccaccaactacgtgaggaagaagaagaaaattcaaacaagcgcatggaatattatgccttaaaggtcattaatgtagaagattccggtgagaaaaaaggaaaagataccatatataaggtatatctggaaaatggaatgacttaccaacgtgccagcaaaacaccgttagactggattggaaaaacaaaagaatttattgtaaccacagaattaaacccagacggaactgaaaagcagaataaagatggtgaaataaagcgttcattccgtcaacccaatgaaaatgactggaatctggtaaaaataaggactgaagaaaacatcgcaaaatcccactataccataggtgaatacatatatcgttcactcttgaacaatcccaaacaaaagatacgcggcagattggttcgtacggtagagcgcaaattctataaagatgagttaaaacaaattcttgaaacccaagttaagtttcatgcagagttacaagattctgaactctataaagcctgtctgcaagagctctacccatccaatgaaagtcatcgaaattacatatctgcgcgtaatttcgtatatctctttttggaagatattctcttttatcaacgcccgctaaaaagcaaaaaatcactgatagacaattgcccgtatgaagaacatagctatatagacaagagtacaggagaaataatacctgttcccatcaaatgcatagcaaaatctcatccattgttccaagaattcagactctggcaattcataaaaaatctgcgcatttacaagcgtgatgcttttgtcaatggcaaaccagtttctaatcttgacgtaactcaggaattccttcctgacgagaatgcctatgccaacctgttcaaatggataaatgataaagaaaacatcaaacaaaatgagctgttaacggcaccttgtattggcatatccaaaaaagaatcggccaactatcgatggaattttgttgaagataagacttaccccggaaatgaaactcgtggcaaaattcttaaatatctggcaaaagccgatataaaagaaagtttcttgacttctgagaaagaagaagcgttatggcacattctatattcagttgaggataaaacagaaatacgaagtgccttagaacactttgctacacgcaatgaattgccttctacttttgttgatgtattctgcaaatttcctccttttgaaaaagaatatggttcttattcagctaaagcaattaagaagttattacctctcatgcgtatgggagaatactggaatccagacaatatctgtgcagaagtaaaactccgaataaatgaattcatcaaaggcaatgcagatgaaaagctcataaaacgtatcagtgaaaaaatacaattgactgatatatcacaatgtcatggtctgccattgtggattgcctgctatttggtttacggccgacattcggaggctaaggaaacagaaaaatggtcatcaccagaagatattgacatctatctgaagacattcaaacagcattctctaagaaatccgatagtagagcaagttatactggaaactctacgcacggtacgtgatatatggaaacaagtaggtcaaatagatgaaatacatatagagttaggtcgtgaaatgaaaaatccggcagagaaacgcgcacgtatcaccagacaagttcttgaaaatgaaaatacaaaccttcgtatcaaagcgttactctccgaattcataaacccggagtttcaaatagaaaacgtacgcccctattctgccagccaacaggaaattctccgcatctatgaagaagacattttaagatgtaatgaaatgccagaagacctggaacccatatttaaaaagttgagcgaaactgaagccaataaacgtccgagcaaatccgatgtattgcgatacaaatgctggctggaacagaaataccgttcaccttataccggagagcctattccgctggggaaactgttcactcccgcctacgagatagaacacattattccacaaagccgttactttgatgactccctaagcaataaggtcatctgtgaagctgaagtaaataagctaaaagacaaaatgttgggatatgaattcattgccgataaacatggcactatcgtttctttgggatttgggaaacaagtccgcattcttgaagttgaagcatatcaaaccttcgtcaatgagcactattcctctaatcccgttaaaaaggccaagttgctcatgagtgatattccggaacaatttatagcccgacaactgaatgatagccgatatatcagcaagaaaatcaaaagtttgctttcaaatattgtacgtgaagaaaacgaaatggaagaaacttcaaaaaatgtaatttcctgcaccggaggaataaccgaccgtttgaaaaacgattggggcataaacgatgtttggaataaaattatcttacctcgctttattcgcctgaatgagatgaaaaaatgtaatctgtttacctctactaccgagaatggtcacctcataccctcacttcctctcgaataccaaaaaggattcagcaaaaagcgtattgatcaccgtcaccatgccatggatgccataatcatagcttgtgccagccgtaacatcgtaaactacctgaacaacgaatcggcttgtgcaggagccagcatcagcagaggagacctgaagaaactactgtgcacagacccgaagacaagacgcgaatccaagtatatcaacaaaccatgggacacatttaccaccgatgtatacgatattcttagcaacataatagtcagtttcaagcaaaacctacgcattataaacaagacttccaatcgctacctgcattacgaagatggaaagaaagtacgttacacacaaaacaaaggcaatcttttatctatccgaaaaccaatgcacaaggaaacatactatggtgaaataaatctcagacttattaaaaccgtaactttgacaaaagcattggaatgtattgacaacatcgtaaacaaagacttacgtaagaaactgagagagttgttacaaatgggacacaacgaaaagaccatcaagaaatatttcaaagagaataaagatacgtggagtgatgtaaacctttcaaaaatagaaatttactatttcagcaaagaaagttcagagcgtttctttgcctcacgtaagcctttggatgaaagttttacaaaggataaaataaaagatgaaatagccgatacggctattcaaaaaattttgctgcgtcatttggaaaacaaagacggagatccttctattgcattctcatccgatggaattgatgagatgaatgccaatatcatgtcactaaacgacggtgttttccaccaacctatttataaggtacgtatatacgagaaaagcagtaaatatgctgttggactaaaaggtaataagacaaccaaatttgtagaagctgctcaaggtacaaatctattctatgtcgtatatgaaaaaactgaaactaccgaaagtggtaatactgttattgaacgcacatacactaccttacctctcaacgaatgtatcgatcgaaaaaagaaaggtcttcccattgcttcacccaacgaatttggagaaatgcctaagtttatattgtcacccaatgatttggtatatgttcctacttctgaagagataaaaaacagacaaataaaacatccgataaaccgagatagaatttacaaattggtaagtattaataaaaaacaaagcttttttatccaagctaatgttgcatcttgtattattaataaatttgaatatacgacaagcaataagatggaacgtgctgttaccgacgaaatcatcaaggaaatatgccttcctataaaaacggatagattagggaatattgtcaatgacataacattctaatttcaaatattatgataaaacgcacattttactttggaaatccgacatacctctcattacgaaacggacagatgattatcaaactgcccgaagtagaaaaatgcgcatcattttctgaacaacagaaaaatgaaatgacgataagcaaacctatcgaagatatcggtatagtagttcttgatcattcacaaattacatttacccaaggtctgatggaagctttgctcgaaaataacagtgcagttatcacttgcaattcaaaaggtatgccagtaggtttaatgttaccattatacggtaacaccacccaaaatgagcgtttcagaaaacagcttgatgcatctcttcctctgaaaaagcaattatggcaacaaaccatacaggcaaaaataaataaccaagcttctgttctggagatatgcactagtgaaaaagttaaatgcatgcgcgtatgggccaacgatgtccgaagtggagacccagacaaccttgaagcccgagccgctgcattttactggaaatatctgttccaaccaatagaagacttcacacgttccagagaaggagcttatcccaataatcttctgaactacggctatgctatattgcgtgccatcatagcacgcagtctggtatgcagtggtctgcttcccactttaggtatccatcaccataaccgatacaatgcctattgtctggctgatgatataatggaaccttatcgtccttatgtagacaaactcgtatatgatatggtaagaaataaagaaggaatagacggtttaaatcgtgatgtcaaagcacgcctactgtctattcctactttagatgttacaatttccgggaaaagaagccccttaatggttgccgcaacccaaacgaccgcttctctctataaatgttttgatggagaattacgccgtatttcataccctgaaattaaatagtaatggaacgctttaacgaataccgcattatgtggatacttgtactattcgatttgcctaccgaaacaaaaaaagacaagaaggcttatgtcgaattccgcaagaatctacaaagagatggctttaccatgtttcagttttccatttatgtaaggcattgtgccagtcaggaaaatgcagccgtacatataaaacgagtcaaatcatttcttcctgattatgggaaagtaggtattatgtgcattacagacaaacaatttgggaatattgaattattttatgggaaaaagcaacaaggagttaaagccgcagaacagcaactggaattgttttaaaataataaatcccgcttttatgcgggatttattataccttaaacctatctttttttatttctaatttactagacaactttctataaatcaaccacatccttacattcagttgtctttgttggttcaaaggtaattaaaatgaagcaaatcacaacatattaagttctctataataagattctagagttgtctttgttggttcaaaggtaattaaaatgaagcaaatcacaactactgacacgataaattatcttatccggctgttgtctttgttggttcaaaggtaattaaaatgaagcaaatcacaacaacgctgtaaaaggattgcgttcgttcagtgttgtctttgttggttcaaaggtaattaaaatgaagcaaatcacaacagactgcatgcgaaacatgttccagacccgttgtctttgttggttcaaaggtaattaaaatgaagcaaatcacaacagaacatgaacaatgttttgatgggtgaacgttgtctttgttggttcaaaggtaattagggactgtcgtttaattccgtcattatgagtcaatcggcagactgtccc

SEQ ID NO: 1346 - DNA, 16348 bp, synthetic construct
  source 1..16348: mol_type = other DNA
  misc_feature 1..16348: note = Synthetic
cacccaggcagagtaagccttcgccaaacctcccagaacaatcacggccaataaccccaggaagatgtatttctttttaatctttcctaatccttttgtcatatctatttcttttacggctgcaaaggtgggggttatttagaaattgtacaataccgagaaatagtgattttcacatttcttatacttagaagtaggtgtcagattgaaaggctcagattcccatatcctaataaatgagcagtcttttcgtggttttacggagtttagtttggtagattcacatcaatactctgttaataatcacataatcgtttgaatatgagcaaactaattaacaaacacaactaaataaatttggctaagtgcctgattttcagaacctttatagttgattcaagactttaaaagtatgatgttttcagagccacttgtaagcgtgtccgcgatgctagtatatacacgtcaaaaaaattatcgctcaagtttttattcttgagcgatattttgtcttgcgccagttctgcgccatttttcgtgcaaaacaagcgaaaatgcctaaagacggcacttgaatatcaacgagttacagaagatggtagagtggtataaaattcctctctctccgcaacagagtcctgtaagccgaaagatttacaggacttattctttttagtttgcagggagttgaggtcttcatatatcttgactcaacagatgaaacttacatcttctacattttatctatcatttcatacaggtcttacgtaatgattattccgtgtagatattccatcttaactttgcttgataaaaggaaatgaagtaatcaaagttattggagtagaggatggaattggtttcaccacggcatagcgcctggattggttacaagaacacgataagcacaagatatacaataaaccatacatcttgtacaagcaactccagaatgtttctcgcttcaggatagtcactttacctttgcattgtcaataagataaaacaatctaaaataataaagacgatgaagaagttaatgattgtgctgatgatggttgtagcaaccagcacagcaagtttggcaaagggtggtgacgaccatgtacagacagcagccaaggctgtggctcagaaagtaaatgacattccttcgaacactaattcgttatagatatgaatacaatattgtttgtcgttatagcaattccggcaattttgattgttcttcttattctaaagggcatagaccatttggttttttaccattggcttggaaagaagaataagaagttccgtacatttgccgactgttcaggctcttggttgttatgttcgttgatgcttcctcgtaagatgaagaggtatggcatgagatattggtggattggaattccgttgatgtttatatcgcccgttgcgttgttaacatatacaaccgtctacattgcgaaggaagattttttcccttctcctttgagcgaagctaagataccatataagactcgtgatgacatcgttgcaataaccggactcgatgactttccagcattcacctacaagaaaaatgtagtgaccccccttatgtttgatgctaaacttacggatatttattatgatttcgacaaacccctgtcggaaagatacattcacaaactgaaaaacttatgttcttcaaaagataatgtgttctggaccaacgaaggtgacacttgtatttctttcagaagggcttgggatagtgagtatatgaaatcacctgttaagagtgtaagctacgaaccactttttgatatggaaatcaccaaacaaggatttacaatacatctcagtgacggagccacagcctttgaacttgaggaatttgccaatcgtaaagtgtttaataaaaacacaggagtctctttcccaccatatcagttggtgaatttctcttgtcaatctggactgcctgaaagtcatggcctatatacattactgcttgataaaaaaatctcaacggattttatccagcagattgaggcttccccaaaatgggagaaaattgacgaaggaatgtatcaatgtcagtatccaacatcagaacgttatggcgtatgcgttactatagacaaaaatagtcgggtagtctactgcaaatatggacaatggataggacatttcaattaatggtgtattttcagttaaatacaaaatattctttccttgatgacaatgaataagaaacgaattttgaaagtgttgttagtgatctcgttgctaatagcttgcattccatttgttccacctatatacaataggttcacgaaaccattgtataagaattacatcgatgccaagctatggtatggcaaggtggattgtgaggacctttctcaagtaagggactattgcgacagacaagggtatagtacagattattatatcctggtagatttctccattccttcgggcaagaaacggttcttcatatacgacttgcagcatggcaagcgcgtgatgagcagctattgtatgcacggcagtggcaaggggaacacagatgccactccgaagttcagcaatgagtttggcagcgggtgctcgagcctgggacgttacgtgatggtaggaaaaggttacaagtttaagaatagcgtccgacttagggggcttgacagaacgaactatcttgccgagccacgtggcatcttgattcattcggcaggaaaggtgacgagattttcgggtgaaagggactatatcccgataggttcagagagtcgtggttgtttcacggtgtcgcgagactgtgtggctaaagtgatggaaatctatcgcggagcatcaaagcaaaggcctgtgatggtttatgctaaatataagtgattattgcttctatataacaaagttcaaatatcatctttgttatatagaagcaatagtttgctttatgtagctaatcattatttgatattgagcagcatctgctctgctcccacaaatagaacttgcaaaataagtttctctcgttcacatgatgcgctgtttacattgtttcaattcggtcatgccatagtgcaaattcctttctcatactttctgcaaccgtttttaaggactttgtaggtttgtcattctcataaatgtcaataaggttgcgaaggaaaacgaatactgagataaagcaatgacttaccggccacttcccaaacgggtgactcacataatatgcaggtatgttgtataaccgtcctatttccaaggggagtttgtcaaaaacctttatatgttcaaaatgtagtctcaggttattatcagcatatttgtcaagtaagccaaaggcattaccaccgagaaaaacaactttctcaggctttaagatagagatgagttcaagcgtagattttactccctcgtctcgcaattcggctttcaagtcagtaaaacccttgtctgattgaaatggtgtcagattagtccacaccactttatgatcattgtctatcgtgtctacatgtttagaagcatcatagcccataaagaatctggcaccattcgtaaacttccacacattcttatctccgcaaaatctttgcccccaacattcattacctgcaagaaaattatccaaggtgcggtttgtaactcctttgttgcctcctttgggattaatgccgacaaacattatgtcgatcctgtctccgaccaagtccaatggagattgggtgtaatatgggacttcatattttgcagaaagttcgttgaaacgttcaacccatttctccccccattcttttattctgatatttgtcatacctgtcctatttgtaatacggcggtttccttgcacctctggcaatgctatagattgccgacttgtgcaagtattattcacagcagtgctcttaaaaaagtccgtagcttgtccgatgtatataaataaaaatcagcgtaacttgttgttttacaactcgttacgctgactttggcggagagagagggattcgaacccccggtaccttgcagtacgccggttttcaagaccggtgcattcgaccactctgccatctctccatgcaaactatggtcgtcttttcgtgtttgcgagtgcaaaggtaagtattatttcataatttgccaaacatttgacaggctatttttgaacgatgattgcgaaaaccagcgaaaaccaagcgaaactaataaggaactagcgaaatattagaatttatatatcggtataatgacagtggaagctattaaagaaaccccaccgttaaaggacgatgggggaggacctaatgttttcacaacggaataatccttattgtgatttgctagaatgttactgcaaaaatacagcattccttttaagtatcaaaggatataggactttttttatgccatgtaggaacaaagtataaacaaagcatcttgtgttactcagagtgtataaataaatgctatctctgtgtacgtcaagtctgaatgcgattctcgtaagtctaattttgaggggtgagcattaactatgaactcaaatatgcaactattgtgatgaaagggcatgttaataggacaagaaatgtcgcggagttgactttatattctcgcttttagagcctgtcttaagtaaatggtattagtttttatctcgtttggcttataactcgaaatttatatgtagatttgtcaagataatgtgttgttcaatgttgataaactataacgggagatgtgacaatctgtttctaacttgtataaaataatcaactttcataatactttgaaacaatgagtacaaagcatatacttggacttgatcttggtaccaatagtatagggtgggccgtagtcaaaagcaatgatactgaaacccaacagtacgttctttcaggcatagtagatgccgggagccgtataattccgatggacgcagccatgcagagtgattttgcaaaggggaataccatatcgcaaacaaaggatcgaacacaatatagaggtacaagacgtttgcgtgagcgttatttgttgcgtcgtgaacgtctacatcgtgttttactgcagatgggtttcctgcctctgcattatgccaattcattgacacgttacggcaagtttaaggatggggctgaatgtaagttgccttgggaaaaaatagaaggtggcgaaatacaaaggttcctcttcaaaagatcatatgatgagatgttgcaaatgttttggaccgctcagcccgaattgatggcgaaggggatgaaagtgccttatgattggacgctgtactatctccgccagaaagcgcttcatgagccaatcacaggatatgaactcgcttggatactacttaactttaatcaaaagcgaggttattatcaaacccgcggtgaggaaaatgatgttgacaatacaaaagacgaaaaataccatgctctgaaggtcgtaagcgttgttgatagtggcgaaaagaaaggaaagggcatttggtataatgtttttttagagaatggtatggtgtatcatcgtctggcttccgaggctcccgactgggtgggcaaggtaaaggactttattgtcaccaccaatctaaatgaagatggtacgcctaaaactgataaagatggtcatataaaacgtttaataagcatgcctaaggagaccgactggggattaatcaagataaagaccgaaaacgacatacgtacatcaggactctcggttggcgagtatatattcaatgctttacttcataatccaaaacaaaagatcaagggacagttggtgcgtaccatagaacgtaatttttataaagaagaattgcgtcagatattaaataaacaaaaagagtttattcctcaactgtgcgatgccaatttgtatgcagattgcatcaacgaactttattctcagaacgaggccttcagacactcaattgcaaccaaagactttacatatcttttgcttgacaacataatattctaccaacgtccgctaaagagcaaaaagtcaacgatagcagagtgtccgtacgaatatcacgagtgtttggatacgaatggtgtcagagtaaaaaaatatgtcaagtgcatatcaaagtcccaacctctgtatcaagagtttcgtttgtggcaatttgtaggtaacctctgcatctacaagtccggatatgatcaagagggacgtcttgtcgactcaattgatgtaacctccgatttccttcctgatgaagaaagtcgtgcccaattattcgattggctcaacgaccggccaagtatcaaggcagatgaaatgttcaaaaggtacttcggaataggcaagttaggctccaagactgttggtatgtcgtatagttggaattacgtgcgcgacaaggcttatccttgtaacgaaactagaggcggaatattggtgtctctgtccaaggcgggagtagacacctccttccttaacgataaagtcttagaacatcagttgtggcacattttgtatagtgtcagtgaccgtacagaacttcgtacggctcttggtaggtttgccaataaacatgcgcttggcagtgcttttgttgaggtcatgaccaaatatccgccgttcgaggccgattatggtgcctattcagctaaggccattaaaaggctactgccgcttatgcgtatgggacatcattggtgtgccaataatatagattccggcaccaaggagcgcatacaaaaaattatcgacggtgaggtggacgaaacaatctccaagcgtacccgcgagaaagctttgatcttggatagtattgaccatttccgagccttgccattgtggcttgcttgctatgtcgtgtacaatcgtcacagcgagtcgggcgatattcgcaagtggcattcacccaacgatatagacgactatttagcgcatttcaagcagcattctctgcgtaatcctgtggtcgaacaggtcgtaaccgaaacccttcgcgtggtgcgtgacgtatggcgggcacaaggtcacattgacgagatacatgttgagttaggtcgcgacatgaaagcatcagcagacaaacgtgcccaaatgacggagcgcgctctgcgcaatgagatggccaatttgcgagtcaaagccttgcttgcagagttgaaaaatcccgagtttggcattcaaaatgtgcgtccttactctccaagccagcaagagctgctgcgtatatatgaggataccgccctcaacagtgtaggcgagccagatgattacatcagagagatacttaaaaagttctccgatgctaaaaatgctcctacgacttccgacatcaaacgatatatattgtggctcgaacagcactacatatcaccctacactgggcagcacattccgttgtcgcgactttttaccaccgactacgaaatagaacacgtcataccgcagtcacgctatttcgatgattccatgaccaataaggtgatttgtgaggcagaggttaacaaactcaagtcaaatgcccttggatatgagtttataaagcagcatcatggtcagagagtcgtgctcaatggcgggcgcattgtaagtgtgctcgaacccgatagctattgcgaattagtgcaaaaaatgtatggcaagaacaatcgcgccaagttgcgcaagcttctcctcgatgagctgccagccgaattcatcgaacggcaaatgaacgatagccgctacattagcaaattggttaagaccctgttgtcaaacatcgtgcgtgacgaggatgagcaagaggccacctccaagcatgttatagtatgtacgggagctgtaactgataggttgaagcgcgaatggggtgtaaatgatgtgtggaaccgtttaatcctaccgcgtttccagcgcatgaacagcttgaccaattccagcaaatttaccgccattagtgctacgggccacttaattcccgctatgccgcttgagctgcaaaagggttttaacaaaaagcggatcgatcaccgccaccatgccatggacgccatcattatagcctgtgctacgcgcaatcacgtcaaccttttgagcaacgaggctgctttgcctaaaaaccagagcacccgtcatcagttgtcgcacaagttgcgccgttacgagacgattgtggttaatcgcgatggcaagcttcaacagttgtccgtggcccgagagtttttattgccatgggccacatttccggccgatgttgagcatgtgcttagtcaaattatagtcagttttaagcaaaatctgcgtgtcgtcaataaaacgtccaatcatgctctacgcatcgtcaacggtcgaaaacaacttgtgccccaaacctcgggtgattgttgggctatacgaaagtctatgcacaaggagaccgtctttggcgaaatcaatctaaaacgtcaaaaagcatttgcgctcaaagaagccctgctgcgtcctcagcgcatagtcaatcgcgacctgcgtgccaaaatcatcgagttgctcagcaagcactacactgaaaagcaaataaaggtatattttgcaaacaatgccgatgcttggcaggacgtcaatattaagaaagtcgaaatgtattatttcacaagcgaaaccgcagaccggtattttgccacgcgcaaaagtatcgataccactttcgatcgcaagtgcataaaagagaaagtggccgacacggctatacagaaaattatgttgcgccaccttgagcgttatgcagacaatcccaagctcgctttctcgcccgatggtatcgatgagatgaatcgccacattgtagtgcttaacaatggcaagcatcaccaacccatctataaggtgcgtgtatacgaaaaggccgacaaatttgccgtagggcagacaggcaacaagcgattcaaattcgtagaggcagccaagggtaccaatttgttctttgccatttacgagaacgaggtgattaataagcagacggggcatcttgttcggaaacgcacctatcgtaccattccgctaaatgaggccatcggcaagttaaagcagaggctgccacttgacagccaggccgcattcatactttcacccaacgatcttgtatacgttcccaccgaggaggagcgaattacgggtaaagtaaacaaaccgttggacaaaagtcgggtatataagcttgtgagcataagcggtagtgtggcagatttcgtgccatgttctgcagcttcaatcatattctcagtgtcaaaaatcgaatctgcaaattattcaggtgtacagaacgaatttggtttgggtagcccgaaatcaaaaaatgagcgtgccaccaccaatgagatgattaaagaagtttgtatccccataaaggtagacaggcttggtcacatcgtcgaaaactaaattatagcaaaaatggcttgaaggctttgcaccagcaacagcctccaagctctttgcgtatttgtgccatattcatttcctgactcctaaatatctcaacaggcttatgataaagaaaaccctttacttcagtactcctgcctacctatcgttacgtatggggcaagtggtcatcaaaatgcccgaagtcgaaaagcaaagagatctgtctgagcatataaggccgcaatctgtggtcacacgtcctatcgaagatgtaggcttggtcatactcgaccacaagcaaatcaccctgacccaaggcttgatagaggcattgcttgccaataattgtgccctaatcacctgtaacagccagagcatgcccgttggcctgatgctccctctgagtggcaataccacgcagagtgagcgctttcagtgtcaaatagccgcatcactcccactgcgcaagcaactgtggcaacaaactatcaaggccaaaatacgcaaccaggccatggtgctctctacttgtgcccaagtcgaggtgggttgcatgcagcattgggccgagcaggttaagagcggagaccccgacaatcttgaggctcgtgctgcagcctattattggcacaaccttttttcgagtattgccggactaacctcattcacgcgccatcgcgaaggcatgcctcccaataatttgctcaactatggttatgccattttgcgagccgtagtggcgcgagccttagttagtagcggattattgcccacattgggcatacatcatcacaatcgttacaacgcctattgtcttgccgacgacattatggagcctttccgcccctatgttgacgaattagtttattgtattgtacgtgaatctggtacaaacaacatagaattgaccaaagatgttaaagctcggttgctcgctattcccaccctcgatgtagtcatttcgggcaaacgtagtccgcttatggttggagtagtacaaaccaccgcctctctcagcaagtgctatagtggcgaagttaggcgcatagcatatcctgaacgttaacaccagttagtagttatggacaaattaagtgcctatagagttatgtggatattggtattctttgatttacccacagattcaaaacaagacaagcaagcgtatgtcctgtttcgtaagcagctgcaaatggacggtttcaccatgtttcaatactccgtctatatccgtcattgtgctagtatggccaatgccgatgtgcacatcaaacgtgtcaaaagttttatgccagaacatggtagtgtggcggtcatgtgtatcaccgataagcagtttggcgatattcaggtgtttcatggctcgagaattgaaaaggctcgaacgcagccgcagcagttagagttgttttaatttgtagtgcttggcgtgcgtgtttcgtattggtttgtcgtgacaaccatgtgtggaaacttcgcacattttctccgtgtttagatgtcggaactacaaactcaatatttcgcttattgccaattatatcgtctgaaacccatctgttttatcatttctacgttgtaaacgtaaacgcctgattatgaggagataactcataatcaggtgtttgtgaccttacaaaggtatggattttctagcaaatcacaacactataacgttgtaggttatgatgctccgggtgtttgtgaccttacaaaggtatggattttctagcaaatcacaacctgacgcatctaataaagatgtgcagtcgtggtgtttgtgaccttacaaaggtatggattttctagcaaatcacaactgatgtcctcatttctaaaaagttcatggggtgtttgtgaccttacaaaggtatggattttctagcaaatcacaacgacagcgcaaatataatatacttatgtggaggtgtttgtgaccttacaaaggtatggattttctagcaaatcacaactgcagtacttcagagcgatgctggctcagggtgtttgtgaccttacaaaggtatggattttctagcaaatcacaacagtccagcaagtttctcctcgtaagtgtctggtgtttgtgaccttacaaaggtatggattttctagcaaatcacaacctactattatagtagcatcgtagtagtattggtgtttgtgaccttacaaaggtatggattttctagcaaatcacaaccttgtggagggctgcaaatgtccgttacaggtgtttgtgaccttacaaaggtatggattttctagcaaatcacaactgctatctttgtgctgctttgtgtaggattggtgtttgtgaccttacaaaggtatggattttctagcaaatcacaacaggcagtgctccttatcgctacaagcaataggtgtttgtgaccttacaaaggtatggattttctagcaaatcacaacagggccgctacactttgcctaagatagagggtgtttgtgaccttacaaaggtatggattttctagcaaatcacaacaggtatcaagatgaacatttagaccccgtaggtgtttgtgaccttacaaaggtatggattttctagcaaatcacaacgcattatgactaagagcgtccacagcagcggtgcttgtgaccttacaaaggtatggattttctagtaaattacaactgatgttaataccattattatctaaattagactcgtaatcttactaatgtataaattccctatcaagttgcccccaattacgaaatggccaaattcgtaattgggggcttgcttttgctcacaatgatattgaatgttctggcaagtcgcggcagtaaaccgtgcgccacaaaacagggggaggaatgcgtgcaagaaaattatctgctgccgctgcgaatggcgtaggtattggccacacaaagcagagctacacccgtgtcagccaaaacggcggcccataaactggcataccccaacgcaccagccaacataaccgctaccttgatgccaagcgccaaggcaatgttgtaacgcaccaggctgcgtgtgcgccgaccaatcataatggcatcggccacacgcgagggattgtcactctgtatcaccacatcggccgtttcaaccgcggcatcgctgccggcacctcccatggcaaatcccacgtcgctcatggccaatacaggtgcatcgttaatgccgtcgcccacaaaggccaccttgtccgtgtcagcacactgctgcttgatgcgctgcatctgctccaccttgccctcaggcaacaagtcggcgtgccactcgtcaacaccaagcgtctgcgccaaacgttccacagccgcgctgcggtcgcccgacaacacacaggtgcgcttgatgcccaatgcgtgcagccgttcaatgcccttggcagcctcgggacgcggttggtcgcccaacgcaatcatgcccgcatagcgtccgtccatgccgcaatacaccatggtgtcgccagtggttgtctccgtcttgccagtgtcaatgccgtgcgcctcaagcagcgccgcctttcccaccagcagctcgtggccggccaccatgccccgcagtccgaggcccggttcctcctccaccatgtcggccaccaaagcgctggcagcgttggtctgtgtatcccccttgctgtcggccgccgccacaatggcacgggccaccgggtgcgtacttttacgttcaacggcagccaccattctcagcaagttgtcagccccaacggtctccccctcggcacacgtcacctggctcaccacaaactgtccggtggtgagcgttcccgtcttgtcaaacaccacatggctcaggcgcgccaccgcatcaaggtagtttccccccttgaacagaatgcccatgcgcgaggccaccccgatgcccctgaagtaggccagcggcacactcaccaccaaggcacacggacacgaaataaccagaaacaccagggcgcggtacagccacacggcccaccccgtgccccccgccaacagtggtggcacaagcgctatcaaggccgcgagtgcaataaccacaggcgtgtacacacgtgcaaagcggcggataaacatctcggcgtgcgacttgcgcgaagcagcgtcctccaccatcgtcatgatgcgttgcaaggcactcttggcataagggcgcaacaccctcaccctcaccacgcgtccaatggctatcatgccggccgccacctcgtctcccgcatcaatgctgcgcggttcggcctcgccagtgagtgctgcggtgtcaaagtcggcccgttcagtcagcagtgtgccgtcgagcggcacgcgttcgccggccaccacttcaatcacgctgcccacctccacggcttcgggcttcacattggtgcgtcggtcgtcatggtcaatcacaatagctgtgtcgggacgcaggttgacgagcgactgaatgtcacgtctggcgcgtcccacagcacggtcttgaaaatattcgcccaccgagtaaaacagcagcactgccactgcctcgggatattcgccaatggcaaaagccccgacagtggccagcaccatcagtgtaaactcgttgaatatgtcgcctttggctatctcctcgcccgcctccttcagtatgggcagccccacgggcagatatgccagcacaaacacagcccaaggccatgcaggcagcggattggccacaatgcccacaatgagcagcagggcagccaccgccatgggcagcagtgcgcgccacatgggcgcttcgttttcttcgtgatggtggtgacagccacagccgcagccaccttcgttatcatggcagtggccatgttcgtgatgatgtttgttgcacataatgttgtgtgtatttagttgaaattacactgcaaaggtacgtgctgcgggctgcaacccggttgcaaaagcggggtgggggagtgtgccaggtgtccactcttgcgtaagtgttacacgcccatttgcgcgcccaatccctccgtccgagcactttttatgcgctgtcatgcaccaacctcggcaataaatagtaactttgcacctctaagcgggcgttcaaaataatatgaagcgcctgcttacacagtaacacctcaatttgttatgactgacaacaaaacaaaccaaaataatccgaatgaggagagcttggtggttgatggccgcaaactctccattgaggaatatcttgaccaggacgaaaagaaagacctcttgcgcctgctcaccgccggttcggtggacgacggcaagtcaacccttataggccgcttgctcttcgactccaaaaaactctacgaagaccaactctcggctctcgagcgcgactcaaagcgcgtgggcaacgccggtgcgggccaaatagactatgccctgttgtgcgacggtttgaaggccgagcgcgagcaaggcatcaccatcgatgtggcctatcgctatttctcaaccaacaagcgcaagttcatcatagccgacaccccgggacacgagcagtacacccgcaacatgataactggtggttcaacagccaacctggccatcattctggttgatgcacgcacaggtgtgattacgcaaacacgccgccacaccttcctgtgctcgttgttgggcatcaaacatttggtgctggctgtcaacaagatggacctcgtcaacttcgacgagcaggtgttcagcaaaatcgtagcagactttgaagcctttatcaagcccttcggcatacccgatgtgcgctgtatccccctttcggctcttgagggcgacaatgtggtaacgcgcagccagcgcaccccgtggtatgatggccccgccctgctcgagttcctcgaaacggtgcacattggcaacgaccacaacctcaaggacttccgctatcctgtgcagtatgttgtgcgtcccgacctggacttccgcggtttctgcggcaaaatagccagcggcgtagtgcgcaagggcgacgaggtaatggccctgccctcgggcaagcgcagccgtgtaaagcgcatcgtcacctacgatggcgacctcgactatgccttcccgcctcagagcgtcaccctgcagcttgaggacgaaatagacatttcgcgtggcgagatgatagtacaccccgacaatgtgcccaacgtaggccgccatttcgaggccatgctggtgtggatggacgagcagcccatggacgtgcgcaagtcgttctatctcaagcagaccaccaacaccacacgctgccgcatcgaccactttgactacaaggtggacgtcaacaccctcgaaaagagtgaggtggaccacctcgaacttaacgagataggccgtgctgtgattgtcagtgccaaggaactcttcttcgacgcctacaaggacaacaagcccactggagccttcattttgatagatcccatcaccaacaacacctcgtgtgtgggcatgatactcggtcctgtggccgagaacgacctgcactccgacgatgcccttcccacgctcgacttgcccaaactcggtattgctcccgagcactacgaggccatcgacaaggctgtgaaggaactcagccgtcaaggtattgaggtgaaggttaagaaataatacatgctgatatgctaatgtgccaacattgcagatggccatgtcgtctgcatgtcggtgcattagcatatattgtatttttgggggaggacgagttggcaagttgatgagttaacaagtaagtaggttatgtgctacttattatgttaaagtcataaggataagaaacttgtccaacttacctttttccccgttcccctgtcaacttgtttacaaattccgccaccgcgttagtagtgcataacattagcacattagcgagcatggcgagcgggtcatattagcatattagcacattatatataataagtaactcaagtttcggatttagcaaaggcgggctgaaagcccagtggagctcatagcccagggcaagcgaagcggcaccctgggtatcgcgtgttggagcagtcgc

SEQ ID NO: 1347 - DNA, 16346 bp, synthetic construct
  source 1..16346: mol_type = other DNA
  misc_feature 1..16346: note = Synthetic
taaaaagattaaaagattttgcaattgatcctccaaaaataattgcctgagggtcaatgatcagaagtatgattttaataagtactgaaatatgttgcccatataaattgtaaatttcaattgcttcagaatcaccattcattgcacgtatagcgagttcatgagccggctgatttgcagtacgaagaaaaaatctacttccacaataatcttcaaggattgaatccaagtatggtatttctccgaattcaccggaaccacaatttgaatcttttaaaaggtggctgttttgaataatacctccacctacaccggttcccaatgtaatacctacaaagttttcgaattcatggccttgaccaaatactttttctccataagcaaaacaatttgcatcattgtctatataaacaggcaatttaaattcagactccagtatatcctttaaaaaaacctcatcccaatttttaatattctgtacattataaactattcccttttccctgtctactacactgggaacccctattccgatggctcttgtattggaatccaataatgactcaattacctttttcacaacgcctaaagttacctctccgccaattgcagcatttgaactcatatataattgctcaactattgagttcccctcaatcttaccacctacaatagatgttccaccaatatcaataccaataatattattcatagatattattatttacatttattttaattcataattatattaaaaaccagggttctgtggcatctccttcgtgaggtttgcatcaatcacagactgaggaattggatataaagtatccctcggcgaaagattctgccctccattattattatatgccattgtacgttcaaggaattttcctgttctcagtaaagtccatctacgttgttcctcaagaaatagttcacgtgacctctcatccagtataaaatctatatcaacctgatcagcagtaatttcacttgcattagagcgtcttctaattatattaattgtatttgcagcatcttcaattctgcctaatttatattcagcttcagcttttaataaatatgtatctgcaagtcgaagataaacctgatccgtattcatatatctttcattcatattttccgggtctacaccttcagctttccttgagaatggccaatcaaaccttgcccttgtttcatatgttatatccggatcccatgaacaccatatggtatcaccatagttatatcctggagggaggttatctgcaggatagggagcattagtctcagcatcacccagaatatagaattttctgattgcatgatgcgagaatctatcatcctgcggttcataattatcaagtgcccatttagtgaaagtaaatctggagtaccctaatcctccacgctcataagtatgaactaacggtctgacaccattaactgataaattccagaatctgctcaagtgaattctccgaatcatacattctcctccacctgttactttaagtgcaaactggaaaacccacaaagcttcagtatttccttcctcacgattagtatttccttcccagaacatgtccatataaggaactcccggttgtgagcttcttacaccatatctttgtgtaaccaacttatactcaggagtattaattgcagcatttgcccattgcaaagccttatcaggttgacctatagttaaatacatttctgcaagatagtgctgcactgctccttttgagattcttcctcttaccgatggctcaacttcaatatagggttctgcacttaacaaatcctctataatttgatttcttacttcatctacagaagtcctctcccagtcagtctttattgtagaacctgatgattcaaccagagttaacggaacatcaccccacccgaaagacagatgcctataagcccaagccctgattgcacgagcttctgcaattacccgagctttgttcagttcttctgattgattaccaccagaccagtcaacatcctctttttctgcctgattaataattgtatttgctgcattaatcacattatataaccagataaatacattttcattttcttcattgaacgggttattgttatttttccaaagcattgcggtcattatatacccaatatcctggtgattaactgtagcattatcggttccaaacataaacatacttcccatcattgagtggctgccaaacgactcctctctttctcttctaacttgagcataaaggccattcaacccggcatcaaaccctgcataatttgtatataaagtctcagaagtaattagatgaggaggtttttccattaataagtcatcattacatgatgaaatagttattaatgaaattattataatggatattttaaatatattttttttcataatttataatttttaataaaaaaacttgtacttaaaaatcaaaatttagtccaaatacaaactctctttgcaaagggacttgtctttggctatcaagttcaggatctaatcctctccacttggtaaatgttgctaaattcctaccagtaatgaaaaacctcatattatccactaaacttctgttaagcacactctttggcaatgtgtaagagagagatatatcttttactctgataaaatcggctttctcatatatcactcctaatataccagacatcctttctgcattcagttcattggttacccaatcattagttggattctcaggtgtccaccagtttttatttattgtatttcttcttacatctgcccatgtttcgtcggtcatcaacgtgttttctttggttactccgtgtactccatgtataaatatattcaggttaaaacctttatacccaaaattattagacaagccccaaatcactttcggatcacgctgaccttgaattctcttgtcttctgcacctaacactccatcattattaaagtcttttagtttaacaaagccaggttttgtaccccatgcagttgcttcgtcagcttcactctgctgccatgttccaccccaaacaaagtcgtaatttactcgtatgggtttccctataaaccacgcatttgccacatcatcgatctcatttccggattcatctatttctccatataaggataatatcttattatcattatatgctatattacctgaggttgaccaggtaaaatctgaattaacaatatttcttgactggataaatagctctaaacctctgtttgcagtttctccaatattttgagtaattgatgtgataccatgaacagcagaaatacttctgtttaataacaggtctgtagtattggtcttaaaccagtttaaattaccaacaattctattcctgtaaagtccaaaatctaacccaagattgaatgtttttgatgattcccaacctagattttcttgtccaagtcgactgggtatataccctgcaacagtctgtttgttagaaaccatattgtattcagaaagtcttgatattgactgatatgcacctactgcctggtttccgttaagaccatatgaagctcttaattttaattcactgaatgtttctttccatggaaaaaattcttcattatgcatattccatcctaatgcagctgaaggaaacagaccccattttgaattagacccaaatcctgaataaccatctcttctgcctgttaatgtggctagatatttattatcatatacatagttcaaccttagcatttgtgacattagcacggttttattatatgagaaatccggaacaacctgaacagcttgtgctgaagagtaccatttaagaaaatcgtgagggaatccattagcttccatttcattagaagaatagctgctattttcataactcgcaacagctgtaacgaaaagattgtttttaccaaattccctattataggtaagtatattttctattacagtattattactctttgatctttcggtctctgccactccttttgcttctaggcctattttggtatccctacccatgtaggttgcctcatctgaaaatcttgcagtaaaacctgtatttaatcgataactcaaacctgatataaaaggaaaatcaattatgagatagttatttgtaagaacttggtaagatttatcaatattgtcatatagagtcatttgaagaggatttccaaaataatgatcatcatcccaaatatatattgcaagtgaaccatcttcttcataagctttagtaagcggatttgtttgaaaaagatccgacatatctggccccagcccactcttatcatcatatgaaatctgagttcttgaacctagtgtcagccagtccacaacttttgtgtctatattaatccttgaagttacacgcttataatcatcgtttacagccaatccggtaacatccaaataactacctgagatgaaaaactttgtactgttgcttcctcctgaaacagataaagtatgttgctgtgttgctccatttcttaagccttcatccatccagtttgtccaagtacctgattcataaatatttctctctgactgggtcattgcacccgagaagcgtttcattttaaaatcataaaattctgccccatccatataatcaggtaagaaagcaaagcgctgatgagagtaaaaaccatcgtaagtgattttcacctttccatctactccctcttttgttgagatcaaaataactccgttagaacctcgtgaaccgtaaattgcggcagatgaagcatcctttaagatttcaatagatctaatatcatttggatttaaatctgagatagatccattataaggtattccatctacaacaatcaaaggtgagttatctgccagaattgagttacgacctctgatcattattacttcattgggatctgcaccagaagaagaagtttgaatcataacacccggaatagatccctgtatagcctgtgctatattaatatttggtgtattctctaatctctctctgggtattgaagcaacagttcctgtgatatcactccgcttttgagtaccatatccaaccactacaacttcatcaattaaaaccacgtcgtctctcattatgatattataggtagattgactaccaaccagtatctcctgaggggccatacctacaaatgaaaactgtagaatctcattttctgcaacatcagataaagaaaaataaccgttaatatcacttatagttccagctgatgttccttttacaattacagttactcctggtaataactctccatctgaatcagtaatagtacccgaaactgttttcctttgttgttgcacagcttcaattaaaagaaggttcttatcgctatcttttattacattatttaatttaaaattgttatctagcttaatattatcagcataccctgcacttacagttgtaattgagaagcaggtaaaaagaaaaaaagttgcagttctaataatcaccatataaagattatacggctttttccttgatgtgacatcacctgaaagattattactcatacatttaagattttattttgttaatatagaggatcttacaatcaccatcaccatgggttatcgagagttatcaagtggactaatcagactctattcacccttaaatttgcttatcaggcacacaggagacaaatcaatgttatatttaattgaacttaaatgtgttttaaattagtttctacaaactaatctctttgtatcatagtttgcaatttgttagattcacaaatgcaacagtagtagagtagatatttaagttaaaaatgcaatttattgcaattattcctctgcttatctaaactgacatttctaaattaaatttcagttttcactttcaatttctatgttttacaaccttttacttttaaataagctgtaccgtattttataagttaattttagttcacattgcaaacataaataaagtttttttaattgcaactaatttgttgcataaattttgaaatttaacattgttgcaatttattgcagaattaaacggttgttattatggataaaactacagaagtatttagttatcagacttaagtattccggctttttcagctgcctcaattatcatatcagctgttgcctctatcccaaacagagaagtatcaacagtaaggtcatactctttaaggttatcccaatgtttaccggtataatggcagctatattcatctctttctttatcttttctacccattaacctaagtgattcattcggatctatcatatatatttgctcaactctttttttccgaaaacccttgtcagcatgtacaaagacattaaagcattttttatggcctttaagtatataattagcagcccgccctacaattacacatgactcatttgctgcaatattgcgtattacagctgtttgagcaataaaaagcttatcatttggaggaataacctcattaatgtaggagtaattactattgtataatttatcaagcaaaccattaggtagtttctgttcatgtttttctacatactctggtgtaaagccactcgcaatagaagtaagatttataattttactatcataaaatccaactcctagcttttttgcaattatttcaccaactgcatgtcccccacttccatactgacgagatattgtgattacaaaattgtcagttatcatatatggttgagtaacgtactcaattgctttttcgggttttaatatcttatcaaggaaaagtattcttttttgatatatattagctattgtacccacaaacagtgcagccaatattgttccttcgcgtattccttccagttttccataaaaggtaaatgccaaaataacagaaataacaacaaacgaagtgtctattgcaactttagtctttccgaaattgatatcataagcttcagaaattacaagtgtgagtccttctccgggaagataacccacatcagctttcaattcaagaaaaataccaaatgccattataaaacagcctaagattaccgtaatgatctgtagaatatagttattaggatctaacgactgcgtcagatatagattcaagtcgatagaaaaacccagtagaaagagtaatggaatttgaacaagctgattaatacttgattttttcttaaggattatcacctgtattagcaccatgattagatttataataatggcgaatgtacccactgttatattaggtaatatcagatttaatacgtagggtatagaagaaataggacttgtaccaagatccgatctaattgttagtgcaacaccattaccaattaagagtattcctgcaattaaaatcagaatacgcaaacctattttaactctcttcataaatcattgaaacttgataaccttaaaacaatatttaaaaataacgggcttcataacctaattccataagaattcactattattttcgtgaaggtatgagggacctcacagttcacacaaaaatattaaaaaacaggcagataaaaaaatagcaagttacaacttatacccaagcagtctcatgccattcagtattacaaccaatatacttaattcatgtacaagcattcctacagacatgctaacccagccactaaacaataacccggtaaataacaccaagactactccaagagcgataacaatattttgtttcatattcctggatgttgcttttgtcaatcctagagcatgagttagtctgctaaagtctgaattcattaaaaccagatctgaagtttcaatagctacatctgtgccgcttcccatagctattccaatttcggctaaagccaatgagggactatcgtttacaccatcaccaatgaaagctacgatctggccttctgactgtagtttcttgatataagccgacttatcttcaggcaacatattcccgtgtgcttctgtaagaccaagttcacgacttacaacatcaactgttccctgattatcacccgaaagcattacaagattcttcacacccaattttttaagccgtcgaagattctctttaacaccggggcgaatctgatcacgtactcccataagtactttcagttttccgtcaaccgatgtaagaaccaaggaattaccgctcttaacaaaccggttaatatcgctcattgctctatcatttaaagagacgttttctttctccatcaaagctacattaccaactgcaaccctatgtccgttaacattcgcaacaatacccccacccttcacaacttcggtattctctacttcagagaatgttgtttcaccaattttctgaaggacagccttagccaaagggtgatcagattctctttcaatgctggcaaggtaaccaagaactacagagtgatcatcatcataataaattgtttcagaaacagatgggtttccaactgtaagagtacctgttttatcaaataccatgctatctaccctgctaaagtcagtgataacctcacttcccttcagtaatacgccatgttgtgcaccattgcctattcctgcaacattagatacaggcacgccgataaccaacgctcccgggcatccaagcactaataaggtaatagccagttccacattatttgtaataagccaaactacgaatgccagaataagtaccgccggtgtgtaatatttagagaatcggtcgataaacctctcagcctgcgatttcgagtcctgtgcctcctctaccagctcaataatcctgccaaaagtggtatcctcacccactctgtcggctacaatctgaatagatccattctctaatattgtacctgcaaacaccttggaatccttctctttgccaacaggaagcgattcaccggttatactcgcttcattgatatagccgtcaccaaaaacaactgtaccgtcaaccggcactttagctcctgttttcacaagcagtaaatcacccttgtcaacatcatctacctcaacctcgacaaattcaccattctccatttgctttaaagcactttccggaaccatttcggtaagctctttaattgcagatcgtgtatgatttaatgtacgctgctcaagataagcaccaaacaagaacaggaaagttacaatagccgactcttcataattttggataaggaaagctccaatcaccgctatagtaaccagaacatcaatactcaccaccttcaccctaagcgcctgatatgcctgaattgcaataggcagggcgccaattacagaggcaattatcaacgcccaggtaaagacttccatattgccaaccgcccatttgcttataaaagcagtggcaattaatatcgcactcaggagtgtgatccggtttttatttgttaatataaatctttgcataatattcttttttatgatgcaaagttaggtatagcaagaggttataagtgtcacttaagcgacaacaaagcaaataaacattttaattcaaaaagccaaaaagcgatagaggaattttattaccaaaacctatttcaatatcatctgcggcaatgaatgcattatcaattcccataatctgctccctgcccttgtttctgcctccaatatcaaaattatagagatcatcaacttaaaatctgttttttcactaaaagtaacatctgcaacttgctttaactgattacagaagaatgaatctctgacatttcctttatccggcatttgatcacctgcaaatgcatagctgtaatttgtgttttgtgatctacacttcctgcggttttaatacttattattataatcctattattcaagttttcataaagaaatatccaaaaaaaacgacccgtcaattgacaggccgcttctaatgttttcacaacggaataatccttattgtgaattgctttcattaattgcaaacatagaataaattttaataaacgaaaaattattttagttaaaaatgtttcttatatttgggatataatcttaaagacaacataaaacaataagaatgaaaacaattttaggacttgacttaggatctaattcaattggttgggcattaattcagctcgattcagaacagagagaaggaaaaatattgggaatgaacagtcgtataatcccccttgatgcagcaaaacttggtgacttcgaaaaaggtaacccagtatctgcaactgctatcacaagaagcttcagaagcacacgcagattatatgagagggatacactgcgtagagagagactgcaccgtgtgctaaatatacttgggtttctccctgaacactatactgaagagattgactttgagtacaagttgggtcaattcaagaaagataaagaaccaaaactaccttataaaaaaatctctccatataaatatgattttatttttaaagatagcttcgaagagatggttgccgactttaaggttaatcaaccgcaacttttttacataaaatcaaatgggaaagaaaccaaaataccatacgactggacaatctattacctacgtaagaaagcactgaatcaaaaaatatcaaaagaggaattggcatggatccttttaaattttaatcaaaaacgtggttactatcagcttagaggagaagacattgaagtagatgataataaagacacatcattcgaagtgttaaaagtagaaaaggtagtagactcgggagataaaataaaaaaaacagggcaaccactctatgatatctattttcaaaatggatggaaatatgataagcagataacacgaccggatgactggaccgttaaaaccaaagaatatattgttacaacttcaaaattggcatcgggagaaattaaacgaacatacaaatcggtagactctgaaaaagattggattgctataaaacaaaaggctgaacaagatattgctacttcaggaaaaatggtaggtgaatatatttatgatacgcttcttcaaaagccctatcaaaaaatacgtggaaaacttatacgaaccattgaaaggaagttctacaaaaaagaactagaaagaatactcgaaacgcaaatagagtttcatccagaattaagagactgcaatctgtatacgtcatgtattgaagggctgtacccgaataatgaaccacacaggaataatattgccaaccgtgattttctatacttgtttgttgacgatattatattttaccagcgaccattaaaaagtaaaaagtacctgattgacgaatgccctttagaattcagagagtacactgctgaagatggtactattaagaaaaaaggcattaaatgcattaccaaaagtaatcccttgtttcaagagttcagattattacaatggatcaaaaacctaaggatatacagaaaagatgaaagacaagaggtggatgtaacagaagagttgctaccaacaattgctgatagagaattactttttgaatggttaaatgaaaaacctaatatagatcagaaggcatttttaaaatacaaaccgttcgagcttgaagagaaaattaagaaaatgctgggaaatgaaggttacagtatatttaaaaaagataaagaacgaggacttcacacatactaccgttggaattatgtagaagataaatcttaccaactaaatgaaacacgaggtggaatactatcgtacttaaagaaagcagaaattgacccagattttcttgattcagaaaccgaaatgcatttgtggcatattttatattcagttgaagatagcgaagagattactaaggcattaattaagtttgcaaataaacattccctgcctgaaagttttattgaatccttcaagaaatatccaagaattaaaaaagagtatggttcctactcagttaaagcgataaagaagttactaccactaatgcgttttgggaaatggtggaattgggatacaattgatagtgatacacgcactcgtattgataaactattaactggtgagtatgatgaaaagattagatatcgtgttcgagaaaaggcaataaacttacaaaaagaagaggattttcaggatctaccactttggctgacaagttatatcatttatgatcgccattcagagtcctccacactaaactactggaaagaagcaaacgacattactcttttaaaacaacactcacttcgtaatcctatagtggagatggttgtcaacgaaactctgcagactgttaaggatatttggaagtattatggagagggcaaagaaaatttctttgatgaaatacacgttgagctaggtcgtgaaatgaaaaatccgaaggaacaacgcgaaaagatttcaaaaaggatagcagagaatgaaaaaacaaacatacgtatgaaatctttgttagttgagttattcaatgatggggagacagaaaacgttcgcccttattcaccaattcaacaagagatgttaaagatatatgaagagggcatctacttgaatcccgactcggtatattcaactgtaagtgaagctgagatagattcaatacgtaaaaaaaacaccccaactccctctgacttaaaaagatataaattatggctcgaacaaggatataagtcgccatataccggagaaataatacctctttctaagctattcactcctgcctacgaaattgagcatataattccacagacaaggttttttgatgatagcttcagcaacaaagtaatttgtgaagccgaagtaaactcactcaaaggaaaccaattggcctatgaatttatcactaataataaggagttgaaaattgaattgaactacggtaaaagtgtaaccctgcttcaccctgaagtatatgaaagaaacgtaaaacgttattttggcaataataaaactaagatgaacaagcttttgctggaggaaattcctgataaatttattgagcgccagatgaacgatacgcgttacataagtaaaacaataacatctttgctatcaaacatagtacgtgaagagagtgagcaagaatcaatttcgaagaacgtaattcctacatcagggaaagttacatcatcgcttaaacgtgattggggattaaatgatgtatggaacgagttaattactccacgatttgttagattaaaccatatggcaggttttgaaaaatatggctcatgggaaaacaaggagggtaaacgagtatttcaaataaatactatggagcctgagctttaccaattagaaaaaaaacgtatagatcaccgtcatcacgctctagatgctctggttgtagcatgtagcacacgcgatcatattaactacctgaataatataaatgctaatggcaaggataaggataaaccattgaggtatgatctacgagaaaaactaagaagaactgaagaaattgaagttaagaaagcagtgaacggtgaagtggttagaaaaaagatgagagtagcgaaagagttctataaaccctggaacacctttactaaagaagcaaaagagcatttgaataagatggttgtaagcttcaagaaaaacaaccgtgttattaataaaactgtaaatcattatcagaaatgggtggaacaatccgatggtacaatgaaaaaaatgtttgtaaaacaggtgaaaggagaccattgggctatacgcaagccattgcacaaggagaccatttcagcattggtaaatctccaagacaaaaaacaggtatcgttacgtgccgctctgagcaatgttgataatattacgaatcgttctcttcgcaaaaaagttagagaactagcagatatgggatataatacaaataaaataattagtttctttaataatctaaattttgaatggcagggagaaaatatcgaaaaggtagatatctttttctatacaaatgatcaagaaagcactaaagttgcagcgtcaagagtggatctggatgatagtttcactgaaaacattattgaaaaaattacagattcaggaatacgaaaaatactactagcacatattgaaagctataagtatattgtggacgaacaaggcaagcctgtatctgctgagaaacttgctttctcacctgaaggtatagaaaagttgaactgtaatattgttgaattaaatggtggtaaaaagcacactcccatatataaagtaagaacatttgaaaagtttggcaataaatttaatgttggaaatgaaggaaataataaatttaaatatgtagaagccgcaaaaggtaccaatctattttttgcaatttatgaagatgacaaaagagtacgtagttatgaaacaatacctctgaatattgtcattgaaagacaaaagcaaggtttaccttcatgtccagaaaataatgaacagggcaaccgattactattctctttatctcccaacgatttagtttacgtaccgacacctgaagagcaagataatccaaaaacggtagatttcagcgatctaagtaaagagcaagtaaaacgggtctataagtttgtaagctgcactggtaatcgagcatattttatcaacagcactgtagctactaccattgttaataaatacgagttttcagcacttaacaagatagaaaaatgtgacgatgatgtacaaattaaatccacctgctggaaattagaaattgatagacttggcaacattaaaagagttacaacataacattaatttgtgttgaaatatgattaagaaaactctatatttcgggaacccagcatacttaagtgtaagcaatagccagttggtagttaaactacctgaagtagaaagcaataagactattcctgaggaattcaagtcaaaagctaagagaaccattccaatagaagatattggtgttgttatactagataacagtcgtataacaataacacatggcaccatagagtcattactggataacaactgtgctcttgtaacttgtaacagttcaagaatgccaatgggtttaatgttaccactttctggaaacacaacccatactgaacgattcagatatcaggttaatgcatcacttcctttaaataaacagctttggcaacagacagttcaagcgaaaataaggaaccaagcctttgtactgtcggaagagaaaaatatcattactaaaaacatggttatttgggcagaagatgtgaagagtggcgactctgacaactacgaagcacgtgctgcagtatactattgggccaatctattttcggaaatagaaaacttctcacgtcaccgcgaagggataccgccaaacaatctactaaattatggctatgccattttaagggcaatagttgcacgaagtttagtaggcagtggactacttccttcattaggaattcatcacaggaataaatataatgcctattgtctagccgatgacattatggagccataccgtccatatgtagacaaactggtttgtaatataataaatgatggtaatcaaatagatgttataacaacagaaattaaagcacgtttactcaacatacctgttcttgacgtagtaattgatggtcaacgtagtccattgatgatagcagttggcaaaacaacagcatcgctttacaaatgttttgcaggtgaacaaagaagaattaagtaccctttgcttgagtagttaaataatggaacggtttagtgaatatagagttatgtgggttttagtgttttttgatttgcctactgaaacaaagaaagagcggaaaaattacgctctttttaggaaaagactaattcaagatggatttacaatgtttcagttttctatatatcttcgacattgtgcgagtagggaaaatgctgaagtacatattaaacgagtaaaaaatttcttacctcccactggagaagtgggaattttgtgtataaccgacaaacagttttgcaatatagagctgtttgtaggaaaaaaagagaaatctgtgaacactccttatcagcaacttgaactgttttagatttgcatgtttagatagtagaaagagaaaatcctgcctttcagcaggatttttcacattgtaacaacctcttttttaattgtaatttatggcgtaacagactgatattatggataattacagacatcctgttgttactaatcccaaagttactgaatatgaaagcaattcacaacttgctcattatattgtctcctccgttgaaagttgttactaatcccaaagttactgaatatgaaagcaattcacaacggagtggaaacattcatctcaacctcgcttgttgttactaatcccaaagttactgaatatgaaagcaattcacaacagcatattcctattgattacataaggtcgtgttgttactaatcccaaagttactgaatatgaaagcaattcacaacgggttgata

SEQ ID NO: 1348 - DNA, 16343 bp, synthetic construct
  source 1..16343: mol_type = other DNA
  variation 15959..15960: note = n is a, c, g, or t
  misc_feature 1..16343: note = Synthetic
ccctcattacggtcgaaatcaatgtcgcgcaaatcctttctgcgcacctcacccccctccagtctcacaaagggagtgtaatactcatccacacctcctgccacttcatgatgcgcacacctgtatgcacaatcggtgtacccctgtagcggggcgaaggcaacgtatggcaaacccatttcttccatcagaacgaataacgcacatgcagcaatacctgccatgcagaaagaaggttgctatacacattccacttaggttcagcgaaggtatacttcccgttcttataattcaatacagtctggctggtaagctgtttgtatgttccccactcgctgttgagcaggttggccacattgttgatgtcggcacccacttccaaagtggtacgatgtccattgatatcgaaataaaactcttggcagactttcaagtcaaggcggttatgccacggggcaagcatggctccacgcatactatactcgcccctgtgtcggctcagataagagtcgttggcaataaattcgccataggcagcccggttctcgtcgctgctgaaaggcatggatgaaagttcttcatcggtgggaacatatatcagtcgtgatgcattgatcccgcccacattgttcatcagataggaacaccgtgcataaccgactccgttttctattcccagattgtaaccctcatagaacaggcctatccgtgtggctgtacggagtccctctctgatagtataattggccgaagctattacacggtgcggagccacatgggccgaatatcccagttcggaactgttgtctccattcaccgtactggtctgggacaaggtatatacggcatcgcctccaccatcgttgaccgacagcgaagagctgtaagtgtaggcagccatcacattcagcccaaaaccgaaatgtttctccaactgtgtcaccaccgacagataacggccatgcagcccatcggtgttgttcaaccgatagcccgacatgccctttgccacactctccttctcgtatactacccgtccacacggttctccaggcagatgcagcgaatcgccctgcacgtagcccagcgtagtcgccaccacctcattgtagttgtacgacagaacaccttccactgtccccttcacatcccaaggcagcttgacatctgccgccaatgaactcttccaactggtgggcatcttcaggttcttgtccagaatcaccggactcgaaggcagtgacgtgtttccaccgccgggcacactgtttacaatctcttcgcggctaggaccgaacggcacgacggggttccccgtctgcatattggctacatattggtacaacatgacattagagttggaaatggcattcaccaaccacacattaggtatacggccagtaaaaagccccgtgccaccgcgcagcaccaccttgcggttgtgggtcacatcccaattgaatcccactcggggtgacacatccacctgcaggcgaggcatgtcgccgggattcaacccgtcgaaagtactgccggggttttcctttacaaattgggcaaagccggcatggtagttgtcgttggcaaagcggataacaggcacttccaaccgcagtcccgctgtcagcttgaaatagcggctgaactccatctcgtcctgcgcatatagtgagggctgaaaataattgaacacatattcaggcaaagccatacgatcctcttggttggcaaatgacaccatgaaaagtactggagcacgtttgttcacaaagctgtcccacgagtcgaacacataccatccggcaccgccaggcatatacacgttgcgaatattgctgtgttcaaactgcactcccgccaccacattgtgtacgccagagctataagtcaactcatctgtcacattgaacgtactgacacggttggccgtcatataagtgaagggatccaacccgaaagtggtataggatgcatacctgcgtattccatcagtagctgtgtatggctcaagaatatctaccgtgggaaacaggtcgccgtaatgcccgcgtggctcattctgatacgaccaagtgacacgcaggttattgttccccctgccttcccacagacggctgtccaactccgctgccaccgacgaaaaatcttggttcttcgaatatctggccgactcgaacatcattgcataattcgacagccggccttgcgaagagcggttaaacgtgatagtatcgccattcaaaagaaacgacgtgttcgtgccgccgaggccgctcatggaactcgacgcatcaaccgtagtggtatgcgtatggctgaacctgacattgaatttgttgttgctgtttataatccagtctaaacgggcaagaagccgatagtcggaagcatcaaccgaatagttctgataccgcccgggatcatagccatattccttcatcagatagttcctgatactatccatgcgacccaccgtaggacggttgtagccgtttccgccccagtcggcaccctcgtcagcacgtgcctgtaccgaagcccctggcaccgtctccggtgtatattccgcgttaaggaagaagaacaacttatccttgacaatgggaccactcaacgtaaacccggcaatattgttctgcgtattgttctgcggcagtgtcacgtcgcccaaatgctgcccgctcagccaaccgctgttgtagtaatcatagagcgaggcatgccattcgttgccgccctgcttggtgaccatattgatggctccccctttaaacccgctgtatcttacatcgaagggggtgatacttactgaaatctggtcaatggcatcgagcgacagcggattgcccccagcgggaaggctggagccaatgccgaaagcattgttaaacgaggcaccgtccactgttaccgacgaactgcggtagtcgccaccgcccaccatgaagcctttgcttgtggcgatgctttggggggtgagccgcataacgtcatacaagctgcgacttgccgtaggggtagccatgagaacggtattagtaatattcgtcgaggctcctgagttctgcacattcatattggaatgcgtggcttggtccacaaccactatctcgtccaacacagtgcttgtcatctgcagcacaaagtccaactccacacggtcgcccaacggagctgtcacatcactcaccaccaccgtacgataccccatcatctcaacctttatactataagggccaccagccactaccccgctgatacggtaactgcccttggcattggtgataccgtggtactgcatccccgagggcacatataccgccgtgacgatgacatcggccaacggaccattcgcgtcgcttacactacccacaatagacgatgtggtggtctgagcccatgcgggcaacgaaatcaataatcccacaaagagtgccaaaatggctcctactctacttttcataacaattctaatacaacaatgaatatttataaaacactatataacaattaattgttcatatcacccataccacgggtgaggtacaaaggtacaaaaaataacctacatcaccgcaagcgattcgggaattaactattattaaaaaactttggcatttttcggcaaaacgatgtgcctccctcaatctgccatttctggataacaagttgattgaacgttttccgtcaccctgacggaaaacgaacggataacgggcgaaactcgaacggctgatgaaggacgttaatgggaaagaacaacgtcaccagagcgaagctccgatgacgttgtaactgatatgccgcgatgcgtggcaactgtgttatcggttgccgccggagttctggaacgcaccatttcccgaccctctacggcgttaccgcacacggatgcggccttctggccgcaaatactggtcaccgattataaaatcaagatagtcattaagatataccaacaatgctttcgtgtggctacacacatcagcgttgatgacccgaacgccgttgaacacatgaccgttgccatggtggagaaggatatagtcggtgcctgccacacgatagatgcgtttgggcttgagcggttcgtagcggcgtttcttggcattccacacctgcacgttgcatacacgccgtttgccctccacacggaggagaaagccttttttgtcggtgaccacagggctatttactgtagggtcaatctcgtaggtaagaccggaaacatccaggaacccaccaccgagtgaaggccaatggcggcagcccatctccaacgcatcaagcagagcttggcctgtcatttcgacaagacataatttgttccggtatggcgccaccgccaagaagtcgccaacagtcaggtcgccctgcagaaggtcggcacgcatacgtccgcgattcatcaccgcaatgtcggcttttgctacagcgcgaaaggcatcggtgaagtaattgcccagcgtgcagtcggcaaaactgtcgttggcatcgacgcgcctcaaggcaacggcactgtgtccatcccaggaatgggcttttttttcaaattcctggcggatgacagccagcgtgtcgtcgacggcagtggcacttgcggctgatgcagcgacgacatcacggggaataaggtcactgtttatgtcgccgttggcgctgatcaccatccttccgaatgagcggaaataagcccccgacgaggtccagaggacggctttgccaaggcggttgtagaggatagtgtggggaatgacgctgtgcgaatgtccgtcgagcactgcatctatgcccgaggtgcttgccacaaggtgtggcatgtcatcgatgcctacatgggccaaaagaatgacatagtcggccccatcctgccgcgcttcatcgacgcggcattgcaacagcgagtcgagtgcggtgggatagaaagtgtaaagccatcggcaaaggctgcctcggaagaaagtgggcgtggacaaggcggggacatgaggggttgtgagcccgataaaagccactttgcggttgccatagcaacgtatgtcatagccgggatagatggagcggttctggccgatacaggaaaaattgcagcacagaaccttggcggtcagttggccgacacgctgttgcagcgtctgaaggccgaaatcgaactcgtgattgcccaatgtgacatagtcgtaacccacagcattcatcagccgcacaaggtaactacccgaggaaacggtaccatagggtatgccggaaaggaagtcgccgcacgaaacgagggcgacatgtggcgtgagttgccgcatctggtcgcgaaggttggccatgagcgggtagccctccacggcaccgtgaacatcattgtcgtagaggattactatgtcggacgaatcaacgggcagcgactgcgccacggcgctaccggcagcaagaaaggctgcaagaagaataatacgaagatggaatggtatttgttttttcaacataatggctctgacagcgttagcgcaggcggatgcggccttgcggcttagcatactgctcgcctaccacgcctttgaggtttttgcgtacataggtttcgagtgcctgcaggtagacacagacgtttttgttgattatcttggcatcggcaaagacatggccgtcgccgtgtttgagaagggtatagtcgttgccaaccacgcggtaacggccacgggggttgaggctgacataacgtttcttggcattgtcccacacattcacattcttcaccctgcgggcaccggccacgcggacaaacagatgcgacagcctatcaatagacggggaaggctatctcgcgttcgatgacttggtaggccacgttgttgcgatagatggtctggcgtacccagttgtcgtcctcgtcgtactcgaagacatagctgtgcttccagttgaggtgctcatcatagttgaacgaggaaagttcgatgaggttgtcgtggtcgtcgtagtaataggtggtgagagccacgaggaaatcgtcggcatcataaaaacgccactcaatacggttgccgtggctgtcgtacttgtagaggtaacgctgcatcagttctccgtcgcggtcgtagaactccatctcggtgttgttgccggcgtcgtcgtatttgtatacgcgcttctcagtcatggtgccgtcgggggcaaaactctgctcttcgacgagacggttgttctcatagcgcgaggtctctttcttggtcatgtggtcacccataaagacggtgcgctcgatgcggttgccgttcttgtcgttaagataggcggtacggccggtaagctccttggcgcggttgtattcgttccagcctaaagcatagccgtgaacatcgaagtagtaggaataccatgtgtattcgccgtccttagtgcgatatttgtcttggaaattgccgcgcttatcaaaagtgatggaatcgatacagacgagctggcggccaccgttgcggccaccgtgaatgtcgtaagtgtattcaatcacatagacggcattgccgttgatgcccatttcctgacgggatgatttgcggggtttattgccggcaaaaacagtgccagcaaccagcaataccaacgataaaacaatgtatttcttcatgttatacaataatttactatataaaacgcaaatgcaaagatacaactttttctcgaatgataacggagtatgaccaaaaaaattgtacaaagatgtcagaatgttaatttacagtgttttcatgacttcatctttctgcaagttcgaagcatttatcttttatcgttatccacctgactgccaccatgctttttggcccatacggcaaagagggctgtggccaacagagtgatggcggcgccgatggtatatccgagccaacgtgggatgactgcacccagaccttccttctcagcaacaaagaggaaacagcctgttaccatggtcataaacatagccggaaggagagtgaggatgtagggcttacgcttgaggaagagatagacggtgatggtccatagggtgacagtggccagcacctgattgctccaagcaaaatagcgccaaattacatcaaacccctttgcatcgatgagggagtataccaacacagcggcagtgatggcaaagatgggcagagccacaaaaaggcggttcttgacaggtttctggtcatagtggagaaagtcggccacaataagacgggcagagcgtaaagcggtgtcgccactggtaatagccgcggagataacacccaacacacatattacagcaatgaccttagggaaccatgtgttggctatgacacccaccatagcattgccacccaaggttgcaccagtctcagggttgacggtgagttgctgcagctgggggtcgtgatagaagacggtcgcagcagcggcccagatgagggctacaacaccctcggtaatcatggcaccgtagaaaacagggcgcgcctgtcgctcgttggtcatacaacgagccataagaggcgactgggtggcatggaaaccgctgatggctccacaggctatactaatgaacatcatgggaaagatggggttgtgggcagcatcgggatgctggttctgaagaccattccacagctcaggcaacggcggacgataaacgacaaaggctatgacaatagccaaagccataccgagcaacaggaatccgaaaatggggtaaatcttgccgatgagtttgtcaatgggcaaaagggtggcaatgagataataggcaaagataatgcccacccagaggaagatgttccacccgggcgtgaaattgctgttgagaagcactgccggggtgttgacaaagactgcaccgacaagaatcatcagaaacaccgtgaagtagcgcataaattgtttgggtccgttgcccaggtaggcaccgtggatttcgggaagagaggcaccgtccctgcggattgagatgtagcctgcaatgaagtcgtggacagcaccggcaaaaatgcttccaaaaacaatccaaaggaacgacgccgaaccaaattgggctcccatgatagctccgcatatgggacctacgccggcgatgttgaggaactggataagatagatgcgccaaggtttcatgggcacataatccactccgtcaggatgagccacagctggagtgggacgattggggtcaacttcgacaatccgctctataaccttggaataaagcagatagccaagcaataacagcacaatagcaagtaaaaatgataccatgataatacgttttttgaatctgcaaagatacgtattttttcaaacatgacagttttttttctatcaagcaacccatatctgagacaaagccataaaaatgtccatcgcaacactgtacccctgacacgaactatcatgcaataaccacaaccccgaaacggccatcgatacacggaacgagacaatccctatcagcaaaccacaaattaactttcttcgtcatatcaacgatacttcaacgatacttcaacgatatttcaacgataaaatatcgttgaactaacgttgatatatcgttcaaatattgtctaacaagtgtctgtagttcgctggtttcggttgtcccattcatgtcttgcgaccggacatagttgacggggtaaaaaaatatcgactggtttccattgtcagccacccgttgttgtggatagtttccgtttactccggacggcaggactgcctttcgtcacggcaagtggtgcggaatcgctgcgagacggaaatgtctcccgaaaagcacaaccgttgttaaacccaatgcccgcctgaggataaatcaatgatttattgaagataaccatgtgtgaaaaggaaggtttaccaagaatcgccattcctttgcaatgatttatttgaacaattggagaccagtggctaattatcggaaaaaaagttgtatatttgcacaatacaaatcaaaaacgttttacacatgaaaaagaccttattaattgtaatcatgacagttctgctgaccgccggagtctcggcgcaggggacaaaaagccaattcacactcaacacccgtgcgtggtcgaccaactactggacgacgatattgtacaatctggcccacaccactgttgtccactttgcctccaatggaaacgccaccgatgcgttgattgctggagccatcttgcccgatgccgacgtggttttcccgataggcatggggaaagccggcttcgaagcccctatgcacgacatctatggtccataccaccgtgcattcagcaacccgtttaaacgcatcggagattacggcatcggacttgacgtttcgtggaagcccagccccattggaatctatgccggtgcctactacaaaagccaggagatctgcttcatgcccaacgacgataatctgcgcggcttttatttccagcctcgggcaggattggtgctcggtagcaacgagaactcatttgaagccggtgtgttctacgacaaggtggtaggatgcggtggcacatgggaaccccgcaacaaagagatgctgcagagcggctggggcctcgactttaccctgagccacaccgtggcaaaaggccgccacaagaccatgctcatgttctccatgcccctgcataacttcttcaacaccgcctatgccgacggctcgctgaagaacctgaaccgccgcgtaggctacatcatgctcacccaccgcgtagtgctgtaatcccgaagcacgggccaccagcccgtcactggagtacgggccaccagcctcctcaaaaaagaatacagacagaactcttattatcaaagtatctatttaaattaaagagacatcccctatcttatcgggagcgagttgtagatttagctcgctcccgattattattctctacccgtaaaaataacgatacagacaccttttgatagcatttttcatcctccgcttgtaaaatcaaaagaatagttgtatttttgcaaattgaaaaaatgcaatactcctatggcaaaaatcattggacttgatttgggatcgaacagcattggatgggctgttgtggacaacgaaaagaacaaaatagaggccgctggctcacgcataatccccatggatgctggacgtttgggggattttgaaaagggcaattccgtttcatttactgctgatcgtacaaagtacagaggtatgcggcggctacacgaacgtttcctcctcagacgagagaggttactgcgtgtactgaacatattagggtttctgcccgaacactacgcatcgcagatttctcgttatggcaaattccccagaaacgaagagccaaaactggcttggcatgaaggaaaagacgggaagatggaatttctgttcaagacttcctttgacgagatggtggcagatttccgcatggcgggttttgacaaaaaaatcccttacgattggacaatatattatctaagacaaaaagccctcacctaccccataagcaaagaagaactggcatggttgctcttacaattcaaccaaaaacggggctattaccagctgcgaggcaaagtcgatgagggcatgggagatgccgaggaaaagggcgaagagaaatcataccaagagctaaaagtattaaaagtggagaacactggcgagcctgacaagaaaggtggcacatggttcaacatcacattagagaacggctgggtgtaccgtcgagctttccgcatagcacctgattgggaaggcaagactcgcggctttattgccactttcagactggacaaaaacggacaacatagaacagatacaccttctattagttcacccagcgaagaagactgggggcttcacaaaataaagaccgaacacgacatacagcaatccgggacaaccataggggcatacatctaccaaagcctgcggaataacccggatcgaaaaatcattggcgatttggttcaaaccgtggatcgaaacctttacaaagaagaattacaccgaatactggacacacaacaaagatatatacccgaactaaacaacaaagaattatacacctactgcattgaagaactttaccctgccaatgaggcatatcgtaacagtatagcgaacaaggacttcaattatttacttacggacgatatacttttttatcaacgcccactgaaaacaaaaaagcaactgattgccgactgcccgtttgaacaacgcaacgggaggcccgtcaaatgtattgccaagtctcatcccttatatcaagagttccgtctgtggcagttcgttaccaatctgcggatattaaaagaaggcatcgacatcactaccacactgctgccagataacaattcatacgtaagtctttacgactatttatcctcaataaaagaggtcgaccaagcatccattctacattacttcaaaatcggaaagaaagaatcgtcccaataccgatggaactatgtgcaggaacgcaaatatcccgttggggagacacattcaatacttttgggtggattaagcaaagccggcattgacaaggactttctcactcctgaaaaagagcttcatctatggcatattatgtactctattgatgaccagtgtcagtacgaaaaagctttgcatacattcgctaatcaccaaagatgggacgaaaacaaatgcagtctttttgtcaaagcattcaaacgattgacggtatacaaagacaaagactatggtgcctattctgccaaagcaatcagtcgcctattgccactgatgcgccaaggcaaatattggaacgtaaatgccattgatgagcaaactcgtagtcgaatcgaacacattatcactggtgaggaggacagcacactgacagcctctgtacgtgaaaaattcaaatatcttgagaatataaaccaatgccagaggctcaacacatggcaggcctgctatttggtctacaaccgtcattccgaggccattgatgctcaaaaatggaacaaacccgaagacattgatacataccttagtcatttccgccacaactcactgaacaaccccgttgtggaacaagtagtcaccgaaagcctccgcgtagtacgagatatatggaaacaggtgggtaccattgacgagatacacattgaacttggacgtgacttaaagaaaactaaagccgaaagagaaagactgacaaaagccatttcagagggagaagccacaaaccaacgtatacgccttctgctaactgaattaatgaatcccgaatgccaagtggaaaatgtacggccaaactctccttcacaacaggaaattttaaagatatatgaagatggggtgttccatcaagggcttgagatacctgatgacatcaaggatattcagaaacgcttcactgcagcaaaaaatcaacccagccgtgccgaagtgatgcgatacaaactatggcttgaccagaaatacatatcgccctatactgggaaagccatcccactggccaagctcttcactcctgcataccagatagaacatatcataccgcaaagccgatggtttgacgactccatgtccaacaaggtgatttgcgaagccgaagtcaaccaactgaaagaccgtgaacttggacacgaattcatctctacacatgcaggagaatcagtaacacttagcatgggtgaaacggttgaaatcctcaccatatcacaatatgaagcacttaccaaaaaactatttgccgacaaccccggcaaaatgagaagactgctgatggacgagattcccgatgatttcacccaaaggcaaatggtagacagccgatacatcagtcgtctaatgatgcatctactatctaatatcgtgcgtgccaaagacgaaatggaacagctcgaggagtccaccacatccaaaaacgtcattccatgcaacggtactaccactgatcgacttaaacacgactggggtatcaatgatgtgtggaaccgtatcatcctgccccgcttcgaacggctaaacaaaatcacccaaacatcgaacttcactgccattacagccgaaggccacaccatcccccatgtgcctctcgacatgcgacaagggttcaacaaaaaacgaattgaccatcgtcaccacgccatggatgccatcgtcattgcctgtaccacccgcagccatataaaccttctcaataataaatctgcagaaagcaacgaacgctacgacctgcaacacaaactgagaacaaaagattactacctcgataaaaagggtaatcgacaactgcacttcggtgattttattaagccatggccaacctttaccgaagatgtatatcatacgttggagaacatcattgtcagttttaagcagaacctgcgtatcattaacaaaacttccaaccactattctgtattgcgcaacggaaagcatgtaatacaatcgcaggaaaaaggcgacagttgggcaatccgcaaacccttgcacaaagaaacggtatttggcgaggtgaatctacaattgaagaaaaaagttagaacaaaagaggccattgccaacccgggcaacattgtagacagcgagttgaaagagaaagtaaaatattttaaatcacttcaccactctgataggcagataatagaatacttcgacaaacataaggatatttggagtgaagccgctgatggtaaaattgaagtatactactacacaaaagacaccaacgaccgatacttcgccacacgatataataacgaattaacaaactatcttggcaaatgttcaaatggaaatgaagcattaaagagaatagaaaagattacagatactggtatacaaaaaattctcatctcacatctattcaatgaaaacaaagatcctcaaaaagcctttagccctgaaggtatcgataggatgaatgccaacataatccaattgaatgaagggaaaaagcatcaacctattaagaaagtgcgtgtctacacaaaaggcgataaattcaatcttactgacacgggattaaaatcttacaagtactacaatggagatgatgggaaaaaccttcattacattatttatactacagaagacagtcctaaacgaaattttttagttgttgaattgcaggtatccgttgaatgccaaaaaaaatatggtaaacattggcagaaacatttagaatactttctaaaaaactatggaaaagaaagggagcatcattgtggactacttcctgaaaatgctataataaaacaaatactatctgctggtgatattatttatatgccacccacacaagaacaatctataccagaccacattaatccttctaacctataccgagtacgttcctttgacgacggccacttttattgtattccaatcaacgtagcaaatattgttttggaagggaaagaatttggatctcctaataaaacacaaaaagattacaacgataaaatgattagagatttttgcattcccattcaagtagaccgtttaggaaacatcattcaaataggataataccatgataaaacgtaccctttgcttttcaaacccggcctatttgtccatgcacaacaggcaactggtggtgcgagtggagagacagggcgacgaacccggaaagcaagccaacatccccattgaagacatcggcatggtggtattggacaatcctcaaatcacccttacgcatggcctcatggccgccctgctggacaacaacgcctctgtcatcacctgcgatgagcgtcacatgcccgtgggattgatgcttcctttggaaggtcacacggtgcaaagcgagcgcttccaagaccaattatcagcatcccttcctctccggaaacaattgtggcaacagaccgtacagcagaaaatccttaaccaggccgccttactacgcgaattgtacaatgttgagaccggcaatatgcagcaatgggctaacgaggtacgcagcgacgacagcaccaatctcgaaggccgtgccgctgcattctattggagccaaatgttcccagaaatgagaggattcacccgtggccgcgatggtctttatcccaacaatttccttaactatggttatgccgttttgcgtgctgtcattgcccgtgccttggtaagcagtggcctcctacccaccctcggcattcatcatcacaaccgctataatgcctactgcctggccgacgacatcatggaaccataccgcccatttgttgaccggctggtagtccagactatccaacaaaaccctcaaacagccgaagtgaccaccgaaatcaaacgctctctgctctcgattccaacccttgaagtacgcatcaacggccagcgcagccccttgatggtcgctgccagccaaaccacagcctcccttgcccgctgcttctcgggcgaatgtcgcaaactttcctatcctgaactataatggatcgtttctctgaataccgcattatgtggctgcttgtttttttcgatctgcccaccgatacaaaaaaagagcgcaaagccgctgccgactttcgcaagaatctccttgccgatggattcactatgtttcagttctccatttatgtccgccattgcgccagccgcgagaatgccgatgtacacctgaagcgcgtccgttccatgctgcccctatacggacaagtgggatgcctaaccatcaccgacaaacaatttgccgacatagaattatacgtctgcaaaaaggagattcctcccagcgcacccggccaacagttagaactcttctaacctttcaacagaatcaaaaaaagcacttcataaaataaaaaatcccactcaataagtgggatttttttaatcattgacagcctcctgaacattgattatcacttagataccggaatcgtgttgtttatcgtatgtgtcaatgttctctttttaagcaattcacaacctgtcgcttcgagctgcctaacctcatcggttgtttatcgtatgtgtcaatgtnntctctttttaagcaattcacaaccagcaacggccggttagtgtttacatttggttgtttatcgtatgtgtcaatgttctctttttaagcaattcacaacagtcgctgataggcggtcacgatgttcgagttgtttatcgtatgtgtcaatgttctctttttaagcaattcacaactattacgacaaactgtacaaaaagaccctcgttgtttatcgtatgtgtcaatgttctctttttaagcaattcacaacgtaaggacgaaagcggatggaacgtcagcggttgtttatcgtatgtgtcaatgttctctttttaagcaattcacaaccaggctgctctttctgtgacaaatgcatctgttgtttatcgtatgtgtcaatgt

SEQ ID NO: 1349 - DNA, 16266 bp, synthetic construct
  misc_feature 1..16266: note = Synthetic
  source 1..16266: mol_type = other DNA
cagcgctccccttttgaacgaaaaatcgcgtatttcgcgtcgtagtgcagaaatcggggttcgggtgtcgcttaacatatgttaaagtaaagtcctttcacaattcgttaaatcgtgaaaggactttattttaagaattatcacggctacgttgccgagaattcaaaggctgtagtatctcactccttcttccccaatatactgagcagatggatgaagagattgatgaaatcgagatacaacgtcaaagacccgagaagcgccaacttctgcgccgtctcgccgccatcttcagccatcaagagcatctgcttgatcttttgcgaatcataagccgtaaggccgacgaaaatcagaactcccacatagctgacaatcatggccaaacctgtgctcttcaggaaaagattgaccacggtggcaatgataatacctatcagccccatcagcaatatcttgcccatcgacgagaggtcggtctttgtcgtatatccaacaaaagccatcacggcaaatgtcccggctgtgataaagaagacgctggctatcgatgacatggtataggccacaaaaataaacgacaacagggcaccgttgatgaccgaataaagtatgaacatcaaggtagccgtagtaagagaaagcttattgagggcgccactgatgccaaaaacaagcgcaaactctgcaatgataagtccccaaaacaatatcttgttggtggctatagccatcagcacacccggacttgaagccacgccgtaggccgtaaggcccgagatgacgagggcaagggtcatccatacatatactttacgcatcaaagccggaaaagcggccgacatggccaggtcacggtctctcgacaaagtgtccgtttcaaaatctctgtaactcatttttccttatttttatagattaatattgttatacaaatgcaaaggtattcatattttccggatagcgcacaacaagtatcataaaaaacaataaaaaatcagaacacaacataatgcaaccaaaaaaaattgtacttttgtagaaaatacaatgatttataacaaccaaagagattatgacgaacaagataacactgcgtcccggacgccgcgaagacgctccgcacattgccggactgataataacagccatgacagaagaatgttgccgccatttctacggcaacgaacacaccatcgatgacttccaccggctgatgacccgactgtcagcagccacagacacgcaatacagctacgagaacaccatctgcgccattgacgccgaaggccgcatagcgggcatcagcgtaagctatgacggcggccgtctggaagaactgagacagccattcatcgacagcgcaaaaaaggagttcggcatagaccacagtggaatgagccccgagacacaggccggagaactttatctcgactcgctcgccgtgctgcccgaataccgcggacagggcatagcgacaatgttgctggaagccactgccgaaaaagcacggctgtcgggcatcggcccgctcggcctgctcgtggacaagggcaacccacgggctgaacggctatataataaggtgggattccgacatgtgggcgacagcgaatggggcggccacaagatgaagcacatgcagatgggataaaaaaaggcgaagattaaatctccaccttaaatgttttcacaacggaataatccttattgtgaattgcttgaaagtttctgcaaagatacgaattaaattctaataaccgaaataataataaactattaacaaaaatatgaaaaaaattataggtttagacatcggaacaaacagcataggatgggctaccatctacggagaaaccaacgaagaaggcaaactcatcttaaaagagattgcaaatgcaggcagtaggatcatacctatggatgcaggcatattaggcaactttgacaaaggcaattccgtttcacagacaaaagaaagaaccgaatacagatgtgcaaggcatctgagagaacgatatatattgcgcagagagcgactgcatcgcatattaactctcatgggcttcttacccaaacactttgccgaatgcctcacacgctacggcaaattcacagacagttcagaacccaaacttgcttggcgcaaagatgacaatggcaaaatgcaattcctgttcaaacagtctttcaacgagatgctgaaagaattatatgaacacaatccgcaactcacagaagaagacaagaagattccgtacgactggacactatactatctgcgcaagaaagccctaaccgctccaatacaaaaagaagaactggcatggatactgctcaatttcaatcagaaacgaggatactatcaattacgcggggaagacgaagaagatacacaaaataaaattgaggaatatcagtcgctgaaaatcatacgggttgaagcaaccggcgaaaagaaaggcgatgacacatggcacaacgtctatcttgagaacggtatggtctaccggaggacgagcaagacattccttgattgggaaggcaaaacaaaagattttatcataacgacactattggatgacaaaggacaaccaaaagttgacaaagacgggcaaatacgccgttcactccggcaacccaaagaagaagattggggcttgctcaagaaaaagacagaagcaagcatcgacaaatcagcaaagacagtaggctgctatatctacgacaatcttttgtccgaccctacacaaaagattaaaggccgtcttgtacgcaccatcgagcgcaaatactacaaaagcgagcttaaggccatattggaaaaacagaagctgttcatccccgaactcaacgccaaggaactatacgacagatgcgttgaggaactgtatccaaacaacgatgcccatcgcaacaacataatccatagagatttcacctacctgcttgctgaagacatcctgttttaccaacgtccgttgaagagcaaaaagtcgttgattgccgactgccaatacgagaccagggcctacaaaaatcccgaaaccggagaaacaaagcacatcggcataaagtgtgtctcaaagtcacacccaagattccaagagtttaggctgtggcagtttatcagcaatctccgcatctacgaaagaacgaagaatgtcaacgggaaaataatgattgacatggacgtgaccgactatttcctgaaagacgagacagaccatgaacgtctgtttgagtttctgaacagcagaaaatccatcaagcaggacacactactctcttcgttcttcaaactgaaaaagcaaaacggcaaacatctgtacagatggaattacgtggaggacagggaatacccatgcaacgaaacacgcgagctaatcctatcccgcctgaagaaagccggcatcagtgcttcatttttagctacagagacagaagaagctttgtggcacattctttattctgtctccgacaaacaggaactaagaacggctctcgcgacatttgcacgtaaaaacacgctggacgagactactttcaccgaacatttcatcaagacaccaccgttcaaaaaagactacggagcctattcgctgaaagccatcaacaaactcctgccactcatacgcatgggcaaatactggagcgaaggctccatcgatacaaagacaagagaaagaatcaatcgcatcatagacggagaggttgacgagcacatcaagaacacggtcagagagaaagcgattgacctcaatgacatctcacacttcaaaggcttgccgctatggcttgcctgctatgtcgtgtacaaccgccacagtgaagcatcggacagcaagcgatgggaacgacctgaagacattgacgattatctgcaccacttccatcagcactcgctgaacaaccccatcgttgaacaggttgtcatggagacattgcgtactgtcagggatatatggaagaccgaaggacacatcgacgaaattcatatcgaattgggccgtgaaatgaagtcaccggctgccaaacgcgcgcaaatggccaaaaacatgacagagaacgagaacaccaatattcgaatcaagcaactgctcagggaatttgcctgtcctgacatgaaaatagacaacgtgcacccctactcgccctcacaacaagagttgctccgcatatacgaggaaggtgtcttgagctccacgaaagagctcgagcccggcataacggaacttatcggaaaactgaacgataaaagcaagcagccatctcactccgacgtgctgcgctacaaactatggctcgaccaaaaataccattccccatacacggggctggccattcccctcgcacgtctgttcactccggattatgaaatagagcacgtcatacctcaatcccgctatttcgacaattcgttcaccaacaaggtcatctgcgaatcggaagtaaacaagctgaaggacaaccaactcggatacgaattcatcgtgcgacatcatggcgaaaaagtttctctttcacgcggcagaacagcgaccattctcgagcccaaagaatatgaacagctcgtgaaaaagatctactcgacaaatccgcaaaaactgaaaaagctgatgatggatgacatccccgacggattcatcaaccgccaactcaatgacagccgctatataagcaagctcgtgaaaggccttatgtcaaagattgtccgggaggaaggagaagatgaggcgacatctaaaaacgtcattgtctgtaccggtagtgtcaccaaccgactcaaaaaggactggggtgtcaacgacgtgtggaacagaatcgtattgccacgcttcgaaagactcaaccaaatgtgcggacagcaactgtacactactgtgaacacctccggacatgtcatccccgacatgcctatcgagcaacaacgtggtttcagcaaaaagcgcattgaccaccgccaccacgctatggacgccatcgtcatagcctgcgccacaaaaagtatcgtcaactacctgaacaacgagtcagccaaacatgacgccaagacaacacgctacgacctgcagcgcgccctgtgccacaagcagcacaccgacgccaacagcaactaccgatggacggtgaacatgccttgggatacattcccagccgatgtaaacacggctctttcacaaatcatcgtcagcttcaaacagaatctgcggataataaacaagaccacaaacaagatacataaactcgaaaacaacaagcgagtggtcgaacagcaaacgaaaggcgacaactgggccatacgcaaaccactgcacaaagaaaccgtacacggagaagtcaatctccggctgcacaaagaagtcaaactgaaagaagccatcacacgccctgatgatatcatcgaccgcgatctgaagaaaaagattaaggccatgctcgagttgggctacaatctgaagaaaataaaggcttgctttgaggacaacgccgaagtttggtctgacatcaacctgaacaagattccaatatattatttcacttcagaaaccgctgacaggtatttcgcaacccgcaagcccattgatcaatccttcagccgcaagaagattatcaatgagattaccgacaccggcatccaaaagataatgttgcgtcatcttgaaaacaacggtgaagacccggatgtggcattctcacccgaaggcattgaggacatgaaccggaacatccgcacactaaacaacggaaagtggcatcagcccattctcaaagtgcgcgtgtatgagaaaggcaacaaatttgccgtcggcaagagcggaaataaagccaagaaatttgtcgaagcagccaaggggacaaacctgttctttgcagtatacgtggatgagaacggtaaacgcagctattcgtccataccgctcaacgtcatcatcaaccgcatgaaagcaggaatgcccgtagccgacgaggacggtatcattccgacgttcgttctctcccccggcgacttggtctatctgcccaaagaaggagaaacgctctccgtcgagactattgacaagagcagaatatacaagatggtaagctgtaatgataaccggtgctgttttatcgggaatacgatagccaaccctatcatagataaatatgagtttaactcacacaacaaaattgaaatagccttgactggcgaaaacatcaaggaaaagtgcatccccatcaaagttgaccgcttgggacaaatcgttaagttaggatattgaaaagacgacagcttatgatcaagaagaccctctatttcggcaatcccgcctatctttctctccacctcgggcaactcgtaataaagctacccgaagtggagaacagcgcggctttggacaacaatttcaaagcccgcgccaccgtcaccaaaccgatagaggacatcgcatacattgtactcgacaaccggcgcatcaccatcacaagtggagtcatggaagcgttgctcgacaacaactgcgctatcatctcatgcaactcacgcggcatgccggtcggacttatgctaccgctcgcaggcaacacagttcagaacgagcggttccgtcatcagcttgactcctcactaccactgcgaaaacaactgtggcagcaaaccatacaacagaagattgccaatcaggccgctgcgcttgaacgatgttgtccgacagccgccacgggatgtatgcacaaatgggccaatgatgtgaaaagcggtgacgcacgcaatgtcgagggcaaagccgctgctttctactggaaaaatttcttctgcgggcacatcgacaatttcgtaagagaccgcgaaggcatgtttccgaacaacctccttaactacggatatgccatccttcgggccataatagcaagggcactcatatcaagcggtctgctccctactctcggcatacaccatcacaacagatacaacgcctactgccttgccgatgacataatggaaccttaccgtccgttcgtggacaatctggtgcacgacattatcaacgaaaatggagttgactttgaacttacacgcgacattaagtctaaactattaacaattcctacactcgatgtcacgataaacggccggcaaagtccgctgatggttgctgcaagtcaaacaacagcctcactcgcacggtgtttcatgggtgagatacgacgcatctattatcctgtaatgtcgtaacggcaatgctctcagaacgtttcagtgaatatcgcattatgtgggtaatggttttgttcgacttgccaacagaaacaaagaaggagcgtaaggcttccgctgagtttcggaaacgcctcacgggagacggtttctccatgttccaatactctatctacataagacactgcgcaagcattgagaacgccgaagttcacatacgccgcgtaaaagccatactaccagaatacggcaacgtctgtattatgtgcattacagacaaacaatttggaaatatacaagtctattatggcagaaaagcaacgaagaccaactcttcaggacatcaattagaactattctaaaatttttcgatacgttaatctatcagaaaataatcattttatagaaacatataaacaaaaaatcccgcctctttaagacgggactctgccattatcgcagttctttttattttctgatttaactcgcatacgcctaataatcagatactttctaaaagtatactgttacttatactgcgaagcagaaacttttcaagcaattcacaactcccgtttcgtccgtagtcgactccatctaactgttacttatactgcgaagcagaaacttttcaagcaattcacaacgagtggtaagtatcacaggtgggtgtgccactgttacttatactgcgaagcagaaacttttcaagcaattcacaaccgcctcttgctcgtggtaagtttggccatgactgttacttatactgcgaagcagaaacttttcaagcaattcacaacatcaataatagtcttgtgacgtttgagactactgttacttatactgcgaagcagaaacttttcaagcaattcacaacatgtttcttacaatcctttcccactttttactgttacttatactgcgaagcagaaacttttcaagcaattcacaactaacactcacagagcatcgcatttggatttactgttacttatactgcgaagcagaaacttttcaagcaattcacaactacattacaggatattcttgagcatcttccactgttacttatactgcgaagcagaaacttttcaagcaattcacaacataccgacatattcctctatgctcggcgcactgttacttatactgcgaagcagaaacttttcaagcaattcacaaccgtattgttgatgtatccgtctggcttgtgactgttacttatactgcgaagcagaaactcaaatatttctctactatagtctaaaatatcaaagagcaattttgctgcaaaggtacaatataaaatagtgattcaaccatcgattacattgtttaacatattcgcaattaaaaaaaatcataaatgtgtctttgtcgcacatctgcaagtatgacgcgctttatgcaaaattaattcgccgttgtcgataaatattatcgttcatcaactcacatttcaaatttaattaatacctttgtacctaatattataaaatccgaaaagagaaccataattcataaaatagaaatacatcaaatcaaaacataaaacatccatgaacaaaaaaatcatcagcatcgtaatgagcgtcatcatggcgatgcctacactggcccaaagcgtgataacccatccatggcaaggcaagaaagttgcctatttcggcgactcaataacagacccgcgcaacaaggcttcgaagaaaaaatactggagtttccttcaggaatggctcggcataacaccgtttgtatacggagtgagcggccgccagtggaacgacattccgcgccagacggcacagttgaaaaaagagcacggcgatgacttcgacgccatactgatattcatgggcaccaacgactataaccatgccgtgcccctgggacactggtttgacgagaagttagaaagcgtggaatatggccatgagtatgtgaaacgcatggaaaaccgcctgcgccgccatcccgccatggatgccaacacctaccgcggacgcatcaacattgccctcgactcgctcaaacgcaccttcccgaccaagcaaatagtcctgctcacccccatacaccgcgcgggattctatgccaacgacaaaaactggcaatgccccgaggactaccagaaccgttgcgggctttatctcgacagctatgtggaggcggtgaaagaagccggagacatttgggcggtgccggtaattgacctcagcgcattgtgtggtctttatcccctggccgacgagcacgcccaatacttcaaccgtgccgacaccgatcgtctgcaccccaacgaccgcggtcacgaacgaatgggacgcacgctgatgtaccagctcatgactcttccctgcaatttctgaacaagaattgccggtttaccgcaggagggtgtgtcaaaataaggttcatgcacattgtagggacatattcttgtatttgtccgtctgtaacatcctgatattctatggctgtttggcggacaaatacaagaatatgtccctaccaagcaccatgtagccattttgcccctacgggaatggttatgtcacaaataattccccaacgggttggtgacattaagttaaataaatacaaattagtcataaaacagaaaaaccacacgggttattttaagttttttacctacttttgcacccaaaacggacttataaaaatgaggtgatgaaattctcaagattcgcattattatcaatcatcataagcagttcactgacatcttgttttaaagacgaaccgctgaacgcagaatgtgacattgaaaaggcatgggttcattcggacaatccggatgaaacgtttttcaaccctaccgacacgctgataacggtggcatacagggtcaacgaaataaagtttgaagtgaaaccccaaagcgaccttaccgccatggctccgatattccaaatcaccgaaggggctacgatagaacccgcaagcggttctgtacacgatttcagcaacggacccgtgacatacaccgtgacttcagaagacggaaaatggagccgcacatacagcgtatcgttcgagaaacgaaaaagcgaagtgcacgtaagcgagattaagtttgactttgagaattacaagatagacgatgacttcggaaaattctacgtatggtacgacaccgacgacaacggcaaggagacatatctgtgggctacgggcaacccgggattccgcttcgccttccctctggtaaacgacccggagtcataccccaccgttcctttagaagacggctttgacggccacggcgtgaaactggagacacgtagcacgggaatgttcggcataatgaacaagaagcgtattgccgccggcaaccttttctacggattcttcgacacacaatatgtgcttacggagcctatgaagtcgaccaacttcggccggccgttcgacaagaagcccataaaactaaccggttactaccagtatacgcccggcgaaaagtatcaggacaaggacggcaactttatagaacagaccgaccagggagccatctactccgtgctgtaccgcaaccatgacgaggccggaaacgccgtgatgctctacggcgatgacgtgctgacaagccgctatgtggtggccgtggcacgtatggccgatgtaaccgccaccgacggatggacacagttcgagctggactatgcctacggcagtgacattgacaccgaactgctcggcaacttcggatataacctcgccatcgtgttctcgtcgagctacgaaggtgacaaatttgaaggagcaataggcagcacactgctcatagacaaggtaagggtggtttgcgaacaacctgaataaacacgagcctttaattcacacaatatattataaacttaacgacaagatgaaaacgttcaccataacatgtatactgacagtggttgcgctaatcactgtacatgcagaacgactgacggacaacgtaaactacaacatacgtctgggctacaacataggaggtacggcgccaataggcatgcctgccaccatccgcagcatggaaagctacagtcctggatggaacctttcgtacggattcgacgtacagaaagaccttaacggcaagtggggactgatgacgggtctgcgtctggagaacaaaggcatggaagtggacgcacgcgtgaagaactaccacatggagatagtgcgcggcggacaggtgctgaccggttatttcaccggatacaacaaggttaacgtggaggaatggctgctcaccctgccggtattggcgacatactctgcaggcaaaaacgtaaagttgaaagtaggcccgtacctgtcgtatgtcatgacacgcaagttcgacggctacgcctacgacggctatctgcgcgagaataccccgacgggcgaccgcatagacctcggcaacaccgaagagcagcgtggcagttacgacttttccgatgacatgcggcgtctgcaattcggtattgatatgggggtcgactggtatttcagtcaccggtggggcgcatacgccgacctgtcgtggggactgacgggcatacacaaaagcagtttcaagacaatagaacaaacattatatcccatattcggaaccgtgggactgacatacaagctgaaatgaggatgcttcacaaaagcaaatattgtgctgtgagtcctgatacatacacgttcagcataatatatacattcagaaacaaaaacattagtatttaaatttaaaagaaaggaaaacttatgaggaaactttttacactcatcacactgtttgccggagctgttgcagcaacagccaccgactacacagacgagctggaagtgattatcgacggcatgagcaccaagcagccggccgtaatctccgtagacgagcaaggtgacggaaaatatacactgtcgctcaataacttcgtgctcatgggatccatgcctgtgggcaacatcacactgaaagatgttgaaggtatcgtaacacccgaggtgacaacaatacagaccaagcagaccatacagatagaggccggcaacatggagggcatattggaacaagaatggatggggcccaatctgccacccgtaccagtggacatgacagccgagataaggggtaataagctgtataccgtcatcaatatcgacatgaccaagacattgggacaaagcatcggcgtagtgttcggcaacggaggctaccatatggcaaactcgggattcgagacattccatacggcaacatcaggaaaagcaacaagtgacgagcccgacaactggcactcattcatgagcagcaccggtacttatgccggtcttgtcagcactgtgccccacacattcatcagcgaagaggtacgtcccggctctaccggaaccaaaagcgtactcataaaatcaggaaaagtactcggttttgtcgttgccaacggaaccatgaccaatggccgcctcagcgcaaacgccatgagcgcagatgacccgaagaacaatgcctttatcgacatcacaagcgaagacacggatgccaacggcgacccgttctatacaatgttctacggtaagcccgactcaatgagcgtgtgggtgaaattcacccaggagacaccgcaggctgattatccctatgccactgttacagctgtaatcaccgacggaagctactatcaggagcctgtagacaaggattacaaagacatcatcgtggcacgtgcctccaacgccactatcgagagtaacggtggagtatggcagaagttgaccatgcctttcgactatgcttcatacactgacaaggccgccaaaaccattctcatgacattctcaaccaatgccggtgccggcaaaggtactggcaatgacgaactttacgttgacgatcttgaactgatatacaactgctcggccacggctatcagcgtgaaaggcaccccgatagccaacttcggcagtgccgcagacaatacgtacgaggtgattgtcgacggtgagagtgccgacataaccgccgatgacattgaagtgacaaccgacggcaagggagcacgcgtgacaatagagacggcagacgttgactgcatcggcggcggaagcgatgccatcatcaccgtaacgtctaatgacctgaagaagagcaatacatactatgtgaatacaagaagcgcacagtatgcaggcatcaacaacgcatctgtaaacgccggtggcaaggaagaggtgaaagccatatacaacatgaacggacagatggtgaagactccggccaagggcagtgtctgcatcgtcaagtataccaacggcaagaccgtgaaaaagattgtgaagtaaaagacagaacaaccgacgtatacataaacaaattcgggagacagccaaacggctatctcccgaatttgtttaacagacttataactgttgtaacctcgctgtctgtaagaacctgattgcaaggtatgctcagttcctcacgatgtatgcgctcggtcacaggcaacgccatactatccggccactgccccgaatagcactgctgccggtgtggcggaatgggataatgtatcaccgtctgcactcctgctgccgcaagatactcctgaagctcgtcacggcgcggggtcagcacgggaaatatgtggaagacactgtgccgccaatagtcgcgtgaaggcaacgtaagcaacggattgcttatctcgtcgatataccttaaagccactgcacggcgcacggcattgtcttcgtcaagatggggcagtctggcactgagcactgctgcctgaacttcgtcaagacggctgttacgcccgcgatagccgaacacatatttacgctgggacccgtaattggcaagcgcacgcactgtagcagccaattcgtcatcgtcagtagtcacggctccgccatcacccaaagcgccgagattctttcccggatagaaactgtggccggcggcatcgccaagcgaaccggtaatcttttgtgccgtgtcataaacaagtccgtgcgcctgagcgttatcttctataagtttaagaccgtgccggcggcatatgtcaccgatgtgagcagtataagccagccgaccgtacagatggactatcatcacggcacgcgtacgcggtgtcacagcccgctctatcagcgtgtcatctatctgcagcgtgtcaggacgaggttctacaagcaccggaacaagtttgttttcggttattgccagtatcgaggcgatataggtgttagccgggacgatgacttcgtctccctccttcatcacccccatctctatgtaggcacgcagaatcagagtgagggcatcaagtccgttgccgcaacctatgcaatggcgggtacctatataacgggcgtattcaccctcaaaacgcgctactgcttcaccctgcagataccatccgctgtccaccaccctgtcgacggcttcgtgtatctcgccggcgtgacgggccgttatctttttcagatcaagatattttatattcataacatttgttcttttattcacatcataagcctgtccgtttctgcttatcccagaactttcatcttatgttctttctcttcagcccatgtatcacaacagccactcgtaggtgtcgtaacatactccacggcctccgaacccttccttttggaatatgagcgattcgttgagcctgcgcccctgctcttccgttgatttaccgaaatcgaaataacggcggtcggcaaagtcgtgattgagtatgcggtcgtagatggcgtcgatagctccgagacgtttgccttcggcactggcggagatatactgtgaatgaaccacacgaccgaaatcgtaaagcactgtgccgcctaccacttcaccgtctctccgggcaacatacagacagatgttggcggggaaacgcgacttcagcagctccatctcggcaagcgtatgcacgggattgacaccgtagcgggtgttgagattggccgtcagcacctgccagaatcctgcgaggtcggagctgcgttccacggtgacaccgttattgcgggccttgctcacgccacacttacgtccgtggctccatctgacacgcgattcaagaaatatcgtcgacgaaatctcgcgcgaaaacagacaggcattgcactcccggaaaatggcataaaggtcttcttcggcaggcaaacggtgataaatccacggcacggccttatacaccacacgccttatccccgagaccgaacgcagaaagccgttcagttctgcaaacagcgaaacaatatcggccgccgaagcatcaacagagattatgacaccgccgtaagtcaggccccggtgcgaccacaatgttccgtcagcatcagcgcatgccggcaacaaggcataaagcctgccatcacggtatatcatcagcgaatagtcgacaaagcggtcggcatggtaatccatgtaaccacggtcgaacaggaatgtcccgttcttcgacccggcaacaaagttgttccattccgcggcctcagaagaagtatatctctttatttcaaacataatcttttaaaattttaggagttgtttttttaggagttataggagttaaaggagttatcgcgggcagagcccgctcaggagttaaagacaaatgaattattatatgaaatgttctgtcatatagcatgttctgtcttgtggcttgttctgtcatgtggcatgtcctgtcatgtggcatgcaaataagtcaaacaatatcatcgcagcaagattgtcacttaaggtcatcgcagcaaagtcatcataacagggctattgtctttaactcctaagcgggctctgcccgcgataacttctttaactcctataaatcctaagaaactcatcataatcgcggatgtagtcctcctcctcgtacaactccgaagccagcacaagacatacggctcccgacgaaaagtcgtcgagtgtgcgccatactccggtttcgacgagcaggccctgataaggatggtttagaagaaacgtctgccgctcatgcccgttgtcgagcgtgacatgaaaactgccgctc

SEQ ID NO: 1350 - DNA, 16265 bp, synthetic construct
  source 1..16265: mol_type = other DNA
  misc_feature 1..16265: note = Synthetic
aatcatctccgatatgtctggcggaagaacgtgacagaaccagtttctggaaccgcttctcttgtaagggagtgatgaaacgcccgaatgcgcgggtatattgttctttatccgtttcttcggaaacaaaaggggagagttcactctgccggcttttgcaggtgagcagggcatccgcacattccagtgaagacagtgcttcgctgatttcgctccagtcgtatgcggtgacatccggacggataagtaccaagggatgttcctccgatatccggaaaggagccatgacaaatcctttctttccattcagttcctgaatgtccgctaattgttccacatcgcctgaggtttgcaataccaggtagcattcgtctgtccaaggtaaccggtagagggcgaaaccgaggcggctgtgtgtaaggcaatccaataatttttgcgtatgtatatctggtagattcatttctttttcagtatgaaattaacgacacgaacagtagaaaccagttgtccttgtggagtggtgatatctatattccatatatgcgaggatctgccgcggtgaatcagtttgccggtggcgaatactttgcctccgacgggcacggccgacagatgatttccacttacttgtactccgcaggcatattcgccttcccggcatagcgacatggagccatgccctgccacaatctcggccagagccagtgacgcgccgccgttcaacataccaaagggttgtgaagtacgatggtctacaggcatttcggcatgtaccgcatcctcggtggagggtagaaaccggatacccagatgttccgccatcgaattcgaataatcaggtttgcaggttgtttcttccatcatttgtatgtctgttcttttctatagggctacaaaaatacataaattttagatgaaaatgtcgttcatgttgttcttttaagaacaaaaacattcggggtttgtttctattatcggaatatattttttattttgcaaaaagaacttgtacaaatgcaacaacgaatgaatgaaacaataatttaatacttatgctcattacgattattatccttgtactgtccgcagtattttttgtaaatggcaagatacggtcggatcttgtggctctttgtgctttagtggctttgttgatttttcagatattgactcctgacgaggctttgtccggattctccaattcggtcgtcattatgatggtggggctgtttgtggttggcggagcgattttccagacaggacttgccaaaatgatcagttcacacattctgaaattagcgggtaagagtgaattgaaattattcttgcttgtaatgttggtgacttctgccatcggggcttttgtgagcaatacaggtacggtggctctgatgttgcctatcgtggtcagtctggcagtcagtgccaacatgaatcccagtcgtctgcttatgccgttggcgtttgccagcagtatgggaggtatgatgacactgattggtacgccgcccaaccttgttattcaaaatgcgttgacttcggccggttttcctccgctttcgttcttctctttttttccggtagggattatttgtgtggcagtgggtactttggtgttgcttccgctcagtaaatggtttctttcgaaacgggggaaaaacggggaagacaatgttcattcgggcaaatccctgaaacagttggtgaaggaatacgggctatccagtaatttgttccggttgagggtggtgggtgactcccggctgcatggaaagacgattatagagttggatatccggcgcaagtatggattgaatatactggaggtgcgtcgtggggatatgtcacaacaccgcttcctgaaaacaattactcagaagctggccgatcccggtacggttcttcagaaagaggatattctgtatgtgacgggggattttgagaaaataaagttgtttgccgaagattatctgctggagatgctggacgagcatactaccgaagaagcgaaaaactcagctaattcattggatttttatgacataggtattgctgaaatcgttttgatgccttcctccaatctgataaaccagacgataaagggggcgggctttcgtgacaagtttaatgtgaatgtactgggtatccgccggaagaaggaatatttgttgcaggacttgggcaatgagcggattcatagcggggatgtgttgctggtgcagggtacatggaacaatatcgcccggctgagcaaggaggatgccgactgggtggtactgggacaaccgctggccgaggctgcaaaggtcacgctggattacaaagcaccggtagctgccgttatcatggtgctgatggtggcaatgatggtgttcgacttcattccggtagctccggtgacggcagtgatgattgccggtatcctgatggtactgacaggatgtttccgcaatgtggaggcggcttacaaaaccattaactgggaaagcatcgtactcattgcggccatgctgcctatgtcgctggcattggaaaagacaggggcttccgaatacatttcgaacagtctggtcagtgaactgggaacatacggaccgttggcgctgatggcgggtatttatttcactacttccctgatgacgatgtttatcagcaacacggctaccgcagtgcttctggctcctatcgcgatgcaaagtgcaacgcagataggggtaagtcccgtaccttttctctttgcggtgacactgggggcaagtatgtgtttcgcttcgccattctccactccgcccaatgcgctggtgatgcccgccggacaatatacctttatggattatgtaaaggtagggctgccgttgcagattattatgggcattgtcatggtgctggtacttcctttgctgtttcctttttaagttgtttataatatatgatgccgatgacgtccgctataaaccatccgataggaatagaccaccagattccgatgaccccgatggcaggaatgccggcaagccaataggaaagggctacacgggttcccaacgataccactgtgagcactacggacattcccggcatacggatggcacgataatatccgtataacaggaacaaaatcccaattccgcaataaaacgctccctcgatgcgtaaataactgataccgatgttcagaatttccgtttcgtggggacggacaaaaatcagcatcaatggtttggcgaataaaaagaccagaatggaaatgaccagagagaagagaacggtggtaatcaaggcacttttcactcctttgcggatccgttcctcttttctcgctccgaagttctgggcaataaaggtggaaaaggcatttccgaattcctgtaccggcatataggcaaacgagtctatttttattgctgccgcaaaggcggccatgactacagtgccaaaactgttgaccaatccttgtaccatgagaatgcccagattcattaccgattgttgtacacaggtcagtgcggagaacgaagtgatctctttcaggcagtgacggtcgaaatgcaggtcgttgcggtgtaatctcagttcggggtatttcacgtaggcatatcccataattcccaaagcggatactccctgtgcggctaccgtggcgatggctgctcccttgattccccaatccaactgcaagataaagaacaaatccagcccgatgttcagtacaacggaaaccgccagaaaccaaagaggagtgacggcatctcctatggcacgcagcaatgccgcatagaaattatagataaaggtaaagccgattccccaaaagataatccacaagtaatcatacatcatgccataaatatctttgggaatctgcaatatcctgaggatgggatgaatccagacgaaaaccgctatatttagaatcaatgttactgtgccgatcagcaggacggatacatagatgctacggcgtagggaatccgtccgtccggctccatattgcaaggaaaaaacggttccgcttcccatggacaatcccagcaggatggaaataaggaaaaccatcagcgtgtaggcggaaccgacggcggccaatgcgccggaacctatacattgtcctacaatcagcgtgtcggctatgttgtaacactgttgtagcagtgagcctataatcataggtaaggtaaaacgtagcagagtgccggtgatgcctccctgcgtcaagtctattttagataacatgatgtgcgtctgttcgattcaatttcttatttattttgaaatttattgcgaaggtagggaataaaatatcaaacaacaatagagattgtctatttaatacccggaatgttctttctccttaaaaagagttaacttgatgatattttccataggaaactttttattataagaaatatcatgtatgtttgcataaagtttccattggaaaatattaaatcaaataaaatagttcgattatgaagtatatagtaataggaggcgtagcaggaggtgcaactgctgccgcacgtatcagaagaaacacggaacaggcggaaatcattttgttcgagaagggagaatacatttcgtatgccaattgtggtctgccttattatataggaggtgtgattgcggagcgggaaaaattgtttgtacagactccggaggctttcgggaaacgttttaacatagatgtgcgtacccggtccgaggtaatagccatccattctgccgataagacagtggatattcgtacttccgacgggaaaacttatacggagagttatgacaaattattgctttctccgggtgcgtcgcctgttcgtcctcccttgccgggcattgacaatgaaggaatttttaccctacgtaatgtgaatgataccgatgctatcaagagttacttgcagcagcataaggtgaaacgggcggtaatcatcggggccggattcatcgggttggagatggcggagaatctgcaggaagccggtgcggaagtggcggttgtagagatggcaaatcaagtcatggctcctattgatttctctatggcttctttggtgcacgagcatttgttgcagaaaggagtgcatctctacctggaaaaggcggtggcttctttcgagcgcacggtcaacggactggaggttatttttaaatcgggcgaaaggctgcctgccgatatggtgttgttatccatcggggtacgtcccaatacctcattggcgacagaggccggactggagataggggagatgcgcggcattaaggtgaacgattacttgcagacttccgacgagcatatttatgcggtgggcgacgctatcgagttccgtcatccgctgactgatagaccgtggttgaattatctggctggtccggccaaccgtcaggcgcgtattgtgcagataacatggttttggaaataaggttacatacgaaggggctgtcggtacttccattgccaaaatttttgatatgactgttgctgcttcaggccttccggcaaagcggttgaaacaggcaggcattgattatttgtcggcaaccatccattccggttcccatgcgggatattatcccgatgctttacagatgtccattaaaataaccttctctcctgtgaacgggaaattacttggagcgcagattgtggggtataacggagtggacaaacgtattgacgaattctcgcaagtgattaagcataacggaactgtatatgacttgatggctttggagcaggcatacgctcctcctttctcttcggcaaaagatcctgtagcagtagccggatatgtagccggaaatatactgagcggaaagatgaagcctctttattggcgcgagttgcaggctgccgatttgagtaaagttacgttggttgatgtccgtactcccgatgaatttgcactcggtgctttgaagggggctgtcaatattcctttggatgatatgcgcgaaaggatgaaagagattcctcaggataagccggtctatttgtattgtggagtggggttgagagggtatctggcttctaatatattgttacagaatggctttggggaagtaaggaatttaataggaggtttgaaactgtataaagcggcaacggctcctctgcccaagccgaaggagttctcaaattccggatcttcaagttctgattcttcaaaagttgatcattctgaacacagtaaagattctgctgaagcttatactattgcctcttccgtcattccttctatgaaagcaataaaagtggatgcttgtggcatatcttgtcccggtcctatcatgaagctgaagaagagtatggaagaactggcggacggcgaacgtctggagattgtcgctacggatgccggtttcccccgcgatgccgaagcatggtgccagactaccgggaaccgttttgtctcagtaaagtcaggagcaggaaagtatgaggtaattgttgagaaaagtactccgcaatcttcttcctcggaggtttgccgggaggataaagggaaaacttttattctgttcagtgacaacctggacaaagttttagctacttttgtactcgcaaacggtgcggcggctacgggaaagaaggtgatcatcttctttactttctgggggctgaatgctatcaaaagattggacaagcctgcggtgaagaaagatatctgggggaagatgttcggcatgatgctgccttccagttctttaaagttgagattgtctaaaatgaatatgggtggaatgggagccaggatgatgcgatatatcatgaataagaaaaatatcgactcactggaatctctgcgtactcaagccattcagaacggagtggaatttatagcttgccagatgtcaatggatgtaatgggtgtgaaacgtgaggaattgctggatcatgtgactattggcggagtggcaacctatatgaaccgtgccgaacaggcgaatgtaaacttgtttatttaaatttgcatggagaaaataaaatcaatatgtgtcatgagagagctgttcaaggctctctctgaacttgaaacccgcttgatggaacaatatggagtgtcattgaatgaggcaatggcactttgttgcattggcggagatacgctgacagccagtgtgatatcggaaaacacaggtctgtctgcttcgcatacctctaaagtcatccgttccattgaagagaaagaattaatcgtccgtaatttgggggataaggataaacggcagatgcattttactttatccgataaagggcgtgaatgtttggaagcgctgaaagcaaatgaaatagaaataccggaactattaaagccattgtttaaataaacccttctcttttccatttgtttattccggatatgaaactggagaaatggaaaaacaagtggaaggagtggagcaatctgcgcaaatggcaaatatggaaactgaagctgattgatgcccgtctgtatttcgtgagcatattcgtggggctgcttacgggactggttgctgtgccttatcactatcttctctggtatttctttgatgtgcggaaaacttttttcacggcgcattatccgtggtattggcatgtattgttgttttttatcttatgggggattctgatctttgtcgcttctttggtaaaacgtatgccattgatagccggaggcggtattcctcagacacgtgcggccaataacggtcgtatccgttatgagcatccttttaaggaactggtggccaaattctgcggaggtgtgttggctctcagtgcggggctgtccttgggacgcgaggggccgtctgttcagatagggtcttatataggaacacttatctcccgttggggacatatcctgaaaggggaacggaaacaattgctggctgccggagccggtgcgggcttgtctgccgcttttgccgctccgttgtcttcttctttgctggtaatagaatccatcgagcgttttgatgcgcctaaaaccgccattactaccttgttggccggcgtggtagccggaggagtggctagttggatgttccccacgactccttatcatctgattagtgcggtcgttcccggtttatcttttatccgtcaggcagagctttatattatctttgccgcccttatggctgtcattgcaaagttttattcgctcatcgttcctttctttcaagaaaggatacctgccatgaaactctccattcctgtcaagatgttgtatttattgatcatagcttatgccatatcgttaacagagacgaatctgacaggtggcggagagcagtttttgatgatgcagggaatgaatggaactcatgatatccggtggcttactatcatgatgcttattcattttgtttttacgctgttttctctttcttcgggtttgccgggaggaagtttcattcctaccttggttacgggaggattattgggacaaatcttcgggttggtattggtacagcgcggatggatagggtatgagaatgtgagttatatgatgctgatcgggatggtggcttttttggtggctgtggtgcgtacccctttgactgccattgtcctgataacggagattaccggtcatttcgaggtgttctatccttccatcgtggtaggtgggttgacttattatttcaccgaattgttacagataaaaccttacaatgtattgctgtatgacaggatgttccgtagccataatccggagtcttccgaagaggctggtgcccgctatcatctttttgtcgagataatggatgggtcttattttgacggaaaggaagtggatacattggctttacctaatcattgtatcattcgtagtatacatcggaatcgtaaaaacttacttcctcaggggcaaaccctggttcccggtgatcaagtggagatagaaatggatgcgcaggatatagaaaaattatacgaaccgttggtcagtatggcaaatatctattaaaagatgagtctaaaaaagcccccgttaaaggacgagggcaacctaaatgttttcacaacggaataatccttattgtgacttgcttcaaattagtattgcaaaactatgaaataaatatgtaaaggacaagtgattattagaataatttgataactttgaaaagttttgataaaatagttgtcttatgaaaaatatagtgggtcttgatttgggtaccaatagcataggttgggcagtagtaaatggaagtgtcaatgacgatggaagtgaacaattggttaagatacaagcttctggaagtcgcatcatacctatggatgcagctatgataggagattttaataaaggtaattccatatctcaaactgctgaaagaaccagattgcgtggagttcgtcgtttaagcgaacgatatctgcttcgcagagaacggttgcatagaattcttgatattttaggatttttgccatttcattttgctcaagatttagataggcatggtaagatagttaagggcaaggaacctaaattggcttggcgtaagaatgaagctggtcagtttgaatttatattccaagattcatttaaggaaatgctggaggattttaagctaaatcatccgaatctgataacagatgataaaaaagtaccttatgattggactatctactatctccgtaaaaagggattgacttctaaaatttcaaaagaagaattggcgtggatattattgaattttaatcaaaagcgtggatattatcaattacgtggtgaggaagagaaaaaaatgataatgttatgattattaattcaaaagtgattgatgttgttaaggcagagaaagataagaaatatgaaaaatattggtataatgtactattggagaatggtttattgtatcgagctgcattttataatgatatttctttttggaaaggacatactaaggaatttgttttaaaaactattaaattaaagagtgggggtacaaaacaggaattatcttttatccatcttttgatgaaatagaaaagatggagaaaaagcaaaaagataaaatgtacttcaaaataaaattgaaaacagaagcggatattgatcaggctcataagactgtaggtacctatatttatgatacgcttttaggaaatcctagtcagaaaattcgtggaagattggtgagaaccattgagcgtaaatattataaggaagagttgaaactgattttggataaacagaaggaattccatccggaattgcaagatagagcattgtatgctgcttgtgttgaagaactatatacaataaatgaagcacatcggaataatattggtaatcgggattttacttatttgtttttagaggatatactcttttatcagcgtcctcttaaaagcaaaaaatcattaatagacaattgtccttatgaggagaatcagggtcttgataaggaaacgggagagataaaatcttttcctgtaaaatgtattgctaaatcacatccgttgtttcaagaattccgcttgtggcaatttataataaatctgcgtatttataggaaagacctggcacaagatgtggatgttacaaatgagttattgaagacagaagaagattatgttgctttatttgactggttgaatggtaaaaaagaaattgatcaaaaggcttttttgaaatatccggtttttggactgaaaaaagagatagagaattatcgttggaattatgtgcaagacaaaccttatccatgtaatgaaacccgttcattgatgttggcgaggctggagaaatgtgatatttctattgaattcctgacaaaagagaatgaggaagctttatggcatatattatattcggttgaagacaagaatgaaatagtaaaagctttgcagaaatttgcggataaacatgacctgaatgcttcttttgttgatgtgtttcagaaattcccaccttttaagaatgaatatggttcctattcggcaaaagcaattaaaaaattattgcctttaatgcgtatgggaaaatattggagtgagaattcaatagataaaggaacgcgtgaacggattgataagataataacaggagaatatgatgagaaaatagaaaatagagtgagggagaaagcaattcatcttgctgatgtttctgatttcaaaggtttgcctctttggttagtgtgttacattgtttatggtcgtcactctgaagcaaaagaaataacccagtggaaatctcctgctgatattgattcgtatttaaaatcttttaagcaacattcattgcgtaatccaattgttgagcagattattattgaaacactacgtgttgttcgtgatatttggaaacaagtgggaaatattgatgaaatacatgtggagttggggcgtgagatgaagaatccggctgacaagcggaagaaaatgacacagcaaatgtctgaaaatgagaataccaacttgcgtatcaaatatttgctcacggaatttttgaatcctgaatatgaggttgaaaatgttcgtccttattcgccaagtcagcaggatattttgcgtatttatgaagagggtgttttaaatagtgtttccgatttaccggaggaaatatcggatatattgaaaaagtttacagaaacagacttgaagaagggtccttcaaggtcagaaattttgcgttacaagctttggctggaacagaagtatcgttctccttataccggtgaagtgattccattaggtaagttgtttacgcctgcatacgaaatagagcatgttattccccaatcatgttattttgatgattcttttagtaacaaggtgatttgtgaagcggaagtcaataagcttaaaagcaatttattgggacatgagtttatagtgaagcatcatggggagatagtggaacttccttttggaaaaaaagtaaggatcttcactgtggatgaatatgagcaatttgtgaaagataactattcgcgtactcgtagtaaaatgaaaaaacttttgatggatgatattccggaggagtttgttactcgtcagctgaatgatagtaggtacatcagcaaagttgtaaagtcccttctttccaacatcgttagagaaaaaggagaggaagaagcaatttcaaagaatgtaattccttgtaccggaggagttacggatcgtttgaagaaagattggggaataaatgaggtttggaataagattatacttcctcgttttcaacgactcaatgagttgaccggcacaaataaatttacaactaaaaatgttgggattcaagaaattccgacaatgcctttggaattgcaaaaaggttttaataagaaaagaatagatcatcgtcaccatgcaatggatgccataataatagcgtgtgcaaataggaatattattaattatttaaataatgagtcggcaacagctaaggctgaattatcccgatatgatttgcagaaaatgctgtgtgataaagctaagactgataataacggtaactataaatgggtgatcagaaaaccgtgggcatcgtttacacaggatacatatttggctttggaaaatataatagtcagttttaagcaaaatttgcgtgttataaataaagctaccaatcgcttcttgcattataatgaagaaggcaaaaagatctttgtgaaacagggaaaaggggacaactgggctatacgtaaatccatgcataaagatacggtatttggagaagttaatttgcgtaggataaagactgtagctttaaatgaagcgatgaaaaatcctcaaagcatcgttgtgaaagacttcaagagaaaattattggaactttggaatttaggatttgacgcgaagagaataaagaagtactttgaagataatagagaaacttggagtgatataaatctgtctaaaatagaggtttactattttagtaaagatactaaagatcgattctttgctactagaaaaccgctggatactagttttgatagaaagaaaatagaaaataatattactgatacgggtatccaaaaaatattgttacgtcatttggaactgaaagataataatccggatattgctttttcgccggatggtattgatgaaatgaatcgtaatattattcagctgaataatggaaagtatcatcagcctatcattaaaattcgttggtatgaacaggctgataagtttgcagtaggtcaaacaggtaataaattttctaaatttgtagaggctgcgaaaggaacaaatttattttttgctgtatacgagtcgaatattctagataaaaagacgaatactataataaagaaaagaaattatgctaccattccactgaatgttgcaattgaacggcaaaaacaaggtttacctgttgcaccggaagatgagaatggtaatgaccctatttttgtattgtcacctaatgatttggtttatcttcctactgatgatgaattagctaatggtattattgcccagcctttggataggggaaggatttataagatggtaagttgtacgggaaatgaaggacattttatacctgcgagaatagcgaatcctattttacaaacaatagaattaggtagtaataataaggcgcaaaaggcatggacagatgaaatgataaaagaaatatgtatgcctataaaagttgatcgtttaggaaatgtcttagaatcaagtagttcatataaaaaataatatattcttattttatggaagaaaacaaaggacaaattcttttatatcaaacggtagatggtgagtcaagaattgaagtaacactatgcaatgatacagtttggctgacattagatcaaatggcagaattatttcaacgggacaaatcaacgatttcacgccatataaagaatgtttttgagagtggggaattacaggaaaattcagttgttgcattttttgcaacaactgcttctgatggtaaaatatatcaagtggcttattataatttggatatgattataagcataggctatcgggttaaatcttaccgtggtgtgcagtttcgaatatgggcaatacaaatactaaaagagtatttagtaaagggatttgtaatgaacgatgaactgttgaagcgtgcaggtggtggaaattattttgatgagttattatcacgcatacgtgatattcgttcctcagaaaagatattctatcgtaaaattcttgaaatttatgctttgagcatagattatgacccaagtactgagtctactcgattgttttttgccacggttcaaaataaaatgcatttttcggtacatggacatacggctgctgaggttatttacggtcgtgcagatgcagggaaagattttatgggattaactaattggacaggagcagtgccaaagcggaatgatatagaatatgctaagaattatttgacagatgatgagttggatacattaaatcgtattgtaagtttgtatcttgactttgcagaattgcaggctaaaagtcatacccctatgtatatgaaagactggattcaaaaattggatgattttcttagactgtcaggaaaagaattgttacaacatgctggtactatttcggctgaattagcaaagaaaaaagcaaatcttgaatatgatgaatttaagaaacgcattagtaatcagttatctcctgtagaaatagatttcattgaaaatttcgaaaaagagcagaagaaattgcgaggtaagtaatatattaacctttaaaatatgatactatgataaagaaaacactttattttggtaatccggcttatttgtcattacgaaataaccaattagtcataaaacttccggaagttgagaaaagtgattcattgccggatatctttaaagaacaatcggaaataacgaagccgattgaagatataggtgtcgtagtactagatcataagcaaattactattacttccggtgtattagaatctctattagagaataattgtgccgttatcacttgtgatagtaaaagtatgccagtgggtttaatgctccctttgtatggaaatacaactcagaatgagcgtttccgtcaacagttggatgcatcattgccattgaaaaagcaactttggcagcaaacaattaaggcaaaaatagataatcaagcatctgtattgagagtttgtgtaggtgaagaaatgaaatgtatgcgaatttgggcgaatgaagtgaagagtggtgatccagagaatttggaagcacgtgcggctgcttttttttggaaaaatttatttgcagatattattggctttactcgtgacagagaagggatttctcctaataatttattgaattatggttatgctatacttcgtgctatcgttgctcgtgctttagtggcaagtgggttgcttcctaccttagggatccatcatcataatcgttataatgcatattgtttagctgacgatgtgatggagccatatcgaccttatgttgatgaattagtatttggtttagtgaaattgtatggtgcaaatttggaattaacaaaagaaataaaatcacgtttgcttgttattcccacattggatgtacgtattaatggtaaacgtagtccgttgatggtggctgtcgctcagactacagcttctctatataaatgtttttgtggagaaattcgtcgtattagttatcccgaacgataatggaccgttttagtgaatatcggattatgtgggtactagtattatttgatttgccaacggaaactaagaaggacaagaaagcttatactgattttagaaaaaatctacaaaaggatggctttacaatgtttcagttttcaatttacgtccgtcattgtgctagtagcgagaatgcgactgttcatataaatagagttaaatcttttttgcctgaatatggacaagtgggaataatgtgtatcactgataaacaatttgctgctattgaacttttttatggaaagaaactacaaggtgtaactactccaggacagcaattggaattattttaaaaataagaaatcccgtctgaaacgggatttcttattagataacaactttgtttttaattcctgaatatgtgtgtaactaattggtaattagtttgtaacatatattctgttgtttccaatggttcaaagatactaatttgaaagcaaatcacaaccgggaaagctcacgcttgttttcttcaagtgttgtttccaatggttcaaagatactaatttgaaagcaaatcacaacacggtcaaagacgaatctcattgtcggatagttgtttccaatggttcaaag

SEQ ID NO: 1351 - DNA, 16233 bp, synthetic construct
  misc_feature 1..16233: note = Synthetic
  source 1..16233: mol_type = other DNA
tattaacaccgtatacacctgtagtttcaacatctgcatggtaccaagtttcttttggaacttcaactgattgagcttgtgcaaaaccaaatgaaaaagcaaatgaaagagctaaaactaattttttcattctatgttttttttataaattttttaaatagatagccgcttgtggcccttcactaaataagatgtctaaaatacttaaacctggagtgaaaccaaatttttcgtcaaatacttgtacatattcaggaaaatgaacattggcctctttcttcgcattgtatttatttctgaaatcgaatgcttcatcaattagttgataagattctgtttttgttacaaccgtatcaacttttaattttgataaaataaattcgacagttttgatatttaaatctaataaatatttctcttgtttttcgtaaaatgatgcaatttcgtcttcataatattcaaaatatggagaactctgataggcagatcttaatgatttgaaatgttctttttgccaattatgatcgtaggatagtttgatgtctttcatgcgacgatttccgtcgtgtactaaaggaattgttaatgataatttaccattagctcctaaaatatttgtacgacttctataggtttgtttctgaaagttttcgcaaacttctaaatcaatagtttcactttttactatatcagcaaagtaatcaatcggtccaaagtaaaaagctggaaatgtatttttcatttcaattattaatcttaatatttatttttttgtttttcttttcttgctttccagatatcatatccaatccatccaataaaagcaattaacacataaattccgtatgaagttttgtttggattatcgttgttgatagatgtaaaccatctgtcccaaataaatttcttaggagcttgttcaaataaaccattcatatttgcccaaattaaaattggacgtcctacgatatgatcttctggtacatatccaaagaaacgcgcatctaatgattggtttctgttgtcaccgaccataaagtaatagttttgtttgatttcgtatttatcaactttttgatcatttacgaaaatatcaaacttaccatttgctgagtctacgcgtaatgtattttgttcgtatttacgaattacattaatatattgtggtaaagtttctttgttaatatctacaatatcacctttcttaggaatgtataacttaccatattgatcttcattccagtttttatttacagggaaaatagtgtaagtactatcaatttggtttccgtaacgaatacgttctgttttttctcctttagcttttaaagctggttcaacactgataatgttagagttatttttgaatgcagttacgtgcgcttcagttaaagctgggaaaccgtatacaaaagtgcttccttcttggtaagatgttccttggtaatctgttgggattaaaccaaaatcttggtataaaacagctggagataattgaattttagatacaactttataagaatgttgaactaaagcatctaatttaggttggaatttttttccgtccacgtataaaattccgttgctaatttctacagtttcacctggcataccaactaaacgttttacataggcatctttacgatcaattgcagagtaaaccgaatcagtagggtagttgaaaacaacaatgtcattcgattttaaatctctccaacctggtaaacgcatgtaaggtaaacgcgctttgtctacgaatgcatcacgattgataaattctgaaaaaggaattcctaatggagtagaaggtacacgagcaccaaaacttactttttctacaaataaagcatcaccaattttaattgtattttccatagatccagtaggtacaatcattggttgtataaaccagttatgtactaaagtagctaaaactaaggcgaataataaagatgaaacgatagtagaagtacgtttttcagcacctaaatattttgggttatctgaatagttaattgcgaaaatgtataaacctaaagttaaaaccatgatgattttatcctttaattctatttttccgtacgaatcagctaaatctacatacattactaaccaaaaaattggtccaacgataggtaggtagaataaaataatccaccattttggtctatcaataatttgtagtccgttccatatatttaaaaatggaacaaatgctgaccatgcaggttttccagcatttttaaataatttccatgtaccagctccaaaaaggatgttgtatagtacaaaaccaataatccaataaatgattagtgacataagtatttttattagtagttgttaattcagttctaaaacgtctttcatagaaaagacaccttttttatctgcaatccattctgctgcaataacagcacctaaagcaaatcctttacgagaatgtgctgtatgtgaaatttcaatcgtatcaacttcacttgtgtattgtacgatatgtgttccaggaacattttcgatacgttttgcttcaatcggaataatagattcaccttgttcttccatagaccaattattgtaagatgtgttatcaataattccttcagcaattgtaatagcagttcctgatggtgcgtctaatttttgtgtgtgatgaatttcttctaaattgatattgtattcagctctgtatttattcatcatacgagctaattgttgatttaattcaaaaaataaattaactcctaaactaaagttagatgcatataaaaaagcagtattgttagctaaagttaattgatttacttcttcttgttgatctaaccaacctgttgttccacaaatagttggtgtgtttgattcaagtaaaactttaagattgtcgtatgcgtattcaggacgagagaattcaatcgctacgtctatatcttttaattcttcaggtgttggagtatgagaaacttttaaaacaacttcatgtcctctttctactacaatttcttcaatggctttacccattttaccatatccaattaatccaattttcataatgtaattaatttcttaaaatttaaaatttaagtttaaacccataacaggttgataagtatattgatcttgaatgattactggtttccaagtaaaatcaggatcattttttatactaaataagtgtgcatcaacagtagcatcaacaatgtttaatacatatgctaaaatagttaatgccatactgtaatcacgatttcttttgtattcgtcttgataaacagctaattgttctgcatttaaaatgccagaatattcatgttgtctaccttctaattctgcgatatatgcagatctaaatttgttttgtaaaccattgtaatatgctgtaaatccaatacctgttccaactaaacctaacgcaattggtgctttccaccattttttattatacaattgtccagctcctggtaatactgctgagtataatgaggctttgattggacttttgtcctttaacgtaaaattgttaatcgagtcagtttgtactgtatctacgacgatttcatccgtaataatttgttgtccgtacccaaattgagataggaaaataaatgataggattaaaattttagttttcatttaaaaaacttcttaagcgttcaaattcttcatctgaagcaaaatcgataatgattttaccttttccattcttagcacgttgaattttaacacctgtatttaaacgttgttggaaacgatccatcgcagtttggtagtgttcaggtaattcaactttttccttcactttatcttcaggttgtaaaccttcttttactgctttgattaatttttcagtatcacgaactgataaattatcacgaacaattctttcataaatttcgaattgtttatcagcatcatcaattgccattaatgcacgtccatgtcccatagaaatcataccatcacgaattccagtttggataataggatcaagttttaataaacgtaaatagtttgtgatagaagagcgatctttcccaacacgcttacttaattcttcttgcgttaatttaacctcatcgattaattgttggtaagaaagagcaatttctattgcatctaaatcctggcgctgaatattttcaactaatgccatttctaacatttcctggtcattcgctaaacgaacgtaagcaggaattgttcttttattggctattgttgaagcacgaaaacgacgttcaccagaaattaattcataagtgccgtcgtttttctttctaactgtaataggctgaataacgcctaaagcttggatagaagtaactaaatcttctaaatttcttttatcaaaattagtccttggttgccaaggatttgctgtaatcttatttaaatcaatttcgataatgtttcctactaatttcttagcaccatcatcagaagctgaatgcacagttggttcatcttttaataaggctgataatcctctaccaagacgattattcttattagattttgccatattatacggtatcgttgttattaattaaaaattctcgagctaaatttaagtaattttcagctcctttacttcctgcatcatattgtataattgtttctccaaaacttggcgcttcagataaacgtacattacgagcaattatcgttttgaaaaccatttgaggaaagtgattacttacttcatctaaaacctgattagataaacgtaaacgagaatcgtacatcgttaataaaagaccttcaatatctaagtctttattatgatgttgttgaattccttttacggtatttaataatttacctaaaccttctaatgcaaaatattcacattgtataggtataataacagaatctgcagcagttaaggcatttaatgtaattaaacctaaagaaggagcacagtcaataacgatataatcgtaattatctttgatttctgctaaagcagttttcaacatatattcacgattttcgtaatcaacaatttctatctcagcagcaactaaatctaaatgagctggcattaagtctaaatttggagactcagtttcaaaaattgcttcactcgcagcaatttgattttctaaaacttcgtatgtaccacattcaatggtttccaaatcgaaacccaatccagatgttgcatttgcttgtggatcggcgtcaattaataatacttttttctctaatactcctaatgaagctgctaaattaacagaagtcgtagttttacctacaccacctttttggttggctactgcaattattttccccatattttacattcaaaatgatttcaaaaatacaataattcagttatcgaaaccattagataaacagaaatttataaacagatttaaagaaatattatctgtatagttatttaagtgttggttttcaattcataaattgtaagtgaaagtaaataaattttacgattaatttatcattcatactcttttaaattctatatatttgcaaaagcaaaagttttttaattattaatgggtgttgaccttttattcgagagaactgaggtagggaagaacctaagttttctggcttttcaaaaaagtagcggattaaaaaaaatctcttctcaaaatttacttcatcaagtatattatgctatacgtgtttaatggtaatttctatagagaaatctattagaaaagcatacttattaccatttttttacacgtaacattttttaaatattaaagcataatgaaaactaaatatatcgacttaatcactcaatcatttgatttcccacaagaagaattcacattagacggagagtatttaaaattccacggaatcgacttaatgaaattagttgaggaacatggaacacctttaaagtttacttatttgcctaagatttctcagaacattcagaaagcaaaaggttggtttgaaaaagctcgtgaagaattaaactacgaaggaagttacaactattgttattgtacaaaaagttctcactttaaacatatcgttaaagaagcattgaagaatgatatccatatcgaaacttcatcagcttatgatattaatattgttgagagtttattggaagaaggattaatgaaccatgaccaatatgtggtttgtaatggttttaaacgtgaagaatatgtagagaatattgcacgtttagttaataacggacaccgtaaaacaattacagtaattgataattacgaagaagtagatttattttctgaagcaattgaaggcgatttcgaaatcggaattcgtattgcttctgaggaggaaccaaaattcgaattctatacttctcgtttaggaattgggtataaagatatcgttcctttttatcaaaatatggtaaagccaaatgatcgcatcaaattaaagatgttacatttctttatcaatacaggtattaaagacaactcttattattggaatgaattaactaaatgtttacgtgtatatgtaaacttaaagaaagtttgtccagaattagatagtttaaatatcggtggtggattcccaatcaaatcatcattaacttttgattatgattacgaatacatggccaaagagattttatctcaaattcaatcaatttgtgaagaagaagggattcctgttcctaatatctttacagagtttggatctttcacagttggcgaatctggaggtgtggtttacaaaattttataccaaaagaaacaaaacgaccgtgaatattgggatatgattgattcttctttcatgacaacattaccagatgcttgggcaatttctaagcgttttattatgttgccagtaaaccgttggtacgataaatacgaacgtgttttattaggaggattaacttgtgattctgatgattattacaactcagagcaacatacaaatgccatctatttgcctaaatacgattcggcaaaaccattgtacattggtttctttaatacaggagcttaccaagataatattggtggttttggtggtgtacatcactgtttaattccacaaccaaaatatgtcttaatcgatgaaaactacgagactaaagtttattcggaagaacaaggacatgaaggaattttaaaaacattaggttatacagttaaataaataaaaaaaataataaaatgagtaaagggccaatcagtcaatttattgagcataactaccgtcactttaatgctgcggctttagttgatgctgctaaaggttatgaagcacacttagatgcaggagggaaaatgttaatctctttaggaggtgcaatgtctactgcagagttaggtgtatcattagctgaaatgattcgtcaagataaagttcatttcatttcttgtacgggtgcaaacttagaagaagatgtaatgaatttagttgcacactctcactacaagagaattcctaactatagagatttaactccagagcaagagcgtgaattattagatcaacacttcaaccgtgtgacagatacttgtatcccagaagaagaagcattccgtcgtttacaacaacacttagaagatgtatggcacgctgctgaagctaaaggtgaaagatatttaccacacgaatacttataccaagtagtaaattctggagtattagagcaatactacgaaattgatcctaaagattcttggattgtagctgctgcagagaaaaatttaccaatcgtttgtccaggatgggaagattctacaacaggaaacatcttcgcttcaaacgtaattaaaggaaacttaaaagctgatacagtaaaatcaggtattgagtacatgatttacttaacagagtggtaccgtgcaaattcagacggacacggagttggtttcttccaaattgctggtggtatctctggagatttcccaatttgtgttgttccaatgatgtatcaagatttagagtggactgatgttcctttctggtcttacttctgtcagatttctgactctacaacatcttacggttcttattcaggagctgttccaaatgagaaaattacttggggtaaattagatgttgatacacctaaattcatgatcgaatctgatgctacaattgttgcacctttagtattcgcttacattttaggtcaataatagaacattctattttaatatatttaaaagcggttactttttgtaatcgctttttttatataaattcatattaaattctttagatagaagaaaagagtataaaaatcctttagatgaaacaaaaactaaacgtaaatcaaatccctgctttaaaacaagaaattcttgatttacccgaaaaagaaaaaaatcaattgctaattcgattgattaataaagatcaggtattgatagagcagcttcactttaaattattagaagatgaatatgatttaattaaacgttttgaagatttaaaagctgaaattgaaactacattaaaagataattttgattcaattattaattcaaaatatacagataaaggaaagttatacttgcgtatgattcgtaatttatcatcaaggattaatcattatgccaaggttacaaaagatgtaaatggcgaattgcgtttgcgtacaattttgttaatagattcttctgctaaatataaatcaattcaaaatgaagattcagttattggttataaagcaagattgtatcaagtatctaaaattaaaacgatgatcactctttttggtaaattacatgaagatttaaaatatgattattcggatgatttttatgaatcgattgaagatacaatagtgtctaatctacaaatagaaatcattcaatctaaactaaaatataaaacgctttctaacgaataagtctataataaagggaaaagttatagatttactttatctttgtgactttaaagaataaaatggcagatatattaaatttaggtgaagagcaaatccgtattagtcaaaaagtttacggacaaatcgaatatactattacaaaaggtagaacttggaaaatgcgttttaaaggtgattaccaagtaggagagtttaaagatttagtagatcttgggcctgtgattttagcaattgctgaaaaaggaatattcttttcttgtgataacggaaacagttgggaaagacgctttaagccgaatgcatttacaggagaatttattaaattcaattttaatggaactcatttatctgcagaaacaactcgtggaattcgttattctccagatgaaggtcgtcgttgggagaaaaatccaagataatttatgaaaaaaatcttctttataatttcgcttattagtagtttttctttagctcaggtttctcaacaagaatttgagttaataaaaacatataagcaaaatttggtagataaagatatgaatcaaacaattcagtctttaaaaaacttaattgactattataaaggagaaacgcaatatcatatatcattaggctacatttatcagttacaacgtaatcgtaagttagctaaacaacatttagaaaaggggcgtacctatgtcatggatcagttaattaattcaacaaaactgtctatgtctaataaacaagctatggatcatgttgttgccttgtgttttgcaggttttgaaaaagattgcgcagaaatgtttatgttgattgaagcccgattcgtagaagatgaatattatatgacttatgattttgatactattaaaaagttggccgagaaacaacgaaacagtatgaaagaatattttacaacaaaataataaaaaggattaccaaacggtaatcctttttttattgatgttgatttttctaaataaaaaagccccgaagatagtcgaggcgctaaatgttttcacaacggaataatccttattgtgaattcctttcaattccaaatatataaaatattatttaatctaaaagattaataaacaatattctataatttatttttttactatattgtattatttattttatcctaattaactcaactaacaatatatgaaaaaaatattaggtcttgatcttggtactaactctattgggtgggctttgattgaccaaaactttgaaagtaaagaaggacaaatccttggaatgggatcacgtattattccaatgtctcaagatgttttaggtgattttggaaagggaaattcaatttcacaaacttctgaacgtacaggttatagaggcgttcgtagattaagagaacgccatttattacgtagagaacgtttgcatcgtgtattacatattctaggctttcttcccaaacattatgaggattccatagattttacaaagagatttggaaagtttaaggcagaaactgaacctaaactatcatttgataaagaatttctttttaaagattcttttttagaaatgatgaaagattttaagttaaatcaacctgattttttgattgataaaaatgatgatgcttgtcttgtaccttatgattggacaatttattatctacgaaaaaaagcattaactgaaaaaatacataaagaagaattagcttggttgattttgaattttaatcaaaaacgtggttattatcagttaagaggtgaagaagaagatgagaatccaaacaaaaaaatagagtttcattccttaaaagttgtggaagttgtagctgatgcagaagttaataaaaaaggcgagacttggtattctgttcatttagaaaatgactggatttacagacgctcaagcaaaatttcgctggatgattggaaagataaaacacgtgattttattgtaacaactgatattaatgaagatggatctgataaattagataaagaagggcaagttaaacgtagttttcgcgctccaagtgcagatgattggactttattaaagaaaaagacagaacaagatattactcaaactaaaaaaacggttggttcttatatctacgataatttactcctaaatccaaaacaaaaaattaaaggtaaacttgttcgtacaattgagcgtaagttttataaagaagaattagagctaattttaagaaaacaacaagaataccatacagaattgcaaagcaaacaacttttgcatgattgtgttcgtgaattgtataaaaataatgaacagcatcagcaatcattagaagctaaagattttgttcatttatttttgaatgatattattttttatcaacgacctttaaaaagccaaaagtcttcaatttctaattgcacattagaatctagacaatctaaagatggagttgtgtttcctatcaaagtaatatcaaaatcaaatccatattatcaagaatttcgtttgctacaatggttgcagaatttagaaatttatactactgatgatgacactagagtaactactaattttatcacttctttagaagataaagaagctttattaaatttcttaaattctaaaaaagaagttgagcaaaaacatgttattgagtttctaataaaacataaaaacggaggaaaaaaacttgcaaaaggtgaaattgaaaaataccgttggaactacgttcaggataaaaaatatccaatgaacgaaactcgttatttaattcaatcaaaactgtataaagttgctgacattcctattgattttttaactactgaaagcgaattctcattatggcatatcatttattctgttaatgataaaatagaatatgaaaaagcattaaaatcatttgctaataaacataatttagacgttgaatcattcgttgaatccttcaagaaatttccacctttcaaatctgattacggaaatttttctgaaaaggctattaagaagttgttaccattaatgcgatttggaaaaaattggaattacgaaacgattttaactacttctaaagagcgaattgataaaattattacaggagaatatgatgaagcaattaaaaatagaattcgagaaaaagcagctcaatttaatttaaataaagaagaaaattttcaaaacttgccactttggttaagtcaatatattgtttacggtcgacattcagaagctgcggttgtaggaaaatggaattcgatttctgatttagagaattacctaaaagaatttaagcaacattctttacgtaatccaattgtagagcaagttgtaactgaaactttgcgcgtggtaaaagatatttggcaacaatacggcaatggtgctaaagatttctttgatgaaattcatatcgaattaggtcgagaaatgaaaaacacagccgatgagcgtaaacgtttatcatcaatcgtaacggataatgaaaataccaatcttagaattaaagcattattagttgaattagctttagataattctgtagaaaatgttcgtccgtattcgcctgttcaacaagatattttaaaaatttatgaagaaggggttttaaattctgtttcagaaattgaagatgatattttaaaaattagcaaatcggctcaaccatccagttccgatttaaaacgttacaaattgtggttagaacagaaatatcagtcgccttatacaggacaaattattcctttgaataagttgtttacttacgaatacgaaattgaacacatcattcctcaaagtagatattttgatgatagtatgagtaataaagtgatttgtgaagcctcggtaaatcaattaaaaggcaatcaaattggtttggcttttattaaaaatcatcatggagaaaaagttaatttaggaaatgggaaagtagttcaaatttttgaagttgaagcttacgaaaattttgtaaaacgtgtttacgataaaaataggggaaaacgtaataaacttttagctgaagatatccctgaaaaaatgattgagcgtcaactgaatgatacacgatacattagtaaatatatttctcaattattatctaatattgttagagatgacaagccagattccaaagatgatggtttaaattcaattaatattgttcctggaaatggtaaaattacaactcgtttaaaacaagattggggattgaatgacgtttggaatggtttgattctaccgcgttttgaacgaatgaaccagttgactaattctactgattttacatctgttaatactcatggtaaattgataccaaccgtaccgatagatttatccaaaggatttaataaaaagagaatagaccatcgtcatcatgcgttagatgctttagtaattgcatgtgcaacaaaagatcacattaatttattaaacaacgaatcggcattacctaaaaagggaagaagcaaagaagataaaaaatcttatcgtttcgatttgcaaaataaacttcgaaacaaagaatcctatattgatccacaaacaggaaaatctaaagagaagtttgctgattttaaaaagccatggaatactttaacagaagatagtagatccgctttaaagaaaattgtagtcagctttaaacaaaatacacgagtaattaataaagcaaccaactattacgaaagctataaagatgaaaatggtaatttacgtttaagtaaagatggaaaacctaaaaaggattttgtagaacaaaaaggtacaaattgggcagttagaaaagcattgcataaagaaactgtttcaggacaagtacgtttagatagagttaaagtagccaaaggtaaaatattaaccgcaactcgtaaatcattagatagttcgtttaatgaaaaaactataagttctataactgatactggtattcagaaaatattattgaattttttaaaagcaaaaggtaataattctgaagttgcattttctccagaaggaattgaagagatgaataaagatatcaaactatataatgaaggaaaaaatcatcaaccaattcttaaagtccgtgtatttgaacaaggttcaaagtttgctttaggggaaactggtaataaaacacaaaagtttgtagaagcagcaaaaggtaccaatttattctttggtatttatcaagataaaacaggtaaacgaagctatgatacaatccctttgaatcttgtaatagaaaggcaaaagcaaggtctttcaccagtaccagaaaccaatgaaaaaggacatgctttattgttttatttatcaccgaatgatttggtttctattccgaatgagaataatgaaattgagagtgaaaatgtatataaaatggtaagttctactggaagcgagtgtcatttcataaaagcaaatatttcaacattaattaaaaattatgacgctaaatccaaaataggtgaacttggaagtttaaataaattagaagttacgattgattcaaaatacagaataaaagaagtttgtgtaaaattaaaattagatcgtttaggaaatataacaaaagtttaatttatgctaaaacgtaccatttatattggtactcctacttacctaaaaataaaagataatcaactaaaaatagaagattctttaactaaagaaattaaaggatcagtacctattgaagatatggggtttttggtattagataactttcaaattacaataagtcatcaattgattttggcgttacaacaaaataatgtcgcaattattagttgtgatgagagtcatttaccattaggattaatgctaccgatgaatggtcatgttgtacatagtgaacgattaaaatatcaaattaattgtagtgaaccattacgaaagcaattgtggaaacaaacggtggaagttaagatttttcaacaaaaacaattacttataaaattaggttataattcagaacccatgcaagggtatttgaatcaagtaaaatcgggcgatactactaatatggaaggtatagctgcgcaatattattggaaacagttatttgataattttacaagggaacgtaatggagatgcacctaataattatttaaattttggatatgctattttgcgcagtatggtggcaagagctttggtaagttctggtttgaatccaacgataggaatttttcatcgaaataaatataatccttattgtttggcagatgatataatggagccttatcgaccttatgtagatgaattggttttagaatggatgaataaaccatttacgccaacggaaatgtcaaaagaggcaaaaagtcatttattacaaatagctacaaaagatgttgtaattgatgggttaaaaagaccgttgttggttgctttaagtagtacaacaagttctttatataaatgtttaactggagagcaacgaataattcgttacccagaattacaatgagttttagtcgttataatgcatatcgaattatgtgggttttagttttttttgatttacctactgaaacaaagaaacaacgcagtcaagcaactaaatttagaaattatttgttggatgatggatttgtaatgtttcagttttcaatttatttacgccattgtccaagcaaagaaaatgcggatgtccatataaatcgtgtgaaaaataaattacccgaatatggtaaagtaggtattctgagcataacagataaacaatttgaattgatggaaatatttttttctcaaaaagaaactgatgtgcctaaagggccacaacaattagaattattttaaaataatagaaacaaaaaaaccgatagaattattaaagtgttctatcggtttttaaatttttacaatcctaatttgaacgctcaatacctttattttaaaggtctcatcaaagatgaggttgtaattgctttagtaaaaataccaaattgaaaggaattcacaacggtttttcacccagactcaagccctttaaagttgtaattgctttagtaaaaataccaaattgaaaggaattcacaacgggatcgacctccccaagttacgagttaaggttgtaattgctttagtaaaaataccaaattgaaaggaattcacaacgagggtcaatctgttgtatcaatcgttaaggttgtaattgctttagtaaaaataccaaattgaaaggaattcacaactaacttcatttcgtttcaataacgttaatagttgtaattgctttagtaaaaataccaaattgaaaggaattcacaacagtcgataagcgtctgaactgtattacggtgttgtaattgctttagtaaaaataccaaattgaaaggaattcacaactagcctgtatatttcatacaatcatctctggttgtaattgctttagtaaaaataccaaattgaaaggaattcacaactagaaaccctaattat

SEQ ID NO: 1352 - DNA, 16212 bp, synthetic construct
  source 1..16212: mol_type = other DNA
  misc_feature 1..16212: note = Synthetic
gtcctgaaagaattaattgatacccgcgatgttattgtcaattttttgaaggacctgcagcaaagcatagttggaaaaaccgggatctttgagtctcaggatgtagatgtatttcccgccgatttcaccagtgtgctcagcactattagggaggaacttacctcctttctcaccaatatttcagatatcctgttaaagcttctggtggtacacgtatatctgtttttactattactaaaccgcgataagctggtagagtttcttttgatgtacacttccgaaggaaaaaaggatcaaaccttaaaaatcattcaaaaaacccgaaaagtttcatatcactacttttgggggcggcttaaggttatgagcttgctggcggtgatgtattttataacctttagtatttatgagctcccgtttaccggcctgttggtactttttgggacgcttataaccgttattccttttataggaccttttataagcgggcttctgcctatcctggttatgtttattttcggggatactgccctggaaataatttccttcgcggtaatcgtcatgatcattcaactcatagaaagttatgttctggaaccgataattattggagaagaagttcagcagagtccgctgtttgtgatcctggccatatttaccggaggcttattatggggtggtgccggacttattttatttgtgcccattttcgctattcttaagatcatattcgacaattctgaacctctgaagcctgtagggtatcttatgggttatgaaaggcacggggctaaagaaggcattctggataaactgaaaagaaagctgtcaaggtagttttctaaaatcttaataggttttttgcctggagcataagtttaaaagccaatattagccttcgcgagattctgggtttgaggttggttttgggttacctgaaattttcgattctgagttctcagattccacaagcttagaaataataagattcttcctataaaaaaaggccgccctgggcgacctttcattctagaaggggcaaaactcttaatctatttttacaaattcgccttcactgttaaattccaactctacatcattagtaagttcaatttcatgggctttcctgtctttctcccaacttttcacctgggaatcgggataattttcctgcagatattgagcaagcttttcaggtagagcctctaatggaagactctcctctcctttactgtcaatttccagggcattaccattttcatcaaaatcaatttcgatgccgttagaaagacgaacttcaaatttttcatcttcccaaactttccattggctattttcttcaacctcggttattaagtccgaagaaaaatattcacttatataattttgggctttctccgggagttttgaattatttgtctgtgcaaatacactcagtgagaaaattgtgaatactgctgttacaattagttttttcataacttgttttttttaaattcctgacaaagtaaagttcaaaaactggaaggaattgggaatggctgaagttggaatcctaaatctttcccaatttcaaatttaggtttgtatctatgaagatccttattatagaagatgaaaaagagatgcgccgcaatatgcgcgaaaccctggaaaaagaacagttcctggtagagactgctgagacttataaagaggcggtgaacagaaccggggtttataattacgaccttatccttctggatatagggcttcccgacgggaatgggctgaagctttttgagcatttaaaaaagaatgggtacacagattcattaattatagtatcggcaaaagactccttagacgatagaataaatggtttaaacctgggggcagacgattaccttccaaaaccttttcatatggccgaactcaatgcccgggtgaaagcggttttgcgccgtaataaattagacggtgcccaggttctggagatcggcaatcttaagatcaatcctgagcggcacctggtgcatattgaagatcaggaactggaactgaaccgaaaggaatttgatgtgcttttttacttatgcaccaataagaaccggctggtaagcaaatcggccctggcagaacatgtttggggcgattatatagatcaggccgataacttcgattttatctattcccaaataaagaatcttcggaaaaaactggcagaagccggggcaacaatcgaaattaaggcggtctatggcataggttataagctggtaatactatgaaattactcaattacaccaccggccatttagccgtaatacttatattcttgctggggatatgggcggttatcttctatttcgagatactggatgagatctatgatagtatggatgacgggctggataaccaaaaaattctcattctcaggaaagcacgtcaggatccatttttattgcaaaaaagtgaatttgaagacggtaattatatcataacccctaccaccgcaaacattagcaaaacttataaagattcttaccgcgataccctgatgtacatggaaaacgaatcggagtacgaaccggtaagactccttgaaagtgttttcaggcaggatggaaactattataagattaaggtagttacctctatggttgaggaagatgatctaagaaaagaactcttcatttccctgttatatttatatgcaggtttgatattaaccatcttattgcttaacagatatttccagaaacgcacctggaaacctttctataaagtggtgaaaaacctggaaaattttaatatcgttaaagattctaacattgaaaaggaagaaaccaatattgaagagtttaagcttttaaataagcaaattgggaggttgctggataagaccgtgcagagttaccgcagccagaaagaattcattgaaaatgcctcccacgaattacaaactcccttagccgtgagcattaataaattagagctgatggcagaaaataatgatctaccggaaaaggctatggaagaactggctgtagtcctaagcagcttagaaaggcttacccgccttaaccggtcgctattattgctgtcccggatagaaaaccggcaatttgataaatcagaagaaatcaactggaacaatcttatcaagcagttcctaatagaatttaaggacctcagcaattttaagaatctgcaaatagagttcgaagaggaagaagaaatcagcaataagagcaacaaggaccttgcgggcttgcttatctctaatcttctcagaaatgcgatattgcactcccctgctgaaagtagaatcgtcatacgcgttaagtccagggaaatacagtttgaaaatcccggtaataaaagtttagatcccactaccatctttcagcgctttaccgggtcgaacaagaaaagttctaccggtttaggcctcgctatcagtaaaactattgcagaggccctggagatccaattgagctatgaattccgacaggataaacatctcttcagggtgaaattttaaacttcccaattctttacagatttccattagatcttagctcaaaaataacaagatgaggtttaatcagagcttattgatagtttttgccatgggtttgatttcctgtgatagcgatgactatccctatgctaatattccttcagtagttttaaataaattcgaaatgcactacccgaaggctcaggaggcagattttaaaaaaaaggataagctttatgaagtttcttttgaaattgaagaggtagactacaaagcagatattgatgaaataggaagtattcgcagagaaaaatacgaaaccgcgatcaatgaatttccaaaagaagttaccggggaattgctaaaaacatatgatacggttaaactgaaaaaacccgaaatactaagaaatgcagatggggtttatttccaggtaaaactggaccggttgttcaaagatgaattgattgtattggataaagaaggtaaaacattacctaatattaattactggaaataaaggtttgagatgaacagaatagtatttggaatcgtaggcattattttcctcatagtgggactcttaacttacaaaatttcgggtgagaatgagggtttaagctttgatgcttacagcatagaggaaaaatgggaattacccgaagaattaaatgagatctccggaattacatggctggggaatgatctgctcgcctgtgttcaggacgaagacgggatagtatttatctataacctgaagagctcccaaatagtagaccgaatagaatttggagaatcgggggattatgaagatataaatctctttaatgaaaaactttatgtgcttagaagtgatggcctggtatttgaaatttccagttataagcaaaacccccaggttcaaaaatatgtcactcccgctaacaaaattagcggcatcaacctcgagggtcttagtgccaatcctgacggaaatattcttttaatggctgttaaggaacgtaaagacgctgatgacagaaaggaggtattttcctttaaacccggctcgaaaaaacagtcttcggaagcatttttcagcataaacctggaagacccaatctttaaggatctaaagggaaggactaaaaaccggtttagtccgggtgcaattgagttgcatccaaaagatggaaaaatctatattctagacggaacacgcccaaaactgctgataacaaattccgcaggaaaagcattaaaacttcttaagctggattccaaagattttcagaatccggaaggtcttagctttagttcagacggcgacatctatatttccaatgaggctgaaggaaaacctgccaatattttaaagatttctatcaacgaaaaataagctgcaataatccccaaatttatcagaatgagtaatatgatttccgggcaagctccgcgtaaaaaaagtaaaatgcccctgtatatttccgcaggaattatctcggccgtattgctaggctattttttcattcccggagtacgggaatttttacaggaagcctgggcggttttaaccagtgatgataatgcccgcattaaagcatgggtttcagattttggatggttcggccccctggtattagtcattgctatgatagtgcaaatgttcttattggtgatacccagcatcgccttaatggtagtctccattttagcctatggtcctgtttggggtagtcttataatcttagccgcagtttttgctgcctctaccgtaggctataccattggaagatttttaggcccggtaatagtacagaagttaattggaagaaaatcagaaaaaaagatcggggattttattgaagattatgggttttgggcggttatcgtcacccggttgaatccgtttttatcaaatgatgccattagtttcgttggaggaatattgagaatgggctattggaagtttattggggctaccctggtgggaatcgctcctcttagcctatttatagcaataataggagaaagcaccagcgaattaaaaacaggtttactttggggttcggtggtgagccttatccttttcttattatacgtttattgggataaacgcaaaagaaaatcctaaagcttcgctatgaataaagttacactcaggttcataatcatctttgtttttttggcaggttttgctgggcaggcgcaggccccgggggaattttattatgaaagtgaatttgatctaagctttccggcaaaaaagaactggagtatagatcttagcttcggaaacaggggcatgctattaagaagagaaaacggcacgaaaacggccggatatcaacatagtcatatagaattcagccagtttaccaattacaatttttccgaagccgctatcattagtttgggattgagataccgattcaaagaaatatttgatgctactgaagccgatgagttccggataattgaacaattagaactggagaacgccaaagcaccattatccctttctcagcgctttaggttggaacagcgtttcaagaaaaaaaccgaacatcggctaaggtatgaactgggattttccaggcctattaaccaggtttggagttttggaatagatacggaattcctctacactatggcaaaacattttaagcccgaggctgaacaaagattttccattggcctggaaaacgaagcctttaaaaacctggaatgggaaataagcctggaataccgactggaaaattatacccgagatcttacccatgagctttttatggtttcgggggttaattttatcttagattagaatccgatttctaaaacaaattgaaggctttggaagccttgcaggctaatcttggagccttcccttagcgatatcaaatgccaggatggataccacaaattaaaattccttagttttataatctaatgattccgtgataattgcgatttcatccaacctaaagattcaatatgcctataaaaaaaggtactaaaagtcagcatgaccacaataattctttgctgaattctaagcggccaaagttcagggaatattatatggaaaaaattcatgtggataagttaagagaagattcagtgccttttgtagagttggaagaaaaggaattaaagaaagtgatgactcagataaaggccaatgcacaaaaagaattttataaagaattaaaaattctgggaatatcaatattaatcactgcagtcattttaatctaccttaatgattatttgaatcagctattttaaagccggtttaagatccagcaagtcccttaaaaaagttgatctataattatctataaaaatgtaaattgagaactcaaaataaattaaaatgaaatttaaactaacatccagagattttaaattttttattcttggcctgctggcagcttttgcattttcaacaatctataattgggaagagaatgtagaatctttcaagaaaggatatgcagatggtcgccaggactacgaactttccagagaaaaataaagatattcccatagtcttatcacttttggaggggtctcaattttattggggatttgtagctggggaaaacggactggaagtttaatttcagagaagtattttatttttcttaagtttaagcttcttaaaaccaatctatatgaaaaacatattagtggccatagaccggaaaaaagaggcagaacaattaatagcccgggcggtggaaatcgcaaaactttcaaaagcgaaaatctggatcattcatgtaaccgaacctgatccggatgattttcttgcgcgggaagctggtccgcagtatgtctatgataagagatcgaagaaacgcaaagaagaagccgcgaccattcagcaatgggttgaagagattaataaagacaaggaggtagaagcagaaggacttttaattgaagggccggtagttaaatctctccgcaatatcacagaagagcatcatatagacctggtggtggccgggcaccggaagaagaattttctctatagcctcttcaccgccaataagaaaaaagaccttgttgatgaactaaaggtccctttattagccgttcctttagtttaatctccaaagagtaagaactaaaaacacctccgggccggaggtgtttttagttttataaaattgagaagttttctgtcttcttcaattaaccggaaggaagcgcttatcccgtagtatcgtctacactaagctcaactctaaaggagtccttcactatatcatcatcttcggctaaaaccggtagatccaattcctcatcgggagtaaattcaaaaattttgtcgccatcatcggtatggagtaccacccaaagcaattcgttaccttctatttccgtattttcctccaggtcaagtttaagatcggtataggtatctggttcaatatatcggggaaccgaaagtctgctgtttaaatcgggggctcctgctgcatcagaataaatcaccacccagccgggatgactattaactacagcgcttatattgagtttcctgttctgttccagttcctgatcctctgcaagcacgctacctgttgggtccggcagatcaacaataaaagaatgagccaccatacttcctgaggaggttaaaacagggacatcagccagattgctcgcactgtattcaaaaatcatatcgccgtcatccacatgcaaattaacccaaagcctttccccttccacgagctctgtcttattttttaatcggatgctaaattcctcataatcccctgccttcacatattccggcatagaaattatctcagtcatcaagggctcattatccccattgtcttttcttacgacgatccacccatctttactaaccgacaaatcctctaccatcacaatttccccatccagaggttgatcgggaagcctaaaactacccgttggcaccacaattggggaaagctcatcatcatcgtcgctgcaggaagtaaaacccaccaatacagcaagcatgagcaccaacaaaatctcctttctaaaccacatgacacttagttttgaattaaaagttctatttgaataacagagttcacaaggggaggtaactaatactttgctattaaatatatcccttattaagcacaggaaaaatgatatatgtcactcttaaatagcgggtttccgcagtttattaattcgttgagtagcgatgctgtgagcttagctttttgggatgagataccggatagaatctgagggtggggcgtaaaaaaagggtttaactttatctgttaaacccttttaggaaaattatttaagattgatataatatctaggctttcagttcttcctgggcttcggttgtctctgtttctatggctgtagtttcctctgtttccaagtcttcttctgaagtttcagaatccaggacattgaatttctccagttgttcttcttccccggtaaaatatgggaatacgtccaggatgggagattcggtgatcgaggggatgctgtagtcgcccatggtatcttccatggctttggtggtattctcaaaagcctctttcacatcgttggcctgtaccagcaggtaaatattggtcttcttttctttcccgctctcttcatcaagggctactaaagaaacctttgatttaaaccacctgtcggaattttcgaaggggtgaacctcagaaaaattggcgacttttatattcatgatcctgaaatcttcgctggtataagcggtcatttcttcagtgatcctggattctgcctctgtaaaggataccgcatccagcaaataggtgtcggtgcttactttctgctctcctgtctcgtgtgtttttttgtatttcaccttacattcataccaagttacgctcatatcattttttttagggagccaaaaatagaattaatatcaggcctgcagaagtatcctgcgaagagatattcacaaatttattttttcagtttcaggctatatttcttcttgctactgaagggagctcttttggcgaaaaactaaccgggatttttttaaagaaactttacaatttaggattggtattttggagaggatttagaccatgttttaagatttataaactaccggaagctgagtaactgaaagttttattttactatctcaagtaaagttcaaagaagctattcctgggtaaaaaacattactttttttttaagatttaattgtcttttaagcttttttttagtaaatatgttaatcctttcgaacaacaccctacctatttttcggaatgatcaaagtttgtaaacttttctgttcaaaattttagcacaaaaaaaggagatatataaatatacctccttgaatgttttcacaacggaataatccttattgtgaattgcttcagaattgtcatacaataataactaaaaaaaatcatacctgcaatcttgttttcattaggaaacaaaaaattgatggttataacttaccgaaaatcatagtatatgaaaagaattttaggactggatttggggacaaactcaattggatggtcacttatagaacaggattttgataaaaaagagggtagaattttaggaatgggcacaagagtaatcccaatgagccaggatattctaggaaaatttgatagcggaaattctatttctcaaaccgcagaaagaactgggtataggggaatgcgccgattgaatgaacgctatcttttacgccgccaacgtattcatcgtgtattaaatgtattaggatttcttcctcatcattatgctgaagcgattgattttcacaataagttaggacaatttcttccgggaaaagaaataaaacttaattacagattaaacggaggtccgaaacatcactttattttccaggattcttttgaagagatggcgagggaatttaaatcaaaacaccccggtttaaaaatcccgtatgactggacaatatattatctgcgtcaaaaagctttaaggaaaaagatatctaaagaagaattggcctgggtgattcttaatttcaatcagaagcgaggttactatcagttacgtggcgaggaagaagaagcggataaaaatcaggaatatgttttattaaaagtaaaggaattaatagataccggtgaagccgtaaaaggcaaacctctctataaagtggtttttgaaaatggttgggaatacgaccgcgatataaccaaaactgaagattgggaaaaccaggagagggaatttattgttactacaaaaacaaataaagatgggggtgtcatacgcacttttaaaaaggtggattctgaacaagattggattgcaataaaaaagaaaaccgaacaaaatattgaagaatccaataaaacagtagggcagtttatttacgagactttacttgacaggcctagtcaaaaaatccgggggagcttgataaaaaccatcgatcggaaatactacaaaaatgaactaattaaaatattagaagcgcaaaaagatttccacgcagaattgcaaagtgaagatttatatcaagaatgtctgaatgaattataccctagaaatgagtcccatcaagctaacataaaggataaggatttcacctatctttttgtcgaagatattatcttttaccaacgccccttaaagaccaaaaaatctaccatctccaattgcgcttatgaaaaaaggtatttcaaaaaggatggagaaattcaggaaaaacctttaaaaggaattccaaagtccaacccactttatcaggaatttagattgtggcaatttattcaaaaccttaaaatctacaagaaaatagctaatggaaaggaaaaagctaaaattgatgaagatgttaccaggtctttattacctgattccgattcagtagttcgtttgtttaattttttaaacaacaggaaagaaatcgatcaaacccaattgctgaaatacttttcagatttaaaattaatttcaaaacagaaaaaagatgcctctgattaccgatggaattatgtagaagacaaaaaatatccttgcaattcaaccaggtcggactttttatcccgtttgaagaaagttaaaggtattccggaagatttcctttgtaaaaaagtagagaaggaattatggcatattgtttattctgtaaaagacaaaaaagactttgaaaaagctttggaaactttttctaaaaagaggaatctcccggaagaagattttgtagaaaattttaagaaaatacagccttatcctaatgattatggcgcttattctgaaaaagcaattaaaaagctattgcccgtaatgcgaatggggaactactggaaagaaaattcagttactcctgaagttaaacaacgtgttgacgatattttagaacgtctcgagaccatacatttcgaaaaggataaaattgaaactgttgcggatgatgcttataaaaagcaagtcttgaaaagctttattaggtttgaagacaaagcaaatccatatgaaggattaaatacctaccaagcttgttatgcggtttacgaacgtcattcagaagttactgaaatcatcaactggaaatcgccgaaagatattgatcaatatcttaatgaaactttcaaacagcatctacttagaaaccctatagtggaacaggtggttactgaaacgcttcgtgtggtcagggacatttggaaacattacggaaatagccaaaaagactttttttctgagattcatcttgaactaggccgggaaatgaaaaattcagcagataaaagacaacggttaagtaaacagaatacggaacgtgaaaataccaatcaacgcattaaagcgcttttggaagaactgcaaaatgaaggtttagaagccgtaaaaccttattctcccaaccagcaggaaattctaaaactgtatgaagaaggcgtgtatcttaatgcaagatacgatatggttagtgaagacgaaatagaagccattcgcaagaagaacgctccttcgaaaaaagatatactgcgttataaattatggttggaacaaggctatcgttcgccatacacaggggaaataattccgatgagtaaacttttcactaccgattatcaaattgaacacatcattcctcaatcccgattttttgatgactctttcaataacaaagtgatttgcgaaagtgctataaatccgtatccatacaaggataaccaaaccgcttacgagtttataaaaaatagccgcggctgcgtagtacctgaattaacaaagaacggaaaggaatgcaccattttttcagtagaagaatatgaaaatcactgtaaaagttatttcagaaaaaaccgtacaaagctcaaatatttgttgagcgaagacatcccggagggttttattaatcgccaactcaatgacagccgatatatcagtaaatttatcaaaggactgttaagcaacattctgcgagaatctgatgaaagagaagcaacagtaaaaaatctcgtgccggtaagtggcgcgattaccagtgatttaaaacaagattggggtttgaatgataaatggaatgaacttgttgccccacgtttcaaacggatgaacgaaattaccaattccagggattatggctattgggataataaaatcaatgcctttagaacacaagttccaaaagatattgaagctggttttagcaaaaaacgaatagatcaccgccaccacgctttagatgccttggtaattgcttgtaccacgaaagatcatattaattacattacttcaattaatacagaaagaaagaatcacaggttagttaagaaacttcgagaaacgaaaaagataactttaggtggcaaggaaagaatagttgctaaatcctttaaaaaaccgtgggaaggttttactatagatgccaaaaatgctttggaagatattgtaattagttttaagaagaatattcgggtcattaaccgcacaaataacaagacctggcaatgggaaaagaaaaatgggcaatggaaaaaagttttgcaaccccagaagggtaagaattttgctattcgaaagtctcttcacaaagaaaccgtttccgggttgattgacatacctactccaaagggaaaagtggcaaccgctacccgagcaaatatttctaacattaagaatcacaagcatattgataagattactgataaaagcattcaaaaaatcttacgaaatcacgtcaaaaattacttcgatgaaaaaggcaaagaagatttcgaagcagcatttagccctaagggaattaccgatttaaatagaaatattaaatcattaaataatgggaaaaaacatcaacccatttataaagtaaggcaatatgaagtgggaagtaaattcagcgttggtgagcaaggaaataaaactgataaatacgttgaagccgcaaaaggcaccaacctttattttgccgtgtattgggatgaaaaaaagaataaacgaaattttgaaacaattccattaaatgaagtggtggaacatcaaaaacaaatggctcacatcccgatgaagcaaaaacagcctattcctatagatcgtacaaaaggaaagtttttgttttatctttctccgaatgatttggtatatgccccaagtcaggaagatatagcttcagatattatttctgaaaatttgaataaagaatatatatataaaatagtaagttttacaaacaagaggctatatggtgttcctgttaccgttgctaaatccattgcaaataaaacagagtttactcaattaaataaaatagaatttattcaagaaaaaaacttgtgttggaaacttaaagttgatcgattaggaaatattcaagaagtaattaaatgataaaacgctgcctcatcttcaaaatcctaattacctaggaactagaaataggcaaatgaaggcttaagataccgcaaaataatactgaatcttttgataaaacttcaaggtgtactaattgaataaattaaaattggaagattataaagccatactgagtccaaagcacacctatcacgtctataataggggtattggtggtgagctattattcctttctaatgagaattatcggtatttcctacgtaaatatgataattacatagcaccggtggcagatacattttgctattgcttaatgcctaatctttttcattttttaatccgaattaaagaggagaaggtcttaaaagaattttttaaggataaaatcaaaaacccggattccagtatagacctgacaggttttgaaaacctgtcaggtctggtctcccgccaattcagtaatttttttaatgcctactcaaaagcatttaataaacaacaccatagaagtgggaatctattttcaagaccatataagcgaaaactcattagtgatgaaacttacctaagaaaagtgattcattacattcattttaatccggttatggccggcattgtggatagcttagaaaattgggagtattcctcttatggaagcataatttccaataagaaaacgaagttacaaaagaaggaagttattagctatttcgatgatttagaaaatttcaaattttgtcatctatatcctccagaattaacaggaatagaataagcctatataatttaggcaattgagagaagattagaaactaataatatgataaaacgtacactcttttttggaaatccggcttatctcagtactaaaaatgagcagctgatagtttcttatcccggggaaggaaaagaagataaaactgttcccattgaagatattgggatgttggttttggaaaacccgcaaatcacattgaccaacggactaattaccaaactcattcaaaataaagcggcggtcgtaaattgcgataaacagcacctaccctgctctatcttacaacccctggtgggacataccgaacaagccgaacgattttcagctcaacttagcgcaagtattcctttaaagaaaaatttatggcagcaaaccgttagcgctaaaataagcaaccaggcccagcatcttttccgtagaaataaaaaccataaaaaacttgctcgttgggcgggagaagtaaaaagcggtgataccgaaaatcacgaagccgtggccgcagcccattattggcaaaacctttttgatatcgatggttttacccggtatagacacggcgatcctccaaacaatttgctaaactacggttatgcgattctaagggcaataaccgcaagagcacttataagttcagggcttttacccggagtgggcatctttcaccataacaaatacaatgcctttgccctagccgatgatattatggaaccctaccgtatctatgttgatgttttagtttatgaattggtgcttgcggaaaaaaatattgatgagctaaccaccgacttgaaatcccaacttttaagaattcctgcgctggatgtttttatcgatggcaaatggagtccgctaatggtggctttaagccgaactacaaattccctgtatgaatgttttgcaaacctcagccgaaagatcctctatccggtgtatcaatagcaccggtctcctgcggtttgccacaaatcgggacaaatggaagataaattttcacgtttaaatcaataccgcagtatgtgggtactagtattttttgatctcccaacagaaaccagggctgagcgaaaagcagcagcacgttttaggaaagatt

SEQ ID NO: 1353 - DNA, 16205 bp, synthetic construct
  source 1..16205: mol_type = other DNA
  misc_feature 1..16205: note = Synthetic
agttggaaactgctataccaatgtgttcgatgtgtgttggtgtcatatttatattgttttttaataattactaaatttctctttccgttctcgaaacaatcattcacttttgccactgctcccactttttgccactgctccgaattaagttgcaaaattacagactttttcaaaagtgaacaaaataaaatgccaaataattcaaataaaacgctatttcattcgttcaaatcgccgttttatctgtctttatctattcgttttgaactgttttcaatccatacgctataccctccaactgcatgaggcggtctctcttggggtgtcgcggacaatagacaaagcagtcaatcatcaccaaacgaccatgaagctcgtcaatgaaacaatagttcacaaacggtcctcccatccaatcgccaaacaacctccacaaacctcgagtctcctcggcttcaaatcctccgattgacaccctctgagaataaaacgggctgcgggtttccgttcccatgtacgaatcctttgcaggtccgggaatgtttgcctttgccacagaatctctcattgcgataatctcctcttgcgaaggcagcatctttcccgaatatggttttgtgcaaatcgtaatatccagactctcgtccttggtctcctttctcagccacataaaatccgacttgtccgccgcaatgtaaaactcctccgacactgtgagccaaaaaccaaatcgtttcttcatctttctcgttacatcggtgttttccaatcgcttgaaagccgaatatactcttttgcgttcgttttcgtaaaattggttgcggattttgtcggcattgcgagaaagcaaggcaaaaaggctgtcgcgattgtccgtctcaaaaaggaagtaagcctgaggcgtcgatttgaaatcaactgtggctttcaacttgttggcgttgcctgccttcatgtcgataacgatgatatttctgtgcttctgcaacatctccgaattgaagaagccctcgggattcatttgcaccacgtcaaacaaaggctccgcctgtggcagtccctcgcaagccttcatgaaacaatgacctatgctgtctttcaactcgcccttgtatagctgctccggcacaatcaccaacacctccaaagtctttcctcccgaagaaggtaaacccttgggattgtcgttctttacctcgcttttttttgaacaaccgacagcaaaaaacatcggcaaagcaataaaacacaaccacttgcaaaaactccacttactcataatcacaaaatttacaaagtgcaaaagtacaaaaaatcactcacactccgcatctttgtccgtcaaataggcttaaactgtccgtttgttttttcgacaagtcttgccaaacaatttcactttgatactaaaaacatcaaaatcttttgtatgcaaaaacaacgctctccacatatttggaagcattgcacacttcttacgatttttgcgaaaatgtgttctctgattttttttctttctacactctacatcccccctttagggggggtgtagaaagaaaaaaaagaacacattgcggagaataaattccacgaaagaaaaatcgaagaaaattgcagaactttgacacaaaaccaaatctacaaacctcaacaagacgacaacgaaaaagaaaaagtatcaaagccaaacagaacaacacaggacgacaaagcactcatgcagcaagcaagcacagaaatacgcacgacatctgcgaacgctcaatctgcatcatcttgccaaaatctgcatcaaaagagacaaaaatgaggcagatttatcacctttgatgcagaaaacaaagagaaaatccgtaactttgcaacgacaaaaaaaaacacaatgtatgcacacattcgattacaaagaagctcccaaacagctattgacaccagacattgtcaatatgctgacagcattgcacgaatacagaggcagacaagagttatactcagcagccgaagccgatgtactgacagcattgttggacatagccaaaattcaaagcaccggagcgtccaacaaaattgaaggcatatatacatcagacgaacgattggaagcattggttatgaaaaaggcagaaccacgcaaccgttccgaagaggagattgccggatatagagaggttttggctactattcatgacaattacgagtatatccccgttcgtcctaacactatcctgcaactacatcgcaatctgtatagtttcggcagcagcgatatgggaggcagatttaagaatgcagataatgtaattgccgaatccggcaaaggcagacaacaacgagtgcgatttatacctgttcctgcgtttcaaactcccgaggctgtggagaatttgtgcaacgagtttaactatgcaatcgaacgagccgaatatgaccccttgctgttgattgcgatgtttattatagacttcctttgcattcacccgttcaacgatggcaacggacgaatgagccgcctattgaccttgcttttgctatatcgtagcggctacatcgcaggcaagtatgtcagcatagaaatgttgatagaacaaacaaaagaaacctactatgaagccttgcacaatagttcggtcgaatggcatgacaacaagagcgattatgcaccttttgtcaaatactatttaggaattgtactgaaagcctgcaatgagtttcaaagtcgcatagagcatctcaaatatcgcaaattgtccaaaactgacagagtaaaagcagtgtttgaaaagaaactcggattagtcaaaaaagcagacatagccgcactttgccccgacattagcgaaacgactattgaacgcactttgaaagaattgcttgaagcaggttttatcgaaaaagtcggcaaaggacgagccacaggctatgcgaagaagtaatcaattacttttctcatcagtaacttattagcgttgctgacagcgtttcgtggacaagttatcggcagagataagaccattgttgtctttccgtgttatgaacagacaatttaactacaaacaatcaacaccatatttgttgaaaatcaaaaaaatccgtaactttgcaacgataaggttgcattggtttaataccaaagcagcagtagttgtaatcaagatacaaaatcatggaagaagaccaagaaaagcaaccgagaaagcaaaaagaattgcaacattttgcgttagatgaagcagacaatatcatagacatcaaagatgttgaaacgaaagagtccggcaaaaaagtcgaacgtcatttcttttgcccgaattgtcatcaggaaatgtttccgaagcaagggaaaatacgaagacaccacttctcccacaaagcacattcagattgccctcatgacggctatctgcacgctcttgccgaaaaactaatcatggattggttcaacaaacaagatcgtgttaatttgataatgaacacaacaaaagtatgcgaaagcataaacacctgcaaattttccaacagcttatgcaaacaaacatggcaacaaggatttaacttgaaggaatactacgatagttgcacacccgaacgaacctacaaaggatttagagcagatttgttttgcaacaggaaaaataattctgatgacccaatcttcatcgaaatcttcgtaacccacaaatgcgaagaagagaagaagaactcgggtatcagaataatcgaaattaaaatagaaacagaagaagacattctaagcataatcaactccaacaaactgacagagggtgaaaacatcaaattgtacaatttcaagaaagaaacttcttgcaacgatattcatacaccaatttcaaaatatattctctttccttcacaaaaaagctttttagacaccaaattctcttgtaagaattatgacaaaaaacggagaggaatttttgaaatttccgtcaataggtttgacaatattcatagtggttctttactccttatcggaaaatgtcaagcgtttatcaaggggtatctaaagaaagattgtcaattgtgtttttggcaaaaaacggatagtctttccaaagacttttgtatgctgtataaaaaatgtggaaaccctaaatactgcaaagacaacaatcctctatcgtgccaaatgttcaaaccaaaaatccctttcatacagatgacagccaaacttttagatccaaataaccccaccaccaaataccattttgatatttgggagaagccactttaatacgcaatatgtcatcaaattttcttagctttgcaacgacaaaaaaaatcatgatagttatgaaattcaaaagtattacaaaaagagtatcgggcattgctctgctcgcattgttgtttgtatcttgcaactcaacatttttccaagttgtaacattggactattctgaaaatgtgaaaccgaacgaaggttatcttgtgtcagaaaatgatgatttgaaactcctgtacaacttttggagagaagggttgtatatgaagtttgacattatcaacaaaaccgacaaagatgtctttattatcttgccacagagtttctgtatcaagaacaatcttgcaattccttatagcgaaaacaaagtaacatcaagcagtagttactcttcttcaagtctttccggcacaatagttaccacacaaagcactcaggcgtacaacaacctgcaatttacctgcataccacctcactcatacataacgataggttcaattccgataatcaacgaacgttttaccgactgcaacccaaagcattcattcccatctgattatttcacttataactatttggcaaacaatactccgcttcaacttcgcaatcgtatagcatatagttttaaccgagatttttcaaccattcactatatcgacaacacattctttgtttcctcctatatcaacagcaagggaactgaaagggaaacattcattcctaaatgcgatgccaatgctcaacgtttcataacgacaaaagtacctatccaaaatccgacgccaaatatgttttacatagaatacgaaggaacagagtatatagggcttaatggggaatatttattaaactaatagcctatgaaaaagccgatagtaattttcatcattggcatgattgttggagcaaccctcttggcaatcgggtatctcattgcgacaaacattgattacgataccactgagtatttcaaaactgcgggagaatgcagagaagacatcggcaagttcatggtaaaagaacaaatctccaaagacaaggtttttgcgtacgttaattgcggcaaggaaatcacattagtagccgacctgatcggaattgacgaagaccatttcccaatggcgttgctcattactccgaataaaaagagttactatgacaatgaaataatcgaagtcccttccggaaagtgtgcaaggcagattggtgtttataccatgcatcgtgatggtacgaaaagaacaatacccattttcagaatagagtaagtctccacaaacagcctgctgttgtgtattcttttgtgatatgacggatttttcgtaattttgcagaccgaaaaagcagacgagttatgttagaaaaattggaagctatccacgagaagtttttggagattgagaagcagatgaacgatccggaggtgatgaacgacatgaagcactatgtcaaactcagcaaggattacaaggatttgcaacccataatcgccgcctacaaagaatacaaaaacgttttggaaaatatagagaacgccaagtttgtgcttaacaacgaaaaggacgaggagtttaaggaaatggcaaagcaggagcttggagaactcaccgagaaacgtcagcagatggaagatgacattcgcctgatgctcattccgtccgaccctcaggacggcaagaatgcggtgtttgaaatccgtgcaggaacaggtggcgatgaggcaagcatctttgcaggcgacttgtacagaatgtacaccaagttttttgagaagaaaggttggaagacggagattgtcgattttaccgaaggaacggtgggcggatataaggagattgtgcttaatgtttcgggagagggtgtttacggacagatgaagtacgagtcgggtgttcaccgcgttcagagagtgccgcaaaccgaaactcagggacgtgtacacacttcggcagcatcggtggtcgtacttcccgaagcagaggagttcgatgtcgatttgaagatgagcgacattcgcaaagacactttttgttcgtccggtccgggaggtcaatcggtcaatacaacttattctgcaatcagactgacacacattcccaccggcattgtggtttcatgccaagaccagaagtctcaaatcaagaacttcgacaaggctctcaccgtgttgagaactcgtttgttcgagttggaatacaacaagtatctgaacgagattgcctccaaacgaaaaaccatggtatctaccggagaccgttcggcaaaaatcagaacgtacaactaccctcagtcgagagttaccgaccacagaataaattggacgatgtacaatctgcctgtgttcatggacggcgaaattcaagatgtgttagatgctctccaacttgcggaaaatgccgagagattgaaggaagctgtcggtcaatagacaacaaataatcacaaggataaaatacagggggaagttcttacgttccccctatgttgttttaagtatatatgccgatgaagagattttgtcttagcgttatattggtcgttttcgggtttgttgcctcacaggctcagtattacaactctgcaataggtcagtggcaggaccatttgtcctactatgcaactcatgcggtcttttcgaccggaagctctgtcttggcagcttcggagagttcgctcttttatgtcaataaatacgacagatcaagcaaaaggttctcgaaagtaaacgggctttctgatgccggagtaaaggtaacagcatacgaccccgaaacaaaatctacaatcatcacctacgacaactccaatatcgacattgttcaaaacgacaaggtgtacaacatatcggacataaaggtgcgaagcatagagggtagcaagtcgataaacaacatctgtttcaactccggcaaggcttatctttcgtgcggcttcggaatagtggtcttggaccttatgcgacgagagatttacgacacctactacataggaacaaacagtgcaaaggtggcagtcaatgcggtggcaatcaacgacactgcaatctttgcggcaactgccgaggggcttctgtacgctcccaaaaacagcaatgccttggcatcgagccaaacgtggcaacgcatgagcgacattgccaataccggaaaaggagactacaacatcaacttccttttgcagctaaacccttcggagctgcttgtcggcactgcttccgaaagctcgaccaacagcaccatatacatctttgacggaacaaactggcgaaccgcattcgacgaccaatatgtccgcaacctgcgattggaggacgatgtgcttaccttggttgcttacagaagtgtcaatttctatcacagcaacgatgtgagttcgggacatgagttctttcacctgagcgatgagtggaatccgcttcacaatgcccacttggacgtgtgcgatgcgataattgacggtgaggatatatggttggctcacgaatatgagggcttgttgtgctatgagaactacaagcaaggctctctgactgtcaaaaagtacttccccgacggtccgatgagcaacgatgtcttctcgattaccgcctcggaagacggaaagatatatgtggcaccgggaggcaagacaattcaaaacgcaccccgcggcatcaaagccaacgtctatatctttgacggatactattggcaggctcttgacgaaactcctgcattggacacactcaaagacgtgctgaacgtagctatcgaccctcgcgaccccaaacatctcatgctttcatcgtggtggaacggcgtaatagaggtacaaaacggcaagataataaacgtttacactcaagagaacaccaacaacaccataatccctcacccctactgctatcgtattgcaaaggttgagtatgacgaatcggcaaacctgctgattgcaaactccatggtgcaagacggcttttgttatctgacatacgacaacacttggggcaagttcgagacctattcggcaatagggctgaacgagataatgggaatggaactcgacaagttttatcactacaagttcctctggacggcaaacaacaagattttggtgttggacaacaacggcaacaaagttctgctcgaccccaacaatggttcgtatgacaagacaaccaaggtgaactgcataacgcaggacatggacggcgaaatgtggattggaacagacaaaggcatcaaagtggcatacaacattgccgacatctttgaaacaagcgacggattgacttccaaaaccgagtgtcagaacatcatctaccaagaaaacggcattgctcaataccttctcaacttcgagaacataacctgcataatgattgacggaggcaaccgcaaatgggtaggcaccgaaagaaacggcatctatgtcctctctgcttcgggcaacgaacaactcttccactttactgccgagaacagccctctgatttccaaccgtatcatctgcatggctcaaaacggcaaaacaggcgaggtgttcattggaacagaccgcggaattgtgtcctacaaagccgaatcgaccaagggtgcagaagaggtaggcaagctcacggtctatcccaatcctctgagaccgcatcacagcggaacgattgcaatcaagggatttgtggcagactctgacgtaaggataacagacgttgcgggcaagacggtggctcatctcaaatccataggaggacaggcagtatgggacggcaggaacttcaacggagaagaggtggcaagcggagtatatctcatcttctcttcggcagaggaaggcagccggacagcctgcggaaaagtcctgataatacgataagagcaatgatttacaccacacgtgcaatcatcataggcacaacagcctacaccgacaacagtctcatcatcaaagcctacaccgaagagttcggactgcaaagctatatcctgcgtgcagctcgcaaaaaaggcggcaacgccaagcctcagcactttcaagcactccgagtggtcgaactggaaatcagccaaacacccaaagccaagctgagcagcattcgctcttctcaacttgccggctcatacgaacatatcaccaccgacattgtcaaaacaacccttgcactctttctgaccgaagtcatcaacctgtcggtcaaagagagcgttcctaacaaagaactctttcatctgcttgcaagcgaaacatcagccttggaagcagcaccggcaaaagacacaaccgagtttcacttgcgtttccttgtcaagctcgcaagcgtcctcggcttctgtccgcaagacaactacgatgctgcccacccctacttcaacctgaggacgggagcattcgttgcaacaatgcaagagagcgataccctcaatcaagaaacctccatgagcctgcacaaactactctccctccccacagaacgcataacccgcaccctcgccgaacgaagagaactacttaacaacctcctacacttctacgcaatacacatcaccgccggaaaaccaatccgctcccacgaaatactctatacaatcttgggataaaaagggaaaaaaagaaagacgacaccgaacgatgccgcctttaatgttttcacaacggaataatccttattgtgaattgcttcaaattagtgccgcaaaaatacaacttttttctgaaacaacaaagattttccaatttttttgtaactttgaagcctaaaaaatcaataaaacagtttcgatcatgagaaaaatattaggattagaccttggtacaaacagcataggctgggcagttgtaaatgaagcagaaaatgagaatggagaaccaaaacttgttggtatagagtgtgcaggcagcagaataatacctatggacggcagtattataggtgattttgaaaaaggaaattctatatcacaaactgcaacaagaactcagtacagaagcatacgaagagtgataactcgtcatgttcttcgcagagaaagattgcacagagtattaaaagttatgggatttctccccgaacattatgccggtatgttagacaaatatggtaagtttatcgataattcagagccgaaattggcatggaatgaaaacaaattcctttttatgtcttcttacaaggaaatgcgagaacgattcagaacaacttccgacaatccattgatgaatgttccttacgattggacaatctattatctgagagagaaagcattgaccgaacctttgacaaaagaggaattggcatgggtcataatgcaattcaatcaaaaaagaggctattaccacctgagaagcatcaaagacaaagaaggaaaaattgataagaaggaagagtttattcctctgaaagtaatcaaagtagaaaaagacgaaacaaatacatcaaaaggacaatggtataacattcatttggaaaatggcatggtgtaccgcagaaaaagcgaagaaccattggactgggaaggaaaaatcaaagaatttattatttcctttgacattgatgagaacggtaatcaaaaaactgacaaagatggcaaaccgaaatattcgatgcgttcaccaaaggaggacgattggggattgataaaaataaaaacagacacagatatagagaaaagcggtacaactgttggaagctatatcttcaatgctttgctaaataatccaagccaaaagataataggacaattgattcgcgtcatcgaccgaaagttctatgcggaagaactcaaacaaatacttgacaaacaaaaagagtttatctctgaattgaacgatagagaacttttcaacaagtgtattcaagaactttatccgttaaatgatgcacacagaaacgaattatcaaataaagattttacttatttatttgtcaatgacatcgttttctatcaacgaccattgaagagcaaaaagtctcttattgcaaattgtcaatatgagagccgtatatacaaaaaacttgacaatgacggagaatatatcaaagacgagaatgggcaagacaaattatttactgctccgctaaagtgtattgccaaatcaaatccgtatttccaagaatttcgtttgtggcaatttatcagcaatttaagaatttaccaaaaagaataccgtgataagcaaggcaaactgattattgacaaggatgtcacagacacttttctcaaaacagaagatgacaaagccgccttgttcgattggttaaacacattgcaagatatagatcaaacgaagttcttgaaatacccttcgttcaatctaaaaaaacagcaattagagcaatatcgttggaattatgttgaagacaagaaatatccttgcaacgaaacaagatacataataaccaatggtttgaaaaaagcaggaatttcaacctctctaagccaagaacaagaatttgctctttggcacatattatactctatcagcgacagcaaagaattaacatctgcactgacaaaatttgctcaaaaacactcattggacaatatattcgttgaagtattttcaaaagtaaaaccattcaataaagactatggctcatattcagaaaaagcaataaagaagctactgtctttgatgcgattgggaaaatattggagcagagaagctattgacaatggtactcttcaaagaatagataaattgcttagcggagaatttgacgaaagtatcaatgacagaacacgagagatggtacaaaacttcaacaatgtcgaagatttcagaggattgcctgtatggcttgcctgctatgtggtatatgacagacattcggaagccaacaatgtaacaaagtgggaaaagcccgaagatattgactcctatctcaaaacattcaaacaacattcactacgaaaccctattgtcgaacaagtaattaccgaaacactcagaaccgtcagagacatttggaaacaagtagggcaaatagatgaaatacatttggagttgggcagggagttaaaaaaccctgccgacaaaaggaaatccatcagcgaaagaaacaaaaaaaatgaggaaacaaatagtagaatagaagaactgctcaaagaactctttgactgcggagtacaagatgtcagaccacattctccgtcgcaaaaagatattttgaagatatatgaaggttatgccctaagtaacgacaaagaagataatggcaggcagttaataagtaaaggtgaaatatctaaatacaaagcatggttagagcaaaaatatcaatcgccatataccggagaaaccattcctttatctgagttgtttacttctaaatacgaaatagaacacataatacctcaatcaagatatttcgatgattcattctctaataaggttatttgcgaagcagaagtaaataaacttaaagacaacatgctcggatatgaatttatcaaaaagcatggaggcgaagaagttcaactctgcggaggaaaaagagtaaaaatattcacagttggggaatatgaacagtttgtgtctgatcattatcacgactcaaaaaagaaaaaattactactggaggacattcctgacgagtttatcaaaagacaacttaatgacagcagatacataagtaaggttgtaaagggtcttttgtccaacattgtcagagagaagaacgaaaaaggcgaatatgaacaagaggcagtgtcaaaaaatctcatttcttgtacaggagaaattaccacacggctaaaagaagattggggattgaaagatgtgtgggatagaataattcttcctcggtttgaaagattgaacacattgacccactcaaacaatttcacaaccgaagatacttccggacacaccaagcctattgctccacctaaggtcaaaaagaaacgaattgaccacagacatcatgcaatggacgcaatcgtcattgcttgtgcttctcgcagtcatgtcaatctgctgaataatgaagcggcatgctccgacaacaaagctactcgctaccaactctcttataaattgagaaaacgagaaaaatatctgaaagacggcaaagaacgcgaagccttcaaagagttttataagccatgggatacattcacagaagatgttttccaaaaattacagaatattatagtaagtttcaaacaaaatctcagagtgataactcctacccaaaatgtttttgaacactataatgaccaaggcaagaaagaactcatacaccaagaaaaaggagaccacttggcaatccgcaaacctctccacaaagaaactgtatttggcgaagttaatctgcgaaagaagaaaacttgtactcttgataatgcattaaaagctcctcaaaacatagttgataaggaattaaaaaagaaaatactcgaattgtctgcacaaggcatgaatgcaaaacaaattaaagcatacttctctgataattcagacatttggcaagatgaaatcaagggaggaaaagtagagatttactatttcactaaagatacgaaagaaagatattttgcaacaagaaaagcattagatataagctttaaaaaggaggagattaaaaacatcaccgacacaggtattcagaaaatactgataactcaccttaattcagagaaatatgacggcaagcctgagaatgcattctcacctgatggaatagacgaattaaatcaaaatattcaagcactgaatggaggcaagccacatcaacctatctataaggtgagaaaatatgaaaaagcagacaagttttcagttggaactacgggcaataaaccaaagaaattcgttgaggcggcaaagaatacgaatttatactttgccgtatttgaaaagcagaagaacgataaaacaacagtccgctgctatgcaaccatacctttgaacattgtgattgattgtcagaaaaagcataaaagcaagtggaaagaagaagcgacaaacattctcaagcaaagaggtgatattgacaaagaagctcaactgctatttatcatttctccaaacgatttagtttatcttccgacacaagaagaactgataagcaaacactattcatttgacaaagaaagaatttacaaatttgtaagttgtagtgggaatatggcagactttgttcctgcttacgttgcaaatatcatattttctatgacaaaaaagcaacaaaaagaagcatttaataatgaagaacattttcatattcaagatgaatatggtgttggaagtcctaagtcaaaaaacgaaagggcaataacaggtgaaatgattaaggaaatatgtattccgataaaagtggataggcttggtaatataattggagagtattaactaaaatcaaagcactatgattaagcgaacgttgtgtttctcaaatccggcatatctgtcggtgaagaacaaacagttggttatcaagctgcccgaagtggaaaacaacgacactctgcccaaaagtttcaagcagagtgccgttaccaccattccgattgaagacatcggcatagtcgtcttggacaatcaacgcatcactatcacccagagcgtattggaacaactgatagacaacaactgtgcagtgataacctgcaaccaaagccacctgccaatagccatgcatttgccacttgaaggcaacaccactcagaccgaacgaatgcgttaccaaattgaagcctccctcccactgaagaagcaactttggcaacaaaccatcgtcgccaagatacaaaaccaagccgccgtactccgacaatgtagaggagttgaagtccgcaatatgctccggtgggcaacacaagtcaaaagcggcgacagcgacaacatggaagccagagccgccgtctattattggcaaaacgccttccctacaatccccgactttgtacgctcgagagaagccgctccgccaaacaacctgctgaactacggatacgcaatcctcagagccatagtggcaagaggcttagtgtcgagcggactgctaccaaccctcggcatacaccaccgcaacaaatacaacgcctactgtttggcagatgacatcatggaaccctaccgaccatacgtcgataaatacatcttcgacatatttgataacaagcccgattgcagcgaattaaacaacgaattaaaattcctactcctacaaataccggtacttgatgtaacaatcaactcacaacgcagccctctcatggtggcagtcagcaccaccaccgcctcattacaaaaatgctattcgggagaagcaagaaaaataatatatccaacaatgtaaccaatgcaaagatttagcgaatacagaattatgtgggtaatggtactttttgatttgccgaccgaaaccaagaaagacagggcggcagcagccaagtttcgtaaaacacttttggaagacggttttaccatgttccaattctctatctatgtgagacattgtccgagcaaagaaaatgccgatgtccacatcaaacgagtaaagaacgccatgccggaacacggaaaagtaggaatgttctgcataaccgacaaacaatttggcgaaatagaaatcttctattgccgcaaaccggaacaacaaaaaggctgcacccagcaattagaactattctaaactcgccgatttttattttctaatcagccctataaacaactaaatccgagcaacttacccggattcagttgtgtttgcaactgcaaagatactaatttgaaagcaattcacaacttatgtgcatctatcctcaattcgttcaaagttgtgtttgcaactgcaaagatactaatttgaaagcaattcacaacccgaacaaattgccgaacaaaccattacctgttgtgtttgcaactgcaaagatactaatttgaaagcaattcacaacaaatctccgataagtgagaaaacactccctgttgtgtttgcaactgcaaagatactaatttgaaagcaattcacaacggg

SEQ ID NO: 1354 - DNA, 16194 bp, synthetic construct
  source 1..16194: mol_type = other DNA
  misc_feature 1..16194: note = Synthetic
caaagtcttttggagattctctactttttgaaaatatatcctttgggttggcagaaggagataaagtggggttgatagcaaaaaatggagccggcaaaagtacgctacttaaaattttaatgaatacggagtccaaagatagtggcgaaattgtatttcgacgcgacttgcgcatcggatatttaccacaatctatcaattatccttctcatttgactgtccttgaggcttgtttcgagcatggcaacgaagcagtaaatctgataaaaaaatacgaagtctgtatgcaaaccgaagaccatccgggattggacgaactactggtacagatggaacatgctaaagcttgggaatatgaattgaaagtaaaacagattctctctgtactgaaaataagtgactataatcagcccatcgagcaactttcgggaggacaactgaagagagtcgctttagccaatacgctcatatccaatcctcaattgctcatactcgacgagcccaccaatcatttagatcttgatatgacggaatggctggaagactatctgaaacgttctaacatcactttattaatggtgacccacgatcgatattttttggatagggtatgcaacagtattctcgaaatagatcagcaacagatctatgcgttcaagggaaattacaattactatctggaaaaacgggaagaaagaatcaatgccgccaatgccgaaagggcaaaggccaataatctatatcgaacagaattagaatggatgcgcagaatgccgcaagcccgagcccataaagcccggtatagagaagaagcgttcttcgaattggagaaagtggcaaaacgccagaacaatgatgatgatgtgcagctcaacgtaaaggcatcatatataggcaaaaagatctttgaggcagatcatttgtataagagtttcgataagaaagttatactggaagatttttcgtatatttttacccgatacgaaaagatgggaatcgttggcgacaatggaaccggaaaatctacttttctaaaaatacttatgggccaacaaactcccgacaaaggcaaactcgatatcggcgaaaccgttcggttcggatactattcgcaagaaggaatgacctttgacgacaaaatgaaggtgattgatgccattactcaaatagccgattttatcgatatgggagatggccaccaactatcggcacagcaactgctacagcattttcttttcactcccgaaactcaatacaattacatatctaaattgagcggaggagaacgccgcagactgtacctgtgtacggtgttaatgcgcaatcccaattttctgatactcgacgagcccaccaatgatctggatattatgacgcttaacgtactcgaagaatatctactccattttaaaggttgtcttattgttgtgagccatgatcgatatttcatggacaaagtagtgaatcacttacttatattcaacggagagggcgatataagaaacttccccggcagctacactcaataccgagaatggaaaacgctctacgaacgacacaaaaaggaagaaggtacgccgaaggaagaaaaaaaggaacggatacgcttgaatgataagataaagctatcttataaagaaaagcaggaaatggaaaagctcgaaaaggaaatttccgcgctcgaacaagaaaagaatttgctcgaaggagctctttgcagtggttcattgtcggtggacgaactgaccgagaagtccaaacggctacccgaagtgaatgcactccttgattccaagacaatgcgttggttggagcttagtgaaaaggaacagaaataggtaccttaacccattctccaccgtgccattccattacttctttgtaccccgaacgtagcaatgcctcaaaagcttccatacggcccgcattgattctttccggataatgcgagtcactattcacctgtactcgtatacccaacgaatgaagagcggggaaataccgttcgttcggatagaatgtttttagcttcaaatacgatttcgtatttatctccacttggcatccactttgcgctataatatccaaatatttcttcatcagctcattgtaccctttctcttcgagaagccccggccgatagcacgatgcattatagtgcattttgtctgcatgtcccaatatatcaaaaccgcccaattcgatcatcctaaagagatggtcgaaatattgtctaatgacagaatccagatcgccatcgaaatgctcgtctacaacctgacgaaaacgatcgggcgggcaatcgatgtccactatcttgttatctttatctttaagcagatgaacagaaccgatacgataatccaaaggcaaccttctgaatcggatattcgaaggattgttctcatcatccagataatctatttcgagccccacggccaattctaactctgtttcgtatttctttttcaattgagcaaattcggtaagataatcattcatcctgtcccattccatcgtccaatgggtaggaaaaggcaacggagcatgcgaagaaaatccgaaagaagaaaacccttcggatatggcaaatcgcaaaaaagaatccatatctgctctaccgtcacaatatagactatgacagtgatagttagtataattgggatgtatcatatatccatttctttattccacttttttgcaagaatttccttggaaaaacctatttagcttttctgcacaatcaccgggcacaacgatgtgatggttgcccaacgagttgttcaggaaatagttgacagaggcatttagtttaagacgaatctgagtgcgatagaaagaagtatagttggtgttctccatcaggtgggccgaagagacaaagtattgatccagacattcgccgccacaacgcaccactgtataatcgatagccggcaaatacccctgaatggatacgctcttgccggtagtgtaatgacttctcaaatcgaatttctctgtcatgtccgtacctacggtgcaatgagacaaaattacttcattctcctttttatcaatggagtttgtatttaccataaaactactcttaccggtaacagcctttaccgaaagcatggtgaaaatagactgtaagtcaccctcacaccccactacataacccttattgttcatcaaagctagagccaaacaagccgttacaggaattgtttccagaattttgtagcaatttacagagattgtatcaagctgataatcggtacaaagctcaacgatggcgtaatacagacgaatggcttcaacaatatcattcggactgcattctctacacagattaacgtgttccatcaatgctgtcacctcatcttttatatcacttgttcttatctttttgtagcgagccaacacctcatcggtcgatatatcaatgaactcaactccccagcggcgtttcgtcaacaaataatcgataccgctcgatatcaacaacgaagaagtcacacccagcaatcctattttcttaccgatcaaagatcgttgtgccatatagcaatcatataagacagtgagctctgaaataatatctttatttgtaccatagactatttcgcatttaaaaccgtgttgccttatccatgccgaggcttcaatagttgtaggcaaagaattgttataattgtcggccaataaaataagagggcgacgattaagcgcttctatttgtttgaccagaagggattctagcccaccgatagtgacaaaagacacaacgaagtcattaggagttatttgatctatttcatcagccattaacattctgacgttgaagtgtatgttcagttcggttagaagttctttgtgaggttctaatatggtggtttgtttattctttatagcggagaaagtaactaatgtcatttccatgatattctttcattatagcgttcatctttatgcaaagatactgcatatcgcctgcaataacaaaataataagattaattttagtcatattatctttaaaactcttttgttctaaagaatatttgtaattttgtattggctatggtattagcctttaaatactttgatagttaataatacctactgataaacaactatattattaatgtattaaaattctttttatgctaagaacttttcttattgtaggcgtaggcagttttctaggtggcggttgccgctttcttttatcaaaagtagtacagaatacgattgaatattcttttccattgggtacgatgattgtgaacattttaggttgctttatgataggagtgttttatggaacgttcgagcgaggcggattaatgaataccgaactgaaaatgtttctcaccgtgggtttctgtgggggcttcactacattctctactttcatgaatgagaactttcaactcatgaaagacggtaacttcttttatgtgtcactttatgtcaccataagccttatcggcggattggcagcattatatataggtcatctcattactaaattgatataattgttatgcgaaagaaaatcttgaaattctacttaagcaatacggatgtgatcaagcacgattcgctgtacgaaacaattgccaactcggccaaacactacggactggcaggggcaaccgtatacaaaggtatcatgggctacgggcagagtagccgattgcattccaataagttttgggaactgaacgagaaagttcccgtcatcgtcgaaataatagacgaggaagataagttgcaaaacttcttaaacaacatactgccgtggatagaaaagctacccaaaggctgcctcgttacgatgcaagatatagacatcgttttgcaaaagaaaggaggttccaaatgaagaagcaggtcaaaacgaatgcggctcggttgctggaccgcgataagatagcatacgagttgattccctacgatgtcgacgaagacgatctcagtgctcaacacgttgcggcaagcttgggcgaagacatcaatcaggtgttcaagactttggtattgaaaggcgacaagacaggatatttcgtttgtgttgttccgggcgaagaagaagtgaatctcaagctggcagccaaagtgtcaggcaacaaaagttgcgatctcatccccatgaaagaattacttcccaccaccggctatattcgcggaggttgttcccctatcggaatgaaaaagttgttccccacgttcattcacgaaagttgcaccacgcagccctatatcttcgtcagtgcaggtatccgagggctacaaatcaaaataaaacccgaagacctcatttcggaggctaatgcaaaagtttgtattcttttttagccgatattaagatgaaaagattatctttgtgcaaatttaattttaatttataataatcaaatactatgtttgaaggtcaacccaaaggtctatacgcattagcgttagcaaataccggcgagcgtttcggttactacaccatgctggccatatttacattatttatacaagcgaaatttggctatactgctgccgaagcttcatctatttatgccggttttctggcatttgtttattttactcctttgattggtggtattcttgccgatcatttaggttatggcaaaatggtaacgacgggtatcattgtcatgttcttcggatacttcctgcttgccattcctaccgattcggttacaggaaagtggatgatgttcggttcattggctctcatagcttgcggtaccggattattcaaaggaaatctgcaagtcatggtcggcaatttgtacgatgcaccgcaatatcgcaacaaacgcgatacggcattcagcatcttctatatggccatcaatgtaggtgccctgtttgctcctacagctgcaaccaagatgactgattatatgctgaataaagcaggacttttttatgattgcaagattccggcattggcacaccagtttctcaatcatacgataaccgccgataataccaccgaactttccgcactacaggcagctcaacattttgccggcgatacggcaacattctgccagacttatattgccgagttgtccaaggcgtataactacggattcggcatcgcatgtatttcgcttatcgtatccatattgatatactacggattccgctctacattcaaatcggccgacttcaacgccaaacaagcaaaagccgcccatattgtcgaagaagaacttacacccaaagaaactcgtcagcgcatcgttgccttgttgctcgtattcgctgttgttctcttcttctggatggcattccatcaaaatggtctcacactcacattctttgcccgagattatactcaacatgccgcaacaggactaaacagaatcggattcgacgtttggaatcttgttttggtaatcattggcatctattccgccttttctatcttccagtcaaagacgcgtaaggcaaaaatcatatcgggcaccatattgggcgctgccctcgttttgcttgtggtcaaatacatggagacagacaattttgttcctattctaccgcagatcttccaacagttcaatccgttctttgtggtagccctcacgcctgtatcgctggccatattcacttcgctggccaagaaaggcaaagagccttcggctccccgaaagataggttatggtatgttggtcgcagcgtgcggtttcattctcatgaccatcgcttcattggcattaccttctccggcagccattgcagagcatccgttggcagacaccagcctggtatctcccgattggttgatttctacttatttggtgctgacttttgccgaactgttgctatcgcctatgggtatctcttttgtgtccaaagttgcacctcccaaatacaaaggtatgatgatgggtggctggttcgttgctaccgccataggcaattacatggttgccattccgggacacctttggggtagtcttcccttgtgggtagtatggagcgtactcattgtatgttgcgtggtttctgcactgttcatcttctctatcatgaagaaactcgaaaaagtcagctagcaatggctcatcgataatataaaacaacaattgcgtttgagcaaatctgtagattgtagatttgctcaagcgttttttatatcaactaaattattcctagaagtatgaaaaaattagttatttgcgcgctggccttattcatgatgatgccggcaacctatgcaggcaagaaagacaagcacaagaaagaacctctcgtagctgctgtcgcccaacctaccgtagtcaaagagggattgtttacggtctccaaaacaaagaccgactggttcttggagatccccgattctattttgggtaggctcatccagacagttacccgctacacatccactcctgttggagcaaacgtgtatgggggagagatggtgaacaaccaaaccgtttacttcgaaaaaggcaacgataaaatcttgcttcgcacgctgatacttggcgccactgccgatgctaaatccaccgatatcgagaaagccgtcaaggtgagtagcgaagatcccatcgttgctgcgttcaaaatcgaatcgtcggccaatggcagataccgcatcaatgtcaccaaacttttcaccgacgatactccgatcttttccatgtcgagccaacagaaaaagagcttcaatctgggcggcatacagtccgataggtcttatataaccagtattcatactttccccatcaataccgaagtgcgttgtgtcaagacatacgcctattttgctcccgatagaagcatgatggcaatgaggccatccacaccattgatgtccggcgaagagacaggaagcgtcacctataccttcaatacatcgtttgtggtactgcccaaagttcccatgcagcgtcgccttgccgatccgcgcgtaggatatttcaccgattcatacactttctattcagacaatcagcagcatgtagataccaaagagttcatcacccgctggagattggaacccaagcccggagatgtcgagaagatgaaacggggcgaacttgtcgaacctcagaaaccgattgtctactatatcgatcccgccacgcccaaacaatggcgcaaatacctcattgcaggtgtcaacgactggcagaaagcattcgaacaagcaggattcaaaaatgccatcatggccaaagagtggcccgaaaacgattctaccatgagcatggaagatgcccgctactcttgcatccgctatctggcatcgcccatcgagaatgcctacggaccgcaaatacacgatccccgcagcggagaaatcatcgagagtcacatctgctggtaccacaacgtcatggagttggttcacgattggtatatgattcaagccggctgcatcgacaagcgtgcccggaaagagaaattcgacgaagacctcatgggcgatctcattcgctttgtctcttctcacgaagtagggcacactctcggattgcgtcacaacatgggttcgagcagcaccgttccggtagagaagcttcgcgacaaaaagtttgttgaggccaacggacataccccgtccattatggactatgcccgcttcaactacgttgcccaacccgaagatagcatcagcaaagaaggcatctatccccgcataggcgactacgacaaatgggctatcgaatggggctacaaaccctgcctcaatggcgagagcgacgagcaagaccgattgaatagcaacaaagaaatagtaaaaagactcaaagagaatccacgtctatacttcggtacctacgagtatatctccggttacccttacaacttcaccgatccccgctgccaaagcgaagacttgggcgacaatgccatgaaggcgagcacgtatggaatcaaaaacctgaaacgggttgttaaggcacttccccaatggacatacgaagaaggcgatctcaataaaaacatgcagcgggtatacgaaaatctggttggacagttgaacagatacttcggccacgtcgcaacaaatatcggcggcgtttaccacaacttcaccagcgtagagcaacccgagacaagctacacagccgtcaacaaagcaactcagcaatcggcacttgcttttctcaacagcaacatcttcatcgagcctacttggctcacatccgagcaatatatttatcggttcaatggagatccgcagagttatagcaaagggttggctcggcgtgtgctcagcaacgtcgtatccggcaacactctaaatcgcttggttcagtacgaaaatgcatctcccgccaactataaggcgcaagactatttcaacgatctcaccaaaatgattttcagcgaaatatacggcaaggcaggcaaaatctcttcctatcgtcgctatttgcaacagcaatttgtcaagataggtatcgatcaggccaacgacaaatcgttgctaggcacagatgcccatgccatcatcacccaccagttgctcagcctacgccaaaaagtattgtcggcagcagcaaccgcaacagatagcatgacaaaatcgcacctcaacgacattgcactacagattcaaaaagaactgatgccaaaataaaaagagaaagagtataataacaaagaggtgcatctcaaaagccctcttttcaatcaaaataccctcgttacagtagctgtagcgagggtattatattatgaaagggttgacaatatactatacttattaagtagaaaacatctattctataatattaaagaaaaaagagtatacactgccttatcccaatgtataggtgaaattctgacataaaaaatgcccccgataaaggacgagggctgcctaaatgttttcacaacggaataatccttattgtgaattgcttcaaatttgttctcaaatatacgaaaaataattgtttatgtgcaattatttttcaaaaaatattttttacctttgatattgataaaatttaaagaaattaaatatgaaaaacattttaggtctcgatttggggacaaatagcataggatgggcagtaatatctacttcggaggatacaaatatttctccgaaaattaaatcagcaggtagtcgtattattcctatggatgcagcaacattaagtgattttgataaaggtaataccaaatcacaaactgctgaaagaacagcgtttcggggagttagacgaatacgtgagcggcatttattaagacgtgagcgtcttctaagggtacttcatcaattgcactttttgccttctcatttcgaggccgacattaattttatcgatcattcgggacaaataaaaacaaacaaggaaccaaaactagcatggaacaaaaatacagcagggcaatatgagttctttttcaaacaatcttttgaagagatggttgccgattttgtgaagcatcaatcgtacatcactctcgaaaataaaggaattccttatgattggacaatctattatttaaggaagaaagcactttccgagaaaatatcaaatgaagaattggcttggattcttttgaatttcaatcaaaaaagaggctattaccagcttagaggagaagatgaagaagataagacaaacaaattagtggagttttatgcgctgaaagctataaaggtagaacctaccgacgaaaaaaagggtaacgaagtttggtataatatttatttggaaaacgattggatatatcgtagaacaagcaaaacacctttaaatcttgcagggaaaacgctcgaattaattgtaacaacagatttgaatgatgacggaactcccaaactgaataaagatggggaaataaaacgttcgtttcgtattccgaaagaagatgattggacattaagaaagaaaaaaacagaatctgaaatagaaaagagtggtaaaacagtagggtgttttatttatgatgaacttttgaataatccaaaacaaaaaataaggggagaatttattcgtacaatagaacgtaagttttataaatcagaattaaagcaaatcttacgtaagcaaacagaatttcatccggaactacgagacaaaaatatttattacaattgtattaacgagctctatccccataatgaagcataccggcaaaacatacagaacagagattttgtttatctattcgtagacgatattatcttttatcaacgtcctctaaaaagtaagaaatcatctatcgcagattgtccttacgaagaataccaatatgtagataaagaaacgggggaaatcattcatgtgccgttaaaatgtatagccaaatctagccctctctatcaggagttcaggttgtggcagtttttatacaatatacatatctatcaaaaagaaagaatttttgatggtaaatcgcaaacggacgtcgatgttacaaatgaatttttgaaaacagaaagtgattatgtcgcattgttcgaatggttgaatgacttgggggctgttgatcaaaaaacttttctcaaatatccgcctttcgggttaaaaaagcaactaaacaattatcgatggaattatgtagaagacaagttttatccatgcaacgaaacaagatatggcatacttgtcaaatggaaaaaagcaggtatcgaaacggctcttttcaataccgaaattgaaaagtcattatggcatatactatattcggttaatgataagatagaattagaaaaagcgttgcagaaatttggagacaaataccaacttggtgactcttttgtacaagtcttcaaaaaataccctcctttcgttaaagattatggagcctattctacaaaagctattaaaaaacttttgtcattgatgcgaatgggtaaatattggaaagagaatgaaatagacgaaacaacaaaaaaaaatgtaataaatattctcaaccgagggattgatgaatcaatgccaatgaaagcaaatgataaagcaatacatctggtaaatatctctgattttaaaggtctacccttatggcaagcctgttatattgtttacaagaggttttcagaaattaaagatataaccaaatggaaatctcccgaagatttggattgttatatcaagtcatttcgccaacattctttacgcaatccaattgtcgaacaaattatattggaatcgttacgtgttgttagagatgtatggatgcgcgaaggtcatatcgatgaaattcatattgagcttggacgtgaaatgaaaaattctgccgataagcgtaaacgaatgtccgaacaaatatcagccaacgaaaatacaaatttacgaattaaagctctcatgtcagagttcataaatagcgaatatggcatagaaaatatccgtccttattctcctagtcaacaagagttatttcgtatttatgaagaaggagcattgaatacggcatcatctgtccctgaagaaatacttgatattatcaaaaaattcgagggccctaaacagccaactaaatcggaattcatgcgctacaaactttggctagaacaaaaatatcgctctccatatactggtgagatcattcctttaagtaaattatttactcctgcatacgaaatagaacatgtgattccgcaatcacggtattttgatgattcattaagcaataaagtaatttgcgaatccgaagtcaataagaaaaaaggaaacttgctgggttatgaatttataaaagcacattatggtgaaataattcctataggatttggcaaatctgtaaagatattgtcggtcgacgattacgagatattcgtaaaagagaattatgctaggaataatataaaagcacagaaattaatgatggaagaaattcccgaaaaatttattcttaggcaattgaatgatacccgatatatcagtaaagttgtaaaaacccttttatctaatattgtacgcgaaaaacgagcagatggcaattatgaacccgaagcaatctccaaaaacgttatagtgtgtacaggtgggattaccgataggctaaaaacagattggggcattaaagatgtttggaatgaaattgtttatcctcgtttcgaacggatgaattcaattaccaatagtagttgctacggacattgggaaaacaaagaaggcaagcgatactttcaaaccgaaatgcctcttgaatatcaaaaaggattcaataagaaacgtatagaccatagacaccatgcaatggatgctttggttatagcatgtgcttcgcgtaacatagtaaactatttgaacaatgaatcggcaagtgcgaatgcaaagatcggtagacactatctacagcgtttgttgtgcgaaaaaaagaaaaacgatgaaaatggaaattacaaatggattatccgcaagccatgggatacctatactcaagatgtatcaaataccttaacaaatattattgtcagctttaagcaaaatctaagggttataaataaaacgaacaataattattcgcattataatatagaaggcaaaaaggtgatatgtaggcaaactaagggagataactgggccatccgcaaacccttacataaagcgacggtgtttggtagagtgaatttgcgattcatcaaagaagtacgtctatctgtagcaatcagtaatcccaatagtattgttgataaaaagctaaaaaacaaaatcaaagaactctacaaagctcaatataccacaaagcaaatcgaagcctacttcaaatctaatatttctcaatgggaaaatctaaatcctgtcaaagtgaagatatattattataccgacgatacgacacaaccagtggtagcagtgcgcaaatcattagatagcagttttacttcaaaagtgataagtgaatctattaccgatacaggtattcagaaaattctattaaaacacttgcaacaaaaaaataacgatcctgcttttgctttttctcccgaaagtatcgatgagatgaacgttaatatagaaaagctgaatgatggaaaaaaacaccagccaatacggaaggtcagagtatacgaagtattaggcaataaatttgctatcggtgaaaaaggtaataaaactaataaatttgtcgaagcagagaaaggaactaatttattttttgccatctatcaaaacgaaatagggaaacgtagttatgaaaccataccactcaacgtagttatagaaagagaaaagcaaggtgcacttcctgtaccagagcaaaacgataatggagataaactcttgttttggctatcacctaacgatttggtatatcttccaacgccggaagaactagagacggccattgattattctatcaaaaggaaggaaagaatattcaaaattataagtttcactgataaacgattatatggaattccatataatgttgcaagttctatcgtcgataaattagaatattctctattaaataaaatagaattaacagatagtaaagaatcaattagagccatttgtgttcctctaaaagttaatagattgggagaaattattgaaataaataatagaaaagtcaatatttaatcactttaaatatgatcaaaaagactctttatttcggcaatcccacttacctctctttgcgagatggacagatggttatcaaactacccgaggtggtgagaaacgacacactgcctgattcgttcaagcagcaacatgaagtcacaaagccgatagaagatattggaatcgttattctcgacaataagcaaattactgtcacttcgggacttcttgagtctctgctcgaaagcagttgcgccgttatcacctgcgatagccgaagcatgcctacaggattaatgttgccactatatggcaataccactcaaaacgaacgctttcgtcagcagcttgatgcttctctgcccctcaaaaaacaattgtggcagcaaaccaccaaatacaaaatagaaaaccaagctgctgttttgagaaagcataccgataccgaaaccaaatgtatgaaaacgtggggagaggatgtgaaaagcggtgatcccgacaatctcgaaggacgggcagcagcctattattggaaaaacctttttggagtcagcatacccaactttacacgtggtcgcgagggcactcctcctaacaatctactcaattacggttacgccattctgcgggcaattgtagctagggcattagtctccagtggactactccctaccttaggtattcaccaccacaatcgttacaatgcctactgcttggccgacgatatcatggagccctatcgtccatacatcgacgagttggtctacagcattgttgtcacaaaacattcttattcggaattgaccaaagaactaaaagctgaattattgtctatccctactttagaagtcacgatagccggcaaacgcagtcctctcatggttgccgtatctcaaaccacagcttctctctttcaatgcttcgcaggcgaaataaagcatatagcttatcccaaaatgtaatggaccgttttagtgaatatcgcattatgtggctactagtgttgttcgatttacccacagagaccaaaaaggaaaagaaagcctacgttgatttccgtaagaatcttcaacgagatggattcactatgttccaattttctatctacgtgcgtcattgcatgagtagcgaaaacgcagaggtgcacaaaaatagggtcaaatctttcctacctcaacacggtcaggtcggaattatatgtatcaccgacaaacagttcggaagcattgaattgttttatggtaaaaaaacacaggaggtcaacactcccggacagcaattggaactgttttaaaacaaaaaatcccgcattacacgggattttatagagataacagttttcattttttaattctaatacgactcttatcttattgatatttaatataatacacacttcgtgctgttatcaataagacaaagatactaatttgaaagcaattcacaacaaaaactttttatcaatcttttcttcgtcgctgttatcaataagacaaagatactaatttgaaagcaattcacaactttctgccttttttgccatatcagttaaagctgttatcaataagacaaagatactaatttgaaagcaattcacaacagcaattgttccggattatcatgcatcgctgctgttatcaataagacaaagatactaatttgaaagcaattcacaacga

SEQ ID NO: 1355 - DNA, 16155 bp, synthetic construct
  source 1..16155: mol_type = other DNA
  misc_feature 1..16155: note = Synthetic
tccttctaggtctttgctaaaagaaaattctacactccaatcatgtggtaaacgaacgtctcgccaatctgtatcttttaaaggcaaattagaaggaagctctgttcctttttgtaactggaatttccaatcaaaattaaaatcgtgttctctttgttgtgctgtcattgtggtagaagctaacaaaatagctactaaaaccttagctcctcttaggataagtctcctcatgttctatactgatttgtggttaagcaatgaatgcccaccttgtttgggcgagcattcaaaaattaatattttggatttttggtttctattttatttcaattttaattgataatcgtgtgctccgggagcaaaattacttctaaaaacttctgttcctgttcctctttttccccagtttacttctactctattatcccccaacaaaatattggtcaatttttctttcatttgttttacaatcttgctatattttttattgtaagcaaggttgttgagttcttttggatcttttttcatatcgtacaaagccatgtctagctctttgtctgtagcggttaaagcccattccatgttttctccacgtttcttattaggacgtgtttgcatagaaaacacataatcatgagtacgaatatatcctcttggccctgtaactgcatgcccttcccctagaatataatctcttttgggtgctttttttgaggctactttttgcatgtctactccatctaaatagctgtaagactccttttttaaatctgctcctcctgcagccataatggtcggtgcaatatcaacaaattcggtaaaatctttcactacttttccttctggaaaggcttttttatcggaggacaccaccacaataggattgtgactgtcaattttccaagaagtaaatttagacaccgctccgtgatcgtttaacttccaaccgtggtctccacatacatatacaattatccattcttgttggtttgccttactgtaggcaataaaatcatctacagactgaccaatcaaagcatcaccgtaggcacaaaaagcataataatcttgaatcattttttgtttttgttctgatgtgtagtgatcggaataagaagcttttacttgcttctgcagttgcttaggcattttttgcaactcctttgtatcaaaattaggtactttgtaactatgtttctgaaaacgctctctgtaactcgccgggggcaatacaggcgtatgtggaaaatcaaatcctatttgacaaaacaaaggttttgaagtgttaactccatgaaacgttctagacccagccttaaatttttgattttgattctttaaaaaatctccaaaaatagatgcgtaatatccgtctctggttttcccagctttccttggactaaccccactaataattggagcagaaaatggtgttaaaggccctttctttttgttgtactccataaacaaatcatacttttccaccactttttgtgcctctcctttgtgttctggaaatcgtgcttctaaatcggcagatcggtattcaaactttctatcttcggttacaaaaaactccatttgtttgatgggtttctttaatttttctccattcaactcgtaaaaccaatcttttccccaatcagttaaaccatctttgcgcaattgtttaaagctaatgtcttgttgatacattcgagctgcttttgcccctttagctgtcttggtttttaaacgtactcctaactttcctatgtgtaaggtttggtatcccaaagactccatctgttctggcaaagttggtttaaaatgggctgcattgttgttgtgatattcaaactcatatactccagaacgaaaagtgtaacgcccgtaatgcatcagtgcacgagaaggagcacaacctgttgcttgacaataagtgttgataaacgtagttcccattttggttaaacggtctacattaggagactctacatatcccaactcactcatttcttttcccgtaagtattttgttaaacgctcttatggcatcgtaacgttgatcgtcggttacaatccataaaacattaggttgctgttgtgcaaacgttatttttgaacataagacaaacgtaaaaaacaacactttgttcattctattcggtattttcataaacttgaattttaaattattttttgtttcctcatagattcaaaattctgaactattttggggattcaagtttacttttagaaagataaatttactgtaaacctcataccaaactaaaacacaaatggtcaacttactacctctattgatgaatctttactgaacaacaactagacaaacgaatcgcaaaaaaacaaacccttttaaaacacactcgttttaaaagggttggcatgtatatgcttattatcttaatctaaatccaattgaaaatcatgagcccctggagcaaaattacttcggtaaattttagttccagttccccatctttcccagttaatttctacacgattatctcccaacacaatgtttagcaacttctctttcattttctgagccacctttttgtattttttatcaaacgctacgttgttcaactccattgggtctttggttgtgtggtacaatgcaggatctaactcttcccaagaagcagacagtgcccattccatgttctctccttcttttttgttaggtcttgtttttaaagacaaaacgtaatcttttgttcttatgtacgctcttggcccaattacagcatgggtttcccctaaaacataatctcttctaggagctttgtttgctgctgttgctgccaaatccaatccatctaaatgttggtattcctgtttagacaagtctgctccggctgccttcaatgctgttggggcaatgtctacaaactcagtaaactctcttaccacttttcctgcaggaaatttctttttatcggaagaaattacaataatcggattgtggctgtctagttcccaaggcgtaaatttagaaatcgcaccatgttcgttcaatttccaaccatgatctccacaaacgtaaatcaccatccaaggttgattgtgttttttactataagccttaaaatcatttacagcttgtcctaccaaagcatctccataagcacaaaaagcatagtaatcctgaatcattttttgtttttcctcatcggtaaaatgatacgagggcttgttgtttaacaaccttttaatttgttgtggtacatctgccaattctgatgtgttaaattcaggaaccttataggtatgctttgcaaaacgagctctataatcagctggaggcaatacaggcgtatgaggaaaatcaaagccgatgtgagcaaaaacaggtttcttaggatccactcctttaaactttagcttacctgcatgaaactcctgattttcgttttctaaatactcgtttaagaagtgtgcatagtacccatctctggttttccctgcgggttgcggacttactccagaaataatcattcctttgtacttagatggtgcttttccttttttgtaatgccttagcaaatcgtacttttttgtcacctcatccgctacatgtttgtactgatctgtttgttgatttaactgctccgaaacatattcaaactttccttctggtgttacaaagtaagacatgtctttaataggtttctcaaacgtttgtccttctacttgtttccaccatccaccacctccgtagtctgtaaaaccttcttctcctaaggatctaaaatccatatcggtttgatagactttatgagttttggtttttccatcaggacgtaatccttttaaacgataacctaattttcctacatgaaatgtttggtatcccaaatcggccaattgctctggaaaagaaggtcgcatatgctcggcagcgttgttatggtattcaaactcatacacccctgaacggaacggatatcgtccttgatgcatggctgctctagagggtgcacagcctgttgcctgacaataggtatttataaatgttgttccttcggcagctaatgcatctacattaggagattctatataccccaattcgttttcttcttttccgtgtaatgcttggttaaacgtttttacagaatcgtaacgctggtcgtcggttacaatccataaaatattaggttgttgctgtgcatatatttgcttagcccccattattaacaaagccgttactactagtttattgaatgttatcatctgtgtttaaaatttagtgagataaaaatacaagaagcaaaacaaacctaaataaagatggcatacctttccgtaacacaaatgatttcatctttaatttgtctatgcaaaatctatctttataaaaactttacaaacttagtatagtagtattttttgagctctagttttaccattcaaagacaaaacaaccatgtatacgttggttgccaagttggacgtgttaattctatacactgagctatgttctcctgtatactgatgtacttgctgccccaagctattaagtattcgcacttgtatttgctgtattttgggttgatgtatgtacaccaccaattcttgaagttcttgatttatttctaaagaaaattcacgctctgtttctataggttccgatttttttaacgaatttataggctctaaaatccataagctttctgcattggtagcacttggctcaccgtttgttttggcaatttctaactgagctgatgtctgggattgaaacaacctagatttacgttcatttccaccaggcattaattcgtacatttctagaccattttgttcatgttttctaaaataccaaaaaggcaaagccattacttgatttttgggataactttgtttggcataaattttctcgtctgttccgttgtttatatctcctagtgtataacctctgtatacttctaaataatttttagttgctgtattttttagatgatggtagtagggatatttaaacgctatttcccaaattgcggtactgtctagaggcttttctgccaccaaacctaccgtgtctttttcctgcaaagctactaggtacgctcccgtagctttgttttttatatagtatttagaagacacctctaaagtagattgtgcatcatgtaacagcacttttttctgaatcttagcagatggatattctacagtattagataaatctccttgccattctttgtaagccaatattccatcttttgcagacaaaccagtgttttggctaaacagaaggttttttgtaggcaattcataagctaaaaaagtagattctcctccgtgatcgtaagtaaaatcaaacgtaatgtcattgggattgctcgctttagcttgactaaaatcgttgttctgaaagattacgttgtaaggagcattgctagatataatccatgcataggttcctttccaaacattattggtaatggtaatatcatgcgcttgttgggtttctctatctatgtataaacctctagctggcttgatatgttcaaaggtattgccatcaattaaaaaatgatgtccaaattcttctatatgaatcatatctacatcttttctatatcccaaaaagtgattattggttacgtttacataagaacacttagacgagattcccaaaccagtaccatctaacaaacaatgggtaatggtacttccattttgattccacactacaggatattcgtcatttccagcatccaaagagatggctcggacgttgtaatttaccgcatcaaaatcgggtttaaaaaagcaatgactcatcaaaaaatttggagcttgattcaaccgtcctctacgatttaaaaaataacctccctgagaaaaattctcaaaagaacattgacgaaatgtaatacccgcaccactacctccaaacacctgaacttttccattttttagtcgtaggttttcaaaaactaggttttgataatgcaagccattcaaatcatcatctccatatgtagtatgcgcaacccttacaaatacatagggagtagtggctgctgcttgtagttctaagtggcacaaacgcacctgatgggaacgaatgtgtaattgttttaaattctgaaagctggtttttattccgtaagctcctttgtgtactgcattaagggttggcacaaaaccactaatgcatactgctttgtctatagcaaaggacttgccttgaaaattgtacaccgcacttttaaacaacagagtatctccttcacgagcattgctaattgcggtttgtatgttgcttaccaaagtacttcctgtacttgttggatacaaggcatcaaaatcaatcaatgtagtgctaggacgactggctacaatgtttaaaaaataattgtagtttaccgttgcatgtccgttaaaagaaacacttacttgcagcatttgtgtgttggcatgatctccatcacccacgcttaataagtaatcttgtggtacggtaatttgatggttgataagcccgttgtaaggtgcttgtgtagcaacttctacttggtgtacttgcaatggattgctccatgtacctttggcaaacgttagcaaacggatacgcactacttgagcagtagtctctgtatacgtgccttttacattaagtgtttctcccctagcccataacccaatatgatctctgtgtttgggataagcaaaaccgcttacttctgtcacctccacatgctgagcccaagaaacaaaagacatcaacaacccaaaaagtacaggaagcaagcgtttcatcgtgtgttgtttttaatgtttatgtgttcctaaaatacgttctttctgttttttactcaacccttgtcggtaatacacatcgggtttgtgatttacacggtgttgtttcatttctggatcgtgtatatcgcgacttaaatcacaatcaaaacgtaccaacatagaatggaaggtattccaattggttacattgataaaatgtgccattccccatgtaattcctctaccatctttggtgttggtaaacgcatcgggtacatagggtgctgctgcgtacggcatcatttcggtaattgaggcaatctcaaaatttacccaatctttagcatattgaatggtgttgtgctctggtccgtctttgtacaccaatgctgccactccttctttaaacggaaacaaagacgtttcgtgtccagaagtaatcaacggatttagtggatgttttttaaaaggtcctagaggattatcagcaatagccaatccttgcatacgtaccaaatctggtttttctccaaaatccgacttgtaataaatgtaaacttttccattgtgtaccaaaggatatgggtcgtgaatggaatactgatcccattctcctggtgctccgtttggaatgacaatcttgttgtacggagtccaaggtccttcaggagaatctgcccaagaaaccgctaccggacaatcgtctccacgctttccactagcctccataaatccttgatagtacaaatagtattttccttcccactccaaaatatcagtagtggttaccgatctccatccaaccaagggtttttcgggtcttttgatggctaccccttgctcttcccatgtaaaaccatcggtagaagtagcgtaccaaatttctgccaaatcccaatcagacgagggaatggtatcgttgcttttggctgccccttgtggaggtgtaggtgtatttctatacgtataccatacgtagtattttccgttgtgtttaatgatttttgagggatctctacgcgaaattgttccatcgttgttatggtaatcaaaaccttttaactgggtgtatttaaactgactaaacagttcgttattatgtggttgcggtgcttcgtaatcggtataaatacgttccatagctgcactcatgggtctatctggtttcttttccggaagaataaaaggaaatgctcctttggattctgtggtagtgctttgttctgttttagaagtctggcaagaaagcatacaagctaccactcccaacaagcttaaggtcttttttaacattgatttttgaattttgtatagattcttttacggttttcacaaaaataacaaagaaaagtcatctttatggcaacaattgtatccagtagttcttaacaaaacaagccctctaattcaaaatcctcagaaaatcaagtatttatgcaacctattctatttacttctgttctttgcattgggttctaaaagttgctatgttgagtttttatctactcaacacagtttccatccttcctatttcttcctaaaaatcaataaaaaacatcgtgtacataactacaaaagcagcatcaataagttatttgtttttgcttactttctttttgataagatacaaaatagttagacctaaaaccaaggctacaatggcaataaactcatctttggttaaattggacaatacccaaacaatggtggctactgctaaaatgggaattagcaatccgcctggtgctttaaatcctttggtatctgacaccatttttctcagcttaattaccgataaggaaactcccaaatataccaataaaatagtcgcactagaaaaaatagccaactgttcaaaacctcctaaagaagcaaacaaaaatcctaaactagcataggtaataatggctacgtaaggagttttaaaaagtggatgtgtactagccaattgtggtattggcaacacctgatctttggctgctctgtacaaaatacgtggcatgcttagtacctcgcctgttacaattccaaacatcgatatggctgcagcagctgtcataatgcttagccccacaggtccaaacacttggtttgccaactgtcctaaaggattttctttgtgcaacagcaaatcggaacctaacactcccatgcttacggtttgtatggcaatgtagagtactaaaattcctgtaatacttaaaaaaatagctttaggaatggttttgttggcttttttaacctcaccactaatagacagtcctgtctctgctccttgaaaagcaaaaaacaagaccaaacacacctttccaatagtgcctaatgacggaatttcttctatggccaaatacgttgtatttaccgagcctgtagcacaagcaaccaataccaaaagggacgtaattttaattattgttaacaactttaccaaattcattccttgcttaattcctcttacgttgatagctcctaaacctgcaaaaaacaaggcaaaaaacaatacttttacccaagctgtctgaaaccaagggtttacagaacctaccatggccattagggcattggccacagctgcatctgcagaaatggtagacaacacaaacattaccgaagttaaaaagcctgcataggggccaaaagcggtgtggatataagcataggctcctccagaaacggtgaccttgctccctacctcggcaaaacaaaacatcactaaagccaccaacaaaccacaaaacaaataggcaaaaatactggccgttcctaattgtgctgccaccacagcaggcaaggcaaaaattccgccacccactacaatattgatgatgtttgctcccaagcctaccacatctacctctcgttttaagtcttcttgtgtatggttcatgtcttatttgtttagctagctactattttaaaaaacataaaagtaggcttttttttaaaatacaaaccctagtagtagcagtttagagggtgctatatgacagggatagaaaaggcaagtctatagcataaaaagaaaacgacaactttagttgccgttttaaatgttttcacaacggaataatccttattgtgaattgatttcaaattgtaatgctaatatataaaaaaatatgatagttgttaacttaaattattatatttagaaatcttttaaaaattgcaactacaataacatataatataacaaacatctccttttgttaaaacagcaaaaggataaaataattggtatgaacaaaaaaatattaggattagacttgggaaccaattctattggttgggcattggttaaacaggatttagaaaacaaatatggtgaaataataggatgtggttcacgaattatacctatgagtcaagatgtattaggtaagtttgatgctggtatctcaatttctcaaactgctgagagaacgaattatagaagtgtaaggaaattaatacaacgaaacaccttaagaagagaacgtttacatagggttttacaccaattagattttttacctaagcattacaatgattctattgattttgagaaaaaattaggtcagtttaaaactgacaaagaaactaagcttaattactttgttaatcagcatggtaaacatgaatttttatttaaagattcatttaatgaaatggttaaagagtttaaagaagaacaacctgaattattttatataaaaaacaatggaaaagaaaccaaaattccttacgactggactatctattatttaagaaaaaaagctttatctaaaaaaatatctaaagaagaactttcttggcttgttttaaacttcaaccaaaaaagaggttattatcagttaagaggggaaattgatgaagaaaaagaaaaaaacaaacgttatgaaaaactgtatgtttctgaagttgtaaaaacaaataatacaataaaaaaaacaggagaatatttatatgatatttattttgataatggttggaaatatgaaaaacaaaccacaaaaccacaagactggcttcacaagcataaagaatttattattacaactactaccttaaagaatggtgaaaccaaaagaacttttaaaacagtagactctgaaaaagattggatagccatcaaatctaaaacagaacaagatataaaagagtccaacaaaacagttggagcatttatttatgacacactactaaaaaatcctactcaaaaaataagaggtagtttagttaaaacgattgaacgaaagttttatcgtgaagaatttgagaagattttaaaggaacaaatcaagcaccgtcctgaaataaatgtaaacacagctataggaaaagaaaactatacaaaatgtgttacagaattatatccacgaaatgaagcccatgcaaataatatcttaactaatgattttaattatctatttacaaaagacatccttttttatcaaagaccattaaaaagtaaaaagtctgaaatagcaaattgtcaatacgaatatagaacatatattaaaaaaaaggagaaaacaggaaaagaagaaagggtaaaacaacctttaaaagctacaccaaaatctcatccattatttcaagaatttcgtctttggcaatttattcataatttaaaaatttatattagagaaactaccgttggtaataaacctctatttgatgttgatattactgatactttttttacatcagagaatgattgggctactttatttgaatacttaaacaataaaaaagagattgaacaaaaacatgttcttgaatatttagtttctaaaaaaattatttcaaaatctgaaaaaacagattatcgttggaattatgtagaagataagaaataccctggtaacgaaactcgtgtagattttataaatagattaaaaaaagttgaaaacttaaacgttgatgagtttttaacatcagaactggaatttaaactatggcatattatttactctgttacagataaaaatgagtatgaaaaagctttagaaaattttgccattagacaaaacatagataaagattcatttgttaatagctttaaaaaattcccaccatttaaaagtgattatggagcatactccacaaaagcaatcaagaaattattgcctttgatgcgattaggtaagttttgggacggtagcgaaatacctaaagtagttgttgaaaaaataacagatattaaaacaaggttaacctctgtaaattatgatgaaagtctatttaaaaaagatgagaaaaaaatacttgagactattgtagatgacattactcctaaacaattactaaaaagttttgttaagctaaaaggtaaaaatcatttagcaggtttaaatacttatcaagcttgttatcttgtatatgaacgacattctgaaagtagtgatattacgcagtgggaaaatcctgatgatattgattctttcttaaatcactttaaacagcatagtttacgaaatcctattgtagaacaagttgtaacagaaacattacgtactgttagagatatttggaaatattacggaaatggaagccctaattattttaatgaaattcatattgaattaggacgtgaaatgaaaaatccggctgacaaacgtaaacaaatgtcagcaaaaataaatgaaaatgaaaataccaatcagcgtatcaaagggattcttcaagaactgatgaatgatggtgttcaagatattaagccctactccccaagtcaacaagaaatattaaaaatatacgaagaaggaatttcacaaaatcctaatgttgactattcaaaagtaagtgaagatgaaataactaaaattaaaaaaagtaacaaccctaccctaaaagaaatacaacgctacaaactttggttagaacaaaaatatatttctccatacacaggaaaaccaataccattatcagaactttttacaccagcttatcaaatagaacatataatacctcaatctaggtattttgataattccttaagcaataaaatcatttgtgaaagtgaagtaaatgaggataaaagtaacaaaactgcttatgagtatttaaaaacaaatggtggtagtattgtacatggtcatcatttactatcacttaaagaatatgaagatcattgtcaacattactttaaaaagaacagaacaaaacttaagaaccttttgagtgaagaaataccagaaggatttattaatcgtcaattaaatgacagtagatatattagtaaactcatcaaaggtttactaagtaatattgttagagaagaaaatgaacaagaagctacctctaaaaacattgtacctgtaactgggagtattacgtctaaactaaaacaagattggggattgaatgataaatggaacgaaattatagcacctcgttttaagcgtttaaataaaatgaccaactctaacgactttggttattttgatgaaaaaataaatacgtttagaattcaagttccagatgcaatttctagaggatttaataaaaaaaggatagaccacaggcatcataccttagatgcattggtaattgcttgttgtacaaaaaaacacatacaatatttaaactctttaaataatgaaatcataaaacacgagttaaaaccatctatattaattaaaaacgcacaaggtgattacaccaaacactttatgttgccatggaataattttcctatagattgtaaaaatgctattgaaaacactattgtaagctttaaacaaaatttacgtgtcattaacaaaacatctaataagtaccaaagctataaagatgaaaacggaaatttaagattaggtaaagatggtaaacctaaaaagggattaaccaaacaaactaaaggaaataattgggctgttcgtaaagctatgcatgaggatactttttatggcgaaattgtagatggagaaaataaaggaaaattaaaaattaaaactttactagatactagttttgatgtaaagaaaattgaagacaaggttttagataaatcaataagaactattttgattaattatttaaaacaagataagtacaaaaacttatctaaaccccacgaagaagctttcagtcctaatggaataattgaaatgaataaaaatataatttcactaaacaataatattcctcacaaaccaataaaaagagtaacattaaaacatgaaaaaggtaaaaaattctccataaaaactttacttgataaaaaaacaaaatttgctaagtcagctacaggtacaaatgttttcttctgtatctataaaaatatcaacggtaaaataaaataccataccccaagctttgaagagattattgaaatacaaaagcaagagtttgaaataaaatataaatcaaaattaaatgtacctgaaactctcttcgacaaaaaagaatcttttgaactattattttacttacaacctaacgatctagtctatttacctaatgacgaggaactaaaaaacagacaattaattgactttaataatttaaacaaaaaacaaatcaagagaatttataagtttactgacgggtctggtactacagctaatttcattccttatcaagttgctaaggttatttttaatctaaacaaaaaagaacaagcaaaatcatcttttaaatatcctattcaaaatgaatttggagtaggaagtccacagtctaaaaatcaaaaatctattgaaggtattcttataaaggaaagatgtattaaattaaaaatagaccgtttgggtaatatttcaaaagcataaacgaatgatcaaacgtaccatctacataggaaacccagcccaccttaaactaaaaaaccaacaactattggttcaagaacctaagggcgctatcaaaggaacggttcctatagaagacatggctttgttggtgttagatcattatcaaattactattagtacacaggtaattaacagcttacaaggaaatggtgtatgtattgttacctgcgatgcacatcatcttccttttggaatcactttaccgctttacggacatagtgaacattccgaacgtgttaaatatcaattggatgtaagcgaacctttaaaaaaacaattatggaaacaaaccatacagcaaaaaattaaaaaccaagaggctttacttaaactaaacaatcgagtccatgaacctatggaaacatacagaacggctaccaaaagtggagatacaaccaataccgaaggaaaagctgcacagcactattggaaacatttatttcccgagtttcaacgcaaccgatttggagatgctcccaatgcacttttaaattttggctatgctattttacgaagcattgtcgccagagctttggttagttccggattattaccagtattgggtttgttccataaaaacaagtacaatccgtactgtttggcagatgatattatggaaccctaccgaccctttgtagataaaatggtggtgaattatgtaaataataacggagaaacggatgaattaaccaaagaggtaaaagcctatttgttgggcattgctacgcaagatgtttggatagatggacaacaaagacctttgttagtagctgttaccaccacaacagcatcattgtacaaatgttatataggtgaactaagaactattaaatatcctgaactagattgataacctatgtctcaagacagatttaacgcttatagaattatgtgggtattggtgttttttgatttgcctaccgaaaccaaagtagaacgcagagctgccaatttgtttcgtaaagagttgattaaagatggatttgatatgtttcaattttccatttatctacgcaattgcccaagtagagaaaatgccaatgtgcatatcaaacgtgttaaaaatgccttgcctaaacatggtaaaattggtattttatgtgttaccgacaaacaatttggaaatatggaattgtttcatggaaaaaaacagaccgatttacctaataccacacaacaattagaattgttttaaaacaaataaggtcttcgagcgaagtcgaaaagtaagcattcattataaattcagtgatttagaattaaaaaacaaaaccttagaatactaaaaaataaagttttgctcttatttttctcattcaaaaaaataatccccaaccctctatttctctagagttttggggattgaccttgtgattcctcacataaaaatacaatttgaaatcaattcacaacacgtagtcacctacgtatacgtgtccgtatcttgtgattcctcacataaaaatacaatttgaaatcaattcacaactttaacacctttaaacactactgcatctgtcttgtgattcctcacataaaaatacaatttgaaatcaattcacaacccgttgtcatttacaaaaacgcaaaacttc

SEQ ID NO: 1356 - DNA, 16130 bp, synthetic construct
  misc_feature 1..16130: note = Synthetic
  source 1..16130: mol_type = other DNA
tgcgttgcagacgttgaaagacgagaagctgaaagacatcacgactccgagcgtcgagaatatgttgaacggtaaggtttccggtgtatatgtagctccgggttccggtcagccgggtgcaagtggttcggtagttgtacgtggtcaagctacattgagtggttctacggctccgctgtgggtaattgatggtgtaactgttggtaccgatgccggtttgttgaatccgaacgatatagaaacaatgaccgtattaaaagatgcggcttctacggctatttatggttcagaaggtgcgaatggtgtaatccttattacgactaaaaacggaaaaagcgggaagatgtctgtcaatgcttcagtaaagatgggtgtcagcacgttgaataatggtaatttggaggtaatggatggtgccgaattgtatgattactacgcatctttcaataaccaagaaatgattacgttctctcgttggaatccggaattacgcaatagtaattttgattggtgggatttggcgactcagtccggttttacgcaagattacaacctctctttctctggtggtagcgatacttacaattcttatttctcattaggttattacgatgaagaaggtgcggtaaaaggatacgactattctcgttacaacttcttataccgttctacgtataaaccgtttaaatggttgactatccgtccgtcggtacaaggtgctttgcgtgatgtaacggatgcgcaatattcggtaacagccatgtattctatgttaccttgggatagcccatacgatgaaaacggcgaattggttccagaccgttaccaaggatgggtaaatagccaatctactaactacttgaatgatttggcctatgggaaccacactgattataagacgtatgagttcttaggtagtttcaactttgatattaagtttaccgattggttgacattgtcttctatcaatagttataaataccaaggttactactatcattcctatacagatccgcgtagtaatagtggtttaggtgtaaatgggcgtattgatgaataccaaagcaatacaacccgtcttttgacaaactcttatcttacattcaacaagacatttgataagcattcggttaatgccgtattaggatacgagtataagacttactcagcaaaagttatccaggcaattggtactggatttgcatcaggttttgaagtgttggatgtagccgctttgcctgaatctgtcggtggcagtttaaatgaagaggcggtacaatctgtatttttccgtggcaattattcgtatgataaccgttatgtagcagaactctctttccgccgagatggtgcatctaactttggtgaagatgcccgttggggtaatttctattcaattagtggtggttggaatatcaatcgtgagaaatggtttgaagcggattgggtagatcaattgaaacttcgtgcttcttggggaaccatgggtaaccgtccgggtgaactctatccgcaatacgacttatattcggtttctgctaattataacggagttccggctattttgattagccaagtaggtaatccggatttgacatgggaacaaacttctaccttaggtgttggtttggatgcaagcctatttgaaaatcgtttccgttttacattcgacttttacaataagtatacaacagatgtattgtatcaagtgccagtatcaggcttgacgggtgttacatctcgttggcagaatgtgggtgaaatcagtaaccgaggtgttgaattgtctatcggaggcgaccttattcgtaccaaagattggacttggagtattgatgctattgtaggtcataactccaataccgtagaaaaactgtatggagatgacccgaatctggaaattatcagttcaggaggtgaattaggcatagccggttcggcttctagtatcttgaaagagggttatagcagtgcctcttattatatggtagaatgggcgggtgtgaatccagaaacgggtgcgccgcaatggtacactactgccgaagatggtagccgtgtgattactgaaagttacgaccaagctgattatattattacggatgcatacaatcctaaattgtttggtagcttcaatacctacttacgttggaaagacttggatttgagtgccgtgtttggatattcaattggtggtaagatttacaactattcccgtcaggaatacgattcggatggtacatataccgaccgtaaccagatgaaattgatggatggttggagccgttgggaaaaaccgggcgatatcgctacgcaccccgttgcttcttacaataaccaatcaggagccaacaaagcatctacccgttatttggaagatagcgatttcttaaaattacgttcgctttcgattggttacaatttgaagttgccagaatattatattcagaacttgcgtatcttctttacaggagaaaatctctttacagttacgggttattcgggtgttgacccagagcttccagcaagcgatggtagtgtaatcggaacaacaggtgcttctgtctatccttctactcgtaagtttatgtttggtttgaatgtaacattttaataagtaagagttttatgaaaaagaaaaatataacgaagatattgcttgcaaccttttcggtaggagtcttattgacttcctgcgatatagagcggttgccgaatggaagtatggcttccgaagatgtttttggcgatttggacaccaacctgaaaggaatggtagacggtgcttatgcccagttaaaaacttggtctgacccgatgcatcgtttgggcgaatatgccggagacaatatgatgattcgtggatcttctacggatgcgttctatgagtttatttcttatgctcgtactcccaataactaccgtttgcagaatttttgggattatggatataaggctgtggctcaggcttcgaatattattgatgccgtagctgaaggacagagtgcagagattgataacaagttgggcgaatgctattatatccgtggtatgatgtatttctatttgacccgtgcatttgggcgtccttattatcaagctccggataagaacttgggtgtacctatcgtgaacgggacgccggacgatatgaataaccttcagttgcctgatcgttcgactgtagcacaatgctatgcgcaagctattggcgatttgcggaaggcagaaagtctgttgacggaaaacaacggaccggcgtatgcctctattggcgccgcgcaagccatgttgtctcgtgtctacctctatatgagtggtacgtatgagaatccgaatacgcaatatgccgactcagctgtctattatgcttcgcaagtaattaattcgggtacctattctttattacctcgcagcgagtttatggtttacaataccatcgtgccagaaaacaatccggaggcaatcttcgtggtaaaacgcgtatcaactgagttttcaggtgacgaccactattatggtattggtggtatgtatgccaatattggtggtatgggttggggcgaaatgtttgccagtgccaaatatatcgatttgctgaacgagacgggacgtaatgattggcgtccggatcggaaaacaattgtagacgcacgtgctaatttcatcgaaccgcaatatgtgacggacgaaaatggtaattatacaccggtcttccgtttcattaagaatctgtataatacaagcggagtacaaacgaattatggttatgtacaagccacattgcatcagaatgggaaccaatattcttgttcagagactattgatggcgtcgaaactacctatcagatgactccggtcaacgaagaacaacaaatctattcaataaagtattctgatggtaatacttataccggtgtgattgattatgaaatgactaccaaccgtagttatccggagttctacatcgtaaaatgttcacgtgaaggagaggaatctcatttgcattcgcctgtcatctcccgcttaggggaagtttacctgaatcgtgcagaagcattagctaaattaggtcggtatagcgaagcgttgagcgacttgaatacgattcgtgaacgttcgattccgggtgcaggctatagcactttgaatgcttccaatgcaggtgaactgatcgataaggaacgtcagttggaattggcttaccaagcagaacgcagctttgatgtgttccgcaatggcgaaccgttgacgcgtcactatccgggtccgcacaacgcaatggaagatgtaccagctacagattatcgcgtgacatattacattccgcagacggctatcaactcatatccaagtggatgtacgttgacgcagaatccgacaagtaatgcaggtgtaatattgaattaatagatttagtcaaataagcaaagggatgcgtctatccaaacaggcgcgtcccttttgttttgaaccgaaaggagtgtcaaatatcgttcctgctgcacacgaattttcaagcaataaatattcccataaaagcacaccaatgcggtcgtgtgtcatgcacgaccacgttagtgcatttcgcctgatacgggtaaggtgctgcacacgaccgatttggtgcgtttttcagaaaatgacttattctcgagggcgaacgataaaatcgtgggtggctttccgaggggttttatagggctggtagctgaggttgtattgggtcgtaagttcggcagtccaatgtcctgcggcaagcggttggagcagtgtgacggttacgtgcgaacgttggttgaaggtaatccattggcgctcgatttcaacgacttcgtccgtttcggaatagaatcggatgcccacgtcggggtggtctcccatgatgcggatgtgtttgccgaagaggtggatttgcggcgaatccgtccagacggtgtcgcgttggtagcccacatcggtggaatagaacgtggcgcacacgttggagatgtagggctggcgcggcggcaggttcatcaggtttgtaccctcgagttgttgctccatcaggcgggcgaaaggggagggggtgaaggtgatgtggaaggcatggcgtgccgggtcgaagttgtccgattcgtcgtcgaaccgtcctttcacgctgagcgagaggatgccgataccgatatccaccttttcgccttggatgagcgcgttgtagatttcccgcttgagggaagtgaacgtttcgatgtaggtctcaagacggatttggcttctggcacgcacgatgcgttcggccaggtcgtggatgtcgaccgtctttttgtcgtgtatactggcacgataatagacggaaccgtcgaagtctatctgctggctgaggcttaaaggaataggatctactcctttccaatctacgccatgtaactctttgtccataaaaagaagatagaaataaaaaagtcggtgcgggcgcacccacaccgacatcaccatttaaaaactaaatatgctgaaataaatgctttctgattatttcttgaaatagcggttgaataaaccttcgaagcctttgccgtggcgagcttcgtctttagccatttcgtgaactgtatcatggatagcatccaaattcaattgtttagcacgcgtagcaatgcgcttcttgtcttcgcaagcgccgcattctgcgttcatacgcttttcgaggttggtcttcgtatcccaaaccacgtcgcccagcaattccgcaaacttggctgcgtgttcagcctcttcccatgcgtaacgcttgaaagcttcagctacttcgggataaccttcgcggtctgcctggcggctcattgcgagatacatgccgacttccgtacattcgcccatgaagtgcgcgttcaagtccttaatcatttcgtcgtcgcaacctttagccacgccaattacgtgctcgtcggcaaacgtcaaggcgcccgttgtttctactaattctttaaacttgctctttggctgcttgcattgcgggcagaaatcgggagcttcatcaccttcgtgaacgtaaccacatactgtgcaaatccatttctttttcatatcgctaattttttattgggttattactacatttattttttgacaatgcaaatgtacgcattcctcttttattttccgagaaaaaaaggattgaattcttttatggcatgattgattctatttataagctggttgaaaatggcccattaggcttagtttggaagaaatctgcatgcatggatacacaaaatgcctctttcttttggaaaatagacttaaatcaattaccttcgaagcgctaaaaatagatttaagaaaatgaaaacacgaaactatctgctatcctgcctgtttactttcggatgctctgccttgtctgcgcaagagcaaactttggccgatacgactcagcagacgaatacgttgtatgaaatgtggaagaaggaagaggcgcgtcccttcacttcgcatatgaacatccagttttgcacctcgttcacatcccaattccaggactttgccgtcgaagaggcaaccttcaagctgaaccgtttgcggatggaaatattgggacgcttcttgggaaagttcggctatcggttccgttatacttataataaatatacgaatccgaacacggtggacaacctctcgacccatattgagctggcgaacatggactgggatgtctcgaagctcctgacattgaaagctggcaaggaacatttcttgctgggcggctatgagtattacgtcacaggaatactggtgcggcaattctccgatttcaacaataatacgcaaagctacctgacgggtatcaccggcacattccacctgacgccccgccacgacctctctttgcaagtggctaacaaccgggtggagacggaatcgcaaatcaatacgggtgaaggtcaagccagcatccccaaggttcctttgatgggaacggtgaattggcagggacgtttcttggacgacggggcgctacagttctattacggcgcggcagctgggcaaatcctgcgtaatcggaacatttattacctgacgtttgggaacgtatgggagcgcggcccggtcttggcttatctggattgtatgtactcgcgggaagaggtggattctaaaggattgattacggccatccggacggtaggtgaggacgaggagacgttgacggcccaatacgtccaatacctttcgtggattggcaacgtagattaccgcttgcacccgaagtggaatctgttcgtgaaaggggtctacgaatggggaggcgtgtacaagacgaacacggtatatgagcgcggaaagtaccggaatacatggaacgtccaagcctgcttggaatactatcccttgaagcggaaagacttgcaactatttctgcatgtgtcgtataagaaatacctgttcacggagcaggccgaagccttgggtgagaaggatttttcggagcaacaaatcatgttagggttgttgtatacgattccggtattctaacggatgataatatcgcattccctgttctattttgtttttattcctctgttgttatttttcgtttcttttgacgaacggcatgatgcggatgccgatttcttgaataccgggtaggacgctgtcgcgcattccttgccggaaactgaaagtgtactgccccgcgtatgggaaataatagttttcgcgaatcgggaagttggattcgtagagggatatcccgtggccgaaccatttaccgtattcgtcggccagcatgcattcgatggtgtctttttgcaaggagccaacgggtggttcctcgtggacaaaaagccagagattctggtaaggatactggttgttgttgcggatatagagctgaacgtcgtaaggcttcgtgatatcgttgacttcaaacgtaaagtaatagaccttctcttttctccattcggtttcgttgattacctgatattggttgtaaagcgtctccggttggcaagaaaagagaaggataagcccgacgagcattccccattctttaattcgcaggtttcgcatcaggggcaggtttgttgttattcttgttcttgttgtttttattcgcattcccagtaggttgtggtttgttccctgcttgaggttgcgatggtttttcgtttggagccttgggctgcttttgcttcggtttgttggccgcgttctgttttttattgtcgtttttcttttcagaatctccagctttgggcggattttgtttctgtccagcggcttgtggctgctgtttgtcggtgccctttgtctccttgttactacttcccgaacgtctctttttcttctttttcgagacattatcgaagcggtttaggttgtcttgctcaagaatatctttcgatttctgtttggcaggcttttccgtatcggcttccagcgaaagaggctttgtgccttgtttgttgagggcaatgacttcaaacgcgcgttcggccgagatagtgacaaggttggccgcaatcgacttgtctgttgagtaggtgatttctcgcttgaagatatccgttttgaaatgataataggtattgtcttgcgtttccaacgtgatttcatgcgatggcaagtgcttctgcgcttcgacatacgtatcgatttcaaagttgatgcaacatttcaatttggcgcattgcccggcaagcttttgcggattcatggagatgtcttggtaacgagcggcacccgtggctaccgagacgaagttggtcatccagctggagcaacacaattcgcgtccgcaaggaccaattcccccgatgcgtccggcctcttgccgtgctccgatttgtttcatttcgatgcgaacacggaaagtttcggctaaaaccttgataagctggcggaaatctacacgttcgtcggcgatgtaatagaaaatagctttgttgccatccccttggtattctacgtcgccaatcttcatgttcaatcctaagttggccgcaatttggcgggatcgaatcatcgtttcgtgttcttttgccttggcttcgtgatacttgtcgaggtcgttttgccgagctttgcggtatattttcttgggagcttggtctatgcggacgcgattctttttcatttgcaagagaacgagcttaccagttaatgtcaccgtcccgatatcgtgccccggagctgcttctaccgccaccaaatcccccttttccaacggaatatgggcattgttcaagtaataacctttgcgggtattcttgaattgcacctctacgaaatcggtagcgtcgatggcacccggtacaccgcacaaccaatcatacgtattcagtttgttattttgtatcttgccgcagcctttggcactcataccgcagctgccgttatctaatttgaattccataaaacttgtctattttcgagttggctacaaatgtacaattaaaatttgaaatggcagtaaaaaatagggaaggctgtacgggtttttctactttgggtagaggtatagggaggcaacttttcccaatacggcggaaagagaacctcaatacggcggaaagagaaattaacatatagccttcaaaagtgaatagatttgtttttgaattcaaatctaaaatcttaatatgtgaaataaagttaacaaacggaagaaaggtgtcggaaagttatgctgcataacataaaatgtatacttttgcactgtgtttttcatggtattagatttaaggttagcaatgaagattggttgtcgggatgacaaccatttcttttttatataggttccttcctcttttctcctttctaatatacatatattcaatggaataaaaaagcccaccgataaaggacgatgggcaagaacctaaatgttttcacaacggaataatccttattgtgatttgcttcaaattgtgggacaaaagtacatgattttttcgagaaataatttattctctcagaaaaaaatagtagctttgaggaaaattgattagatatgaagaatatattaggtttagatataggaacaaacagtataggatggtctgtcatttgtactgaaacgaatgaaaatggaaaagaggtttttaaaggcataagaattgctggaagtcgaattattcctatggatgcggccgttttaggggattttgataaaggaaatacgaaatctcagacgtcggaacgaactaccaagcggttgattagacgcctattggaacgaaataaacttcgaagggaacgtttacaccgtgtgttggctgtattagatttcttaccggtacattatgcaaaacaattggatagatatggtaagttccttgctaatacagaacctaaattagcgtggcatctaaacgaagagggaaattattcctttttatttcaaacttcttttgaagaaatgttagctgatttccgtcgaaataagccagacttgttggctaattcgaagaaaattccttatgattggactatttactatctccggaaaaaagccttgaaggagaaaattggtaaagaagaattagcgtggattttgttgaacttcaatcaaaagagaggttattatcagttgcggggagaagaacaagaggaggataataccaaacgggaggaatattttgctttaaaagtaatagctgtagaagatagtggagaaaagagtaaaggcaatagttggtataatgtaaagcttgagaacggatgggtttatcgtagagcaagtaaaatacctttggattgggtcggaaaagtaaaagaatttattgttacgactgaattggaaaaggatcatacagaaaaacgagataagaatggtaatataaaacgttcattccgtgctcctaaagaagatgattggggattgttgaaagcaaaaacagaagcagacattttagaatcggagaaaactgtaggtgcctatatttatgatgcgcttctatctaatcctgatggtaaaatacgcggtaaattagttagaacgatagaacgtaaatattataaggatgaattgtatcaaatactacgaaaacaacaagagttttatactgaattgcaagatagagatatgtataaagcttgtatagaagaactgtatccaaataacgaagctcatagaatgttgattgctgatcgtgattttgcttatttgtttgtagaggatattttattctatcaacggccattgaaaagtaaaaagtctcttattgctaattgtacttatgaaagttatacttatatagataaaaaaacaggagagaatttgaatatgccgttaaaatgcatcgccaagtctcatcctttatttcaagaatttcgtttatggcaatttataaataatttgcgtatttatcaaaaggaaggtattgtcaatggaaagttgacgaatgatatagatgtaacgcataagtttttgaaaaaagaagaagattatgtagcattatttgagtggttgaatgataagaaagagataaagcaagatttatttcttaagtttccattgttcaaattgaaaaagagtgaattgaacaatttcagttggaattatgctgaagatagaacttatccatgtaatgaaactcgtgcgatgattttacctcgtttggaaaaggtgggtatttcgaaattatctttgactcgcgaacaagaagaagcgttatggcacctgctatattcagtttcggataaagaagaattagttaaagcgcttcgttcttttgcaacgaaacaaggttgggcagaagattcttttgtagagtcttttcgaaatattccacctttcaagaaggactatggtgcttattcggcaaaggcaattaaaaaattattgcctttgatgcgaatgggaaaatattggaagtgggaaaacttggacattcagacacgagatagaataaataaaattttgactggcgaatatgatgagaatattaaaatgcgtgtcagggataaggcgattcatttggtagaaccagcctcttttcggggactccctgtgtggttagcttgttatattgtttacaatcgattttcagaagttaaagagattattaaatggaagaatccttcggatatagatgttttcttgcaacacttcaaacaacattctttgcggaatccaattgttgagcaggtgattttagaaacgttgcgtacagtgcgtgatatttggaagcagataggacatattgatgagattcatgttgaattagggcgtgaaatgaagaatcctgcggataagcgtaaaaaaatagcacaacaaattcaagagaatgagaatacgaatctccgaatcaaggcattgttaaccgagtttatgaatccagagttcgaaatagagaatgttcgtccttattctcccaaccaacagaatcttttgcggatatatgaagagggagttttgaatagtgtacaagaacttccggatgatattgcacttatcttgaaaaaattcaatgaaagtgatgtgaagaagcgaccttctacctccgacattctgcgttataaactttggttagaacagaaatatcgttcgccttatacggggtctattattccgttgagtaaattgtttactcctgcttatgagatagagcatgtgatacctcaatctcgttattttgatgattctttcagcaataaagttatttgtgaggctgaggtaaatagtttgaagggaaatatgttaggatatgaattcattaagaggcgttatggtgagagagtactattggctggtggtaaaatggtgtctatatttacagtagctgattatgaacgatttgtgaaagataattatgctcgaaatataaacaaaatgaaaaagttgcttatggatgaaattccagaacaattcattgcacgccagttgaatgatagtcgttatatcagtaaagttataaaatttctattgtcgaatgtggttcgtgaagaaggagaggaagaggctacttcaaagaatttgattgtgtgtacagggagtattactgacagattgaagaaagattggggaatgaatgatgtatggaataaattaattcttctacgatttatacggttgaatgaattgaccggaacatctcattttacttccttaaattcgaatggaaaattaattccttcaatgccattagaattgcaaaagggatttaataagaaacgtattgatcatcgtcatcatgcaatggatgcgattgcaattgcatgtgcaagtcgtaatatcgtgaattatctgaataatgaatcagcaagtaaaaatgcaaaactatcacgagatgatttgcaaagattgttatgtcgtaaagatgagaatggaaatcgtcttattaagaaaccttgggatacttttactcaagatgtttttgtcgtattagaaggaattattgttagctttaagcaaaatctacgtgttattaataaaacgacaaatcattatcaacattatgaagcgggtaagaaagtaataagcaaacagagtaagggggatagttgggcgattcgaaagccgatgcataaagatacggtctttggtgaaataaatttgcgacgcataaaaactgtttcgttgaaagaagctattaagaatcctcgattggttgttgaaaaggattttaagcgaaagttgatttctttattagctcaaagatatgatgaaaagcaaattaggaagtattttgacgataaccaggatgtttggcgagatattgatttgaagaaaattaaagtttactattttacaaaagaaacgagagatcgattctttgctgttcgcaagccattggatatgagttttgatagaaaacggatagaagaaagtatcgcggatacaggcattcagaaaatattgcttcgacatttggaacaaagtcaaaataattctgaattagctttttctccagaaggtatcgaagagatgaaccggaatattgtagctttaaatgatggaaaaggacatcaacctatttatagggttcgtgtgtatgagaaggcggataaatttgctattggtcagagtggaaataagaatgctaaatttgtagaagcagctaaaggaactaatttgttctttgcggtctatgaaacaatgctggaagacaaacagaccgggcaaatggttcggaaacgttcgtttgcaacaatccctttgaatgtggtgattgagagacaaaagcagggattgtcttctgcttcagaggatacaaatggaaaccttcctaagtttgtactttctcctaatgatttagtttatgttcccacatcggaagaaacaaaagctggaaaactcgaatttccgttggacaataaacgtatatataaaatggttagttgtacgggaagtgaagggtattttgtccctatttatatagctaatcctatagttcaaattgtggaattgggaagtaataataagtcccaacgagcatggtctggtgaaatgataaaagaagtttgcatccccataaaagtagatcgattaggaaacattataagtaatatttagtatctaacttgtatgataaagaaaacgctttatttgggtaatcctgcgtatttgtctttacgcaatgcacaattagtgataaagttaccggaagtggagaataatactacacttccggatcgtatgaagcatcagttaaatgtaacaaagcctatcgaagatattggagttgttattttagataatcgacagattactataacttctggggcgatggaagctttgttagaaaataattgcgcgcttattacatgtgatagtaaaagtatgcctgtaggattgatgttgcctctttatggtaatactacacagaatgaacgttttcggaaacaattagaagcttctttgcctttgaagaaacaactttggcaacaaactattcaacagaaaattcataaccaggcatccgttttgtctgcgtgtacatctgaggaaattaaatgtatgcgcgtgtgggaaaatagtgtaagaagtggggatcctgataatttggaagcacgtgctgctgcgtattattggaaatcattattttcggatgtcgagaattttactcgggatagagagggtgtacctccgaataatttgttgaattatggatatgcaatattacgggcgattattgctcgtagtttagtgataagcggtatgttgcctaccttaggtattcatcatcataatcggtataatgcatattgtttggctgacgacgtgatggaaccttatcgcccttatgttgacaaactcgtttttcagttgtataaggaatgtggtgagaagatagaattgactaaagaaataaaggtttcattactttcgattcctacattagaagttcgtataggaggaaaacgtagtcctttaatggtagcggcaagtcaaacgtcagcttctttatataaatgttttgcgggtgaatttcgtcgtatcatctatccggaaatctaatggatcgttttagtgaataccgtgttatgtgggtattggttctttttgacttaccaacggagacgaagaaagataagaaggcttatgccacttttcggaaacgattgcagcaggatggttttacgatgtttcaattttctatatatgtgcggcattgtgcaagtagtgaaaatgcggctgtacatataaaacgtgtaaaatcttttcttccggaatatggacaagtgggaatcctttgtattactgataaacaatttgggcaaattgaattgttttatggaaagaaatcccaagagataaatgcgccaggacaacaattagaacttttttgaaataataaatcccgccttgaagcgggatttaatttgaaaacaacccatttttttaatttctaaattctattgtaagctattgatagataacttaaaatgagtatccagttgttttcaatagttcaaagatacaaatttgaaagcaaatcacaactacctattgcgtcgttaatactattgcatgttgttttcaatagttcaaagatacaaatttgaaagcaaatcacaacttgtaaacgggagggttattaaatcatttgttgttttcaatagttcaaagatacaaatttgaaagcaaatcacaacttcaatgagcccttctccatcggcgcacagttgttttcaat

SEQ ID NO: 1357 - DNA, 16128 bp, synthetic construct
  source 1..16128: mol_type = other DNA
  misc_feature 1..16128: note = Synthetic
gaatgagaactctccggtagaccgagaatatttttgattttgatacaaatcccagatatcgcccattttcaacaaccggaaggttccatgcccctgtttcctcgaattttcgcattacctgatccatattttcattggcttctataaaagcgggcggtatggtcatcaggttttccacttttgtggtgttgtacagttcgttattgaacatgatatctcttatatcgtcgagaagtacgattcccagaagtttcccgtcttcattcactaccggaaagatatttcttctggctttggcaattattttcaccagctcaccaagggtttgttcggggcggattgtcataaaatcggtttcgatgactttgttaagccgcatcagggtaagcacagctttgtctttatgatgggttagcagctctccctttttggccagtcgtttggtatagatagagtgaggttcgaaatacatgatggtgatatacgaaacggtggatgtaaggataagagggagaaacagtgcatagccgttggtaatttcggcaatcagaaaaatggcggtcaacggtgcatgcattacacctgccatgagtgctgccatccctgcaagtgtgaaatgagattcaggcaagctggcccagccgagttcttttaataatttcgccataaaaaatccggccacaccgcctgtaaacagggttggcgcaaagattcctccaacaccaccgctgccgttggtggctgcggtggccaaaactttgaaaataatcaacagggccagaaagcccataattatgaaattattgttcctcaaattgtaaaagaaagtattttctacaatggcgtcggtatttccgctcaacagggcagagatggttgtatatccttcgccgtatagcggagggaaaaggaatatgagtaagctgagaattacccctcctgaaagtaatttcaaataaggatttttgatttttgctatccgttcttccacatacatgttgccccttgtcatgtacagtgaaattaatccacccaggatgccaagtacaatataccatggcaggttgttgagcagaaactgctcctggagatgaaacgtaaattcggcactcttacccagaaaaaaatacgcgatggtagtagctgtcaccgacgatatcagtagcggtataacagatgccatggtcaaatcgagcatcaggacttcaagggtaaataccaggcctgctatgggggctttaaaaataccggcaatggcgccggcagctccgcttcccaccagcagggttatggtcttttggttgaggtgaaacatccgtcccagtgacgaccctatagaagccccggtcagaacaatcggtgcctcagcacctacagagcctccaaaaccgatggtaaaggtactggctattatagatgtataggtattgtgaggttttagatagccaccttttcttgaaaaagcatgcaatatttttgtgataccatgaccgattgaatctttaacaacatacctggtaaagatgacggttaagaaaattccaataatcggataggccagatagagccagttttgatgttcaagagtaaatcttccggttaacagctgttgagtataatgaatggtatttttcagaataacagccgccaagccactgcccaatcctataatgaagctcagaatcagggtgaattgtttttgaggaatgttttttacacgccagatcaaaaaacgtcctaatagttttgatgccgtttccatttggaaaaactgtaatgagtgcgtttttgtgtcggttgccaaacgcggttggaatacttgtgtcgcgctgattcaatcaagtatgtattttgtgcggctgtcagattcttgccggtgtacgctaaccggagcgcaaaggtattttttaaggactgatattcaaaaaaatgtgtgttaaattgtgttgggagtattgtttcagaagataaggtgattggtttggtatttttttcgttcctattttgtcggaatattttccaaagtagcaaccaaaaactcccagaatttccggacactttccacattgaccatttcatcgggtgaatgcgggaaattgatggttgggccgaatgatatcatatcccagtttgggtaggtacttccgaggataccgcactccaggcctgcgtgaatggcttttatttccggtgtttttccccatttgtttttatataccgtttgcatggttttcaatatttcggaatccatattgggtttccatccgggatattgaccatcgaaccatacctgagccccggccagcaggaaaatactttcgagtgttgattccacgtcttctttggccgtgtccaccgatgagcgtatcaaagcttttacatgtacttctttgtttttggtctgcacaatggcgaggttgagtgaggtttcaaccaaccccggcatatcggtgctcatcctgataacaccgtttgggcatgcctgaatggcattgataaggtcgtcctgggtcatctcatccatcaaaaaatggggggcttttgtttcttcaattttgagttcgagatcaggctcaacgctctttaattcattggtgaagatttttttaaagcgggcaacttcctgttttactttattcagattttttgcaggaactccaattaatgcaaaggcttcgcggggaatcgcatttcgaaggttgccgccctcaatggacgatagccttgcaccctcgttggcgacaatatgttttaaaaggcggaacatcagcttgttggcgttgccgcgttcgagattgatatccaaccccgagtgtccgcctttcagtcctgtaaggctaattttaagggcggtgtaattttccggaaattcctcttccatgaatgtgaaaacggcattggcatctgttccaccggcacatcctacatataattcgccctcatcttccgagtccatgttaatcattatgtcaccctttaagatgccaggtttcaggtgattggctccggtcattcccgattcttcatccaccgtgaagagagcttctacagggccgtgtttcagttctttgcttgccagcacggcgagtgcagctgctactcctattccgttatccgctcccagtgtggttccgtttgcttttacccatccgttttcttcatacgcttcaatggggtctttttcgaagtcgtgttgtttgttactgtttttttggggaaccatatcgaggtgtgcctgaagtaccactcctttggccttttccattcctttggcagcgggtttgcggatgattacattgcccacctcatcttttatggtttccaatcccagtcttttaccttctttttccacaaaatcgacagcagcagattcttttttcgacgggcgtggaatttgagtaagggcatggaaataattccaaaggctttcaggttccagatttgcaatattggtgttcatttttttatggtttattttggtttcaaaattatctcacttccagtattaatgatcacgtgaagggattattccctgtcatatgttcggtaaagaaggtcagtcgctgaatgactaatatctgcctgatctcacctctaacaatataacaatataaaagtttaacaatctaacagcttgacagcctatttagtagtgattttcagcaaagctcccgttttctggtccagtttcacttttgttacggaactgtcgaggagtgaggatggcaaacggtgcaaagtaccgaactgagcaaccaatacttcggcttcattgagcaaaacagtgcggtcgattactttaacattcactttcgcgggtttacaataaatcagtcccgatctttcagttttgtcttcccggggttgcaaccggcctttttcaacccctgtttcactttttatttcgatataaaccggtgttccggccatgtcgaggttgtcggtaaatcctttttgttctgaaaatctgaagagtacctgctcggctggcattgaggcatcaggaataaaagtgaaggttttggtgacaaaagttgtctcttttttccctttaaacaatgagagatactgttcttcgagtttgttaatgccttcaagtattctttcgtacgccccattgtcggggggaagggtttgcatatcactttcgagcaatcgtctgcgggcttctctgagccggtatatttctgccgctacttcttcggctgttgcggcactcgatgttttaatgagttgttcctcggtaaacggcacatcgtcaaatgagatgtcttcgggttgtttggtggtttcaatttgtaaattctgatgcacagtgccggtacttgtttcattcaggttgagtcctgttaaaataccatcgggtgtcagatttacagcagcgccggaaggtgtaccctcagacataatcctgaaaacacgatcggcatcaggtgcccctgaagtatagatactggcttcagtaatctcccatgatgtgcggtcttcggtgattatatcgttgaggttcaggaaccgttgtgaataacggtaatatggccctcttttttcgatggttcttttggcggtaacttcgatattaacaacggttaccggaagatggtagaaaatgccgtcttgttgaagcggtttctgtgccggaattacattgacttccgaaacatttttttgtgcattgcatgatgcaaaagcaaccaggaatatcaaataaaggatgtttttcatcagtataaaattagtctaagttattggtctgatggaactcgcatgattgagatttatacatgtccttttgtgacaaaccttgtcatgctcgtttcatcagtatataatttacttaagttattggtctgatggaactcgcatgtaaggctttatacatattcttgttatggtatgccttgtcaggcccgttttatcttacatcttaccatcttacatctaaaaatctattaaaccaatctttgtcatgctcgtttcatcagtatataatttacttaagttattggtcgaatggaactcgcatgattgattcattctatacatcaacttttgtgataaaccttgtcatgcccgtttcatcttaaatcttatatctaaaaatctgataatctattaaggcaatctttgtcatgctcgtttcatcttacatttaataagttgttacggctgttagaattgttaaagttgttaatattattagtgcattggttgttagagtattataagtttttttgaatggtgatatatagctatttatttttcacgtttttccaaaattgaattatcaaagttagtaaaaaataaggccgcggggttatatttctgttgttttagcaaaggccgggccaaggttttctatgattttagttgcaatggtgcctcgctgtccctcttgagccgccaggtctccggcgagtccgtgcacataaacaccaacccgtgcagcattaaaaggttcaataccattggccagcaaagccaggataattcccgtcagcgcatctccgcttccggcggtagccattccgggatttcccgttggattaaagcgcacttcaccccggggcgaaatcactgctgtgtaagcacctttaagaaccaaaacgatgttgaattcttttgcaaattcaattcctttttccaggcgctgatagtcattttccgaaaggcctgccagcctttcaaactctttggggtggggtgtcaggatagttccgggctggaggtaattcagatattctttgttggcggccaggatattcaatccgtcggcatcgataaccatttttttattttgagctgccgaaagcagctctctaaaagctctttgtgaattgatttttgtgcctattccggggcctatgccaatagcagggaaaggtgataagtcagggaattcggtaaatataaggtcggaacggtcaacactcatcatggcttcagggatggctgtttgcaaaattgatacggcactgtgaggaacatgcgtggtaagaagtccgacccccgatttgaggcaagccatggaggctatcagggcggcacccgtcttgccataactaccggcgataagtagagcatgccccatggtacctttgtgagcgaaacgatttggggggggcagcatatttttaacttcccatgattcggtaatgtgccaggggctgagggtttcttctatttttttattacttaaccctatgggaagcactatccactgtcccacctgcgctttgttttccgcgaaaagaaaagacagctttggtaattgaaaggttagcgtataggttgctttaacaatgttttcacgaatgttagcaccattgtcttcgcaaaatagtcctgaaggcacatcaacagatactttttggtcatagtttttgttgataaacgaaacaatggacgatgctttttcgttaagtggtctgttaagccccgacccgaaaagaccgtcaatggccacggttcccggatttgttgaattgggtaatggttttgtggataaatctgttatttttgcagatgagattttccgaagcctttcgagatttgttgcagcatcaggcgataacctttcagagcgaattaagaaaatgtcaacatttctgccttcggatataagcattcgggcaatcgcgagagcatcaccgccattattgcccggacccgcgaatatactaaaacctgctgccggatacttgtcagatatccatcgataagcctgtgtggcagccctttccattaaatgaatggatgcaataggttcgttttcaatggtgaagcgatcaacttcacctgtttgtttcgatgtgagtattttcatctaaatatgagaaatgacacgttaaactttaatgacaaaatgtatttttgtatttatgagcccggtctaaaaagcatctttgttgccaaactcgttgttgttttaaatttttatattctcattaacaacaagttaactctggtacaaaaatttaaaacgccttgattttgacaaaaatatgctttttatactgcactcatttatgcgttaattttacatgacctgatctatttataaatttgcaatgtccaactatcagcgaaatacaaccggcttaaaaataatgcattattcccttatccgatttatttgtggttgcttgaatttcctgatatttgaatgtttcatcagtataaaacaagtctaagtcattggcctgatggaactcgcatgaatgagttttatacatgttcttttgtaacaatctttgtcatgctcgtttcatcacgaaaagttatgaataaatcaggctaagttctattttgcacgaatttgagtttttttttgccaccatcattgttgttgagagctttcagatactcattaacaatgggcaaatgcgggctcaaatatccttcagttttgaaaaagtaacaaaataacgattgcattgcaaataaaccaaatttaaaaaaaaaaaagaatggacacagcttcacaaaaacatccccagggtctgtgggtactttttttcacagaaatgtgggaacggttcagttattacgggatgcgtgctcttttggtactgtatctgacttccagtattattaacggcggatttgcttatgccgaaaatcatgcgctcgaaatttacggaatatttaccgggctggtttacctgacaccgatactcggtggtatcattgccgaccgtttgatcggacagcgtaagtcaattattatcgggggtattattatggcactcgggcaggcagctctggcttattcggagtatattgccgagcccggagctggcgaagcacttcaggtattgcgggaatactggttgtttattggtttggggcttcttattctaggtaacggattctttaagcccaatatttcaacgatggtaggtcggctgtatgccgacggagacccgcggaaagattctgcctttaccattttttacatgggtatcaacctgggggcttttctggcgcctctcattgccggctatcttggtgaaaacatcggatggtcgtgggggtttggctcagtatctgtcggaatgatactgggaactctttggttttggctgcaggaaagaaaacttggtaccattggttttggaccgaaacgcactttccagactgatgttgccagacttaacggtcgcgactggttggatattcttgcctgggtgctcggtattatcgcattcatttatctgtttgttgaagtctggtggacccttcccgaagatgtcactacctggattattcgtattgttgccatagcaggtatttcggttatagcttacattatcataaaaaatacaaccggcaaaaccgaatggagccgtatcggagctatcctggtgttctgtttctttaacatctttttctggtcgggatttgagcaggcaggtggaacttttaacctgtttgcccgtgattttacagaccgtgtcattggaagttttgaaattcctccttcatggtttcagtcggttaatgccgctctgatagtcggcctggcaccggttttttcaatgctatgggtgtggcttggccgtcgcaatcccaacacaccggtgaaatttggactgggattgtttctgctctcaatgggttttgtcgtaatgtacttagccgataccaaagcatcggctaccaacctggtgagtcctttgtggctggtaacagtctacctgctccatactatgggtgagctttgcctgagcccgatcggattgagtatgatcagcaaattgtctcctccgaagattacttctctcatgatgggactctggtttgcttcaaccgccctcgccaattatctggccggtgctttgaggagtatccttgaagtatatctgcctgacatgaatttattccttttcctggttattacatcaggctcagccgcattgctcatgtttattatttctccatggctgaagaaaatgatgcggggaattgattaattgagagtttgcagtctgctgtaaaacctggatggactgttttaatataaaaaagcctgcaagaccggttatgagccggcttgcaggttcttttgttatttggaggggccgatacgacctcttaataaaattcttgcatgcgagttccatttgactaataactttgacaaattttatacgaatggaaacagaattgcttagttgcttcgacccgacaaatccggtttttcgagtcattgaggttgatattcaagtacttgttttgcaacgctttgtaagtattttcccaatcttccaatttatttaattttttatcgttgtcggcagtgccttgctgagcttcaccgctttctccggcttgttggcatcatgacaatttctatcccgacacattaacattcttccgaagttttcgttgtgagatgctcaaatatcaaataatacaagtaaccgcgtactattataaaacgggaaatagtgatctattttcaaattaaatttgatgacgacgcttgtatttggccgatatgttgagcatcgtgataaaaaatttatgaataaaagcagaatatgtcattattgttaataaaatagaaaagagtgcagtataaaaaagccttcaaactgctgatttttaccatttttacctgatctctaaagggaactgctaaaaatcagcagtttgaaaaagtcctctttaggggatttaggggtaaaaaggctttttagactgcactcagaaaaggtaattgaaattttgtaggttttgccgatatgtctttttgccattacgccgtttgagttaaatattggatattttttgtaaatttgaaagggtagctgcttgaagttttgggatatgaccgtacctaaagaaaaaggcgagaacacccgaagatgtcccgccttaaatgttttcacaacggaataatccttattgtgaattgcttcaaaatgtaattcaaatataataaaaaattagtaggaagacaaaaccaaaataataacaccgaaaactatttgagatgaaacgcattttaggacttgacctgggaacaaattctatcgggtgggcgctggtagaaagcgatgaagagcaaaaatcaggtaaaattcaaggaattggaagtcgcataattccaatggatcagaatgaattggataatttcaacaagggaaacactgtctcacaaacagcagaacgcaccagattaaggatggtcaggagattaagagaaaggcatcttctgagacgggaacgattacatcgggttttgaaggaaattggttttttgcctgaacactatttagagcaaatagactttactgaaaaaccaggtgggtttttaccggggaaggaacctaaaattgcttataagcctgataattttaaagataaatatgattttttgtttcaagattcttaccatgaaatgctctccgattttcaggataagaatcctgaatttatacaaaagcgaaaaaaagttccacaagactggacaatatattatttaaggaaaaaagcacttactgctaaaataacaaaagaggaactggcctggattattctgaattttaatcaaaaaaggggatattatcaactccggggtgaggatgaggatgttgcgaaaaatacaaaaaaagaagaatttcatgccttgaaggtggtaaaagtaaaagaacgggaagattctgaaggtgcctcggggaaatggtatgacatagaactcgaaaacggctgggtttatccgcgacaaagtaatattcgccccgattgggaaggtaaaattcttgagcttattgttacatacaatcttgataaggatggaaatattaaaaccgataaggaaggaaacgaaaaaagatcctttagaatgcctaataaggatgattggactttgagaaaaaaaaggactgaaaatgaaattgaaaaaagtgggaaaacggtaggagaatatatttacgataatttgctggatgcccctgatctgaagataaggggaaaactggttagcaccatcgaacgtaagtattacagaagtgaacttgagcaaatattaaccgcacaaaagaaatatcacccggagttatccaacagtgaactttttaataagtgtatcagcaatctttatcccaataatgatatacatcgtaaagccttgttgagtaaggattttgttcatttgattataaatgatatcatcttttatcaaagaccattgaaaagcaaaagatctacagttagtaattgccctttggagtatcgggtttatgttgataaagttacaggagaaaaaaagaaagttcctttgaaatgcattccaaaatcacatcctctttatcaggagtttcgtttatggcaatatgttaaaaacctgagactgtttgaaaaagagaggtttgaaaacggtcggttgctgacaaatgtggatgtgacagagcagtttttgccagatgaggacaaatatgtggaactatttgaatttttgaatggtcgcaaaacatttaaacaagacgatatactgaaatttgcgggcataaaatctgcaaaagacagggtgaaatattattggaactatccgcaggaaaaggagtatccgggaaatgaaacccgttacttgattgagtcacgattgaaaaaaattgaaaatgttccggatgagtggttaaattatgaaaagattgaggagttgtggcatttattatactcggttactgacaaagtagaaatagagaaggggctgcaatcctttgccgctaaatatcagttgcccgatttgtttgtcgaggtttttaagggatttccccgcatggaacgtgagtacggagcattttccaagaaggccataaaaaaactgttgcctctcatgcgaatgggaaaatattggaaactggaaaatattaatccggatttaattgaaaaagttcaaaaaattatcgatggtgaggcagatgacaatataaacgatgggatacgagagcggttttctgaaataaatgaaatgtctgatttgcgcgggatgcctctctggaaagcctcttatctggtttatggcaggcattcggaagccgcagaagtgattagatggagaacatctgccgatctggatcagtatattaaagatttcaaacaacacgctttgcgtaacccgattgtcgaacaagtagttcttgaagctttgagggttgtaaaagatgtctggaactattttggagaaggcagggagaaatttttcgatgaaattcatgtggaaataggaagagatctgaaaaatccggctgataagcgtcaaaaaatagccaatcaaattcaggaaaatgagaatacaaatcttcgaataaaggcgcttttggtcgagttgtttaatgatccggaggttcaaaatgtcagaccttattctcctgttcagcaacaattacttaaaatttatgaagacggagtgcttaatgcagagagagatattcctgatgatattcagaaaatctcgagaatggccaaccctaccagaaaccaattgatcaggtataagctttggcttgaacaaaaataccggtcaccatatacaggcgaaattattccgttaaataaattgtttacttctgaatatgaggtggaacatataataccgagagcaagatattttgatgattctttcagtaataaaattattagcgaggctgaagttaacaggaaaaaagaccgaatgttggcttttgagtttattaaaaagttgggcggtagtacgatagacttgaattacgggaaaaaagtgtctgtattaacagttgaggaatatcagcaatttgtaaaagatcattatggcattaatccacacagtcgtttaaaaatgcagaaactactgatggacgaaatacctgaaagtttcatcgaacgtcagcttaatgatagtcgctatatcagtaagatggtgcgcaatcttctttctaacattgtgagggaagaaaatgaaaatagtcctgttgcaaaacaattgattacctgctcgggatccataaccaatactctcaagcaggaatggggactgaatgatgtttggaataccatcataacgcctcgttttgagagattaaataaaatgggtgagcaaaagtatggtgaatgggtaaacaaagaaggaaagcctgtttttcagattcaaatgcctttggagttgcagaaagggtttaataaaaagaggattgatcatcgacatcatgctcttgatgccttaattgttgcttcagctaccaggagtcatgttaattatctcagtaacgaagcagcaaaaactaatgctaaagataccaggttcgatttgcgaaacaggctttgttacaaagagaaacgaggacaaaacagaaattttacctggcgattctataagccatggaatacgtttaccgaagatgcaaaaaatgcactgaatgatattgtcgttagctttaagagcaatcaccgtgttattaataaatcaaccaaccggtactttaaatgggaaaatcttcccggaggaatgaagaaaaagagacttgtaagacaggaaaagggcgataattgggccatcagacaatctttgcataaagatacggtgttaggtaaagtttcgctgcgaaaagtaaaaccggtttcgctttcagtagctcttgattcctggaacaatatagttgataaagctttaaagaagaaaattcgttctttaaaagatcagggatatgataaaaagctgatgttaaaatatttcaaagaccggagaaacgagtataacggggaaaatatttcaagagtaaatgtttattatttcgacgaagagatggctgcccgccgggttgatctggatacttcttttaatagtgaaaagcggattgagggaattaccgattcaggaattaaaaaaattatttatgcgcatcttaaaaatgaaaagtatcacggtcaaaaagatgacaaggggaaagatatttctccttatgagctggctttttcacccgaaggtattgcagaaatgaatgccaatattaaacaacttaatggaggaaaaccgcattgcccaatctataaggtaagacttgcagaacctgtcggtgaaaagtttcaattaggtgaaacaggcaacaaaaccgaaaaacttgttgaggtggcaaaaggaacaaatcttttctttggcgtttatgcaaatgatgaaggtgtcaggagctttgccactgtccctttttatttagccgtggagagagaaaaacaggggttaccggctgttccgcaagaaaatgaaaatggcgatcaattgcttttttggctatcgcctaatgatttagtctatgttccaagtgaagaagacgcacattttgctaatcctaagcaaatagaattagataattcacgcatatataaaatggtgtcatctactggaacccaatgtttttttattccacattttgtagcaactccaattgtgcaaacaatagaattaggtcccaataataaatcggaaagagcctgggatgggcaaatgataaaaaaagtttgctataagctgtctgttgatcgtctgggaaatgtagaaattgaataataatcagaaacagggagggtttcactttgagtgaagtcttcactaaagtactactgaaattttgacgatcaaaattttaaaatcctggtctatgataaaaaaaacgctctattttggaaatcctgcctacctgagtctgagaaacaatcagctggttttgaagtttcccgaagctaaaggattagatgaaaaatcaggaaagaacaccatcccgattgaagatataggtgtaatggttcttgaccacaaacaaattactattactcacgcactgatagagaagctgttggcaaataattgtgcaattgtgacctgcgatcaatctcacatgccgcagggactgatgatgttgcttgcggggaacaccgttcagggagaaagatttacccaccaattatcatcgtctgttccgttacggaaacagctatggcaacaaaccgtgaaatcaaaaattaccaatcaggcaactttgctaaagctatcaggaagaggcgtgaataccgacaatatgttcttctgggcatcgaaagttacctcaggcgacagcgaaaatcacgaggcaagagcggcagcatactattgggccaatatttttgatattaaggattttcgtagaggaagagatgaggcgcctcctaacaacttattaaactatggttatgccattttaagagccatagttgcccgttctttggttgcatcaggtttgttacctgccatcggaattcatcatcacaaccgttataatgcttactgcctggcagatgatataatggagccttaccggccttttgttgataagctggtgctggatattattgaagctggttttgattatacacaactcagcaaagatgtaaaatggcatttgttaagcattccgcagttggatgttttaataaaagggaaacgaagtcctttgatgattgcagtatcacagacaacggcttctttgtatagttgctttgagggcagcagccgcaaaattctttatccccaatttgcgaactgatatggatcgccttaatgaataccgtgttatgtgggtaatggttctttttgatttaccgacggaaacaaaaaaagatcggaagatttacagcactttccggaaaaagatgctgaacgacggttttgtaatgtttcagttttctatttacatcaggcattgtccaagccgtgaaaatgcagatgtgcatattaagcgcgtaaaaagttttttgccggccaaaggacaggttggtattatgcgaattaccgataaacaatttggcgatatggaacttttctacgggaaggaaaccgtgaagaaagaaacgccttatatgcagttggaattgttttgaaaacaaaaaaagcccggttttccgggcttttttaatgcaactgacagctcattttttaattctaattttcagtgtagtgtgctgataatcaaattcttgctttttggtctgctgtcagcgccactacaaagatacattttgaaagcaattcacaactacattttgatagttaatcactcgtaatcgctgtcagcgccactacaaagatacattttgaaagcaattcacaacgca

SEQ ID NO: 1358 - DNA, 16115 bp, synthetic construct
  misc_feature 1..16115: note = Synthetic
  source 1..16115: mol_type = other DNA
tgaaacagattttgtaataatcgcggcggttgtaagggcttttaaagccacaatactttcgtggaaatatattgaaatgtgactttcctttttcaagctctgaatatgacatttccagcaagtcctttcgggtacgcttgtaataatcttctatggtttccagttgatcgctcattgttttaaaattatgaaaatcaaagataggcaaatcttttgtctttagatttgccttggaataagttttatatgatccggattatttttgagtttttttctaatttttagtgattggtaattctatgatataagatggcagtaggaatgggtctatttttgagttttccttaataacaaagcctgtttctttgaaaaattccagcaaaggatcttctgtaagaatattcgcccataaaatatctgtaaatgatactgtggatctgcattttttccaaagagattctctgatttccgaagaattatattccttaaggataacaaaattgagttctgtcattcttttctcttccgaaaagccgggataccctgagccgcttttcaaaattccatatcctaccggtttttgatctgcataggtaatgataagttgattagataggttattaagttcattgatcatttttctggggtcccactcctcagtatattttttgatgtcttcctctgaaataagatttttataggtattgctgaccgaagatttgatgattgtaaaaagattatcaactccctcgtctgaacctatggtgaattttgaaatgatttccattcttttttttatcaaaattatgagattaatttattcaaaataggtacagatggttaaaatatgaccgatacagatgcgtattttgtaaatttgttcagtacagattgaaatagcatgatgaagtcttataaatatgaagtttttacgacaggtattgaagaacaaattcgcagaggaattttgaggactaaagaccgcttaccttccgtgcgcgaagtaaagaaaagatataatctaagcacaagttccgtacaaagcggttttgaatctcttatgattaaaggattaattgagagtcatccccgttcagggtattttgtggctgaggtgaaagaaattggtatttcggatataagaacaaggcttagtccggtagtaagggatgaggtattcatgaagaatgtgatgcttacaaccaagcatgctgccgaggcaacttcctttaataatgcggtgccgggagatcttctgatcccacaaaagctgatcctcagaacaatgcaggaagttattcgggaaaaaggagcatccctgctcagatattatccctccaacggacttgaaccactgaggaaacagattgctcaacggatgggaatttacggctgtacgctaaatcctgaagaactgatcattacagatggagctttacaagcattaacaattgcgttaagttctgtaacgaaagctggtgatattgttgcagtagatagtccatgcgtgttttcagtattggaagtcatcgctaatcttggacttaaggtaattgaagttccagtgaataatcacaatggttttgatttggagtattttcaaaaagcttgtgctgaaaatgacgtgcgggctcttattgttactcctaattttcataatcctacaggaattatgatgagtgataaggttaaaaaggaattgctaagaatagcggaagttcatcagctgtgcattattgagaacgatatttattctgatctttattttgagaaagaaagaccatccactattaaaagcttcgataggaaaggtatggtaatgatttattcgtcattttcaaagacactggcacccgggatccgcttgggctggctttatgcagggcaccattattcgagggctgagagggtaaagtttgctctgggaagaaccgtttccccaatttatcaggagctcgttcttaggcttttgcaggaaaacagatatgaaaggcacttgcattcattcaggaaaaaactacatcagcaggcagctcagattttggaggctttaagaggggcctttcccaaggattcatccttttctcagccacaaggaggatacagcatttggggaaaaatgcctgaaaatatagatatgcagaaattctacaggtattgtgaagatcataaggttctgtttactccaggagaaacattctcgcttacaaatcaatatagtcatcattttaggattgtttttgcagaaagaatcactccggaaagtattattttactgaaaaaaataggcaaaaaatcacaagatcttcttatttaatattaaagctatttaagcttaaacccaaaagtcacaaaagatttcaaatctctcaggaacctgctctcaggtgataaaatcagctttttttaagattttgagagggttaactagagaaaaatcgactttccgatagaaatatgttgaaaaaatagctttttaccctaaatttttttcactgtagctaggctcgaatcaccataaaacctatatttgcagcctaaatttttaaataaatgaaagaactaattgaaaaaatcaacgcagaatttgaagcgttcacaactgaggcaaaccaacaagcggaaaaaggaaacaaggctgctggaacaagagctcgtaaatcagctttagaactaagcaaattgttcaaggatttcagaaaagtttctgtagaagaagctaagaagtaattctcctttagccggcttttgtagccggtttttttatgccctgtttgatcttcgccagcattacagataaagtagtttttttctgtacatggtaagaatatctttatttttaagaaatcataaaagcacagatttattcttttctaaaagcttttaagtcgcaaggagtttcggatgctaccggtgtctttttgccttgctctttcttggccctttcttctattccaagccatgtatctttagtattttcgatttactgtatattaatttttacaccctgttgtgaaaacgttgtagataatttgtattttaggaacatcaatggtataggttattatgaaacattattatttctttttggttctgtgttttggctttttttctgctcaaaaaattagagtagtggattcggaaacaggaattccggttccgaatgcaagagttatttcgcaagatcaaattgtttatacaaacgaagatggatacgctccggtaaatcaggacgctgtcaattttgaaatctcggcttcaggcttccaaaatacaacatttcctaagtttaattcctcaataaagctgaaaagaacttataaaaatattgatgaagtaaaaatggcaagcgtagacattaaggaaatctttgaagatgtaaataaaaactataagaaaagatattacagggagccgtccgtttatgatgtagtgtataaagagaaaaaaagtgataataataagctttattttctgacgattgctgaggctaagctatggagtaaaagtaattattacaattataaggatggatatcaaaaggattatgacagaattctgcaaatgcagctgaacaatgtaaaatatttaaaaaacataaaatcagacgatatttttactcctggtaccaatgaattttcacacgaatacatggggaattattttttcaattttgaactgaaccgggttttatttcatttaaagaataaaggaacaaagtattcggggtggatgatctttgaagaaggagatgagcagttgattacttttaagattaaatcattggagggaattgacgtaaaaggggaatttaagtttaataagactgataaggtaattacctattttgaaatacactatttacaggaaaatgtccccatggttaagagaaaaacggctgccggagaggaatatgattatcagttgggaaatgctgtacttatttttgatttctataagaataaaggggtctatgtacctgcgttaacccgtcttgaagggaacaagtatattgcttactataaaggggtaaaacacgagaagaaaatcagtagagaacttatttataatacctttaaaaaatctgatgcagaggggcttaaccccaaagtggattttagcaaaaacatctgggataatgttcaggtaaaagagaataaaaacaataccattttgctttcggagcaggaacaagcgtttgtgaatgagaactacggaagttcttcagataaaatggtgtatccttaaatttccttttaaattaaagtgtaattccttatctgtaaattctaaggagatatttgtatttatgttcttatggcttcctgctaaaggcgaaatctcttgcagataaagcaaattttaaccctattcctttaccatctccgcaatttcttttatctttaaaccaatcaataaatattatgaggataaatagattttttgcagtaccagctgtagtgttggctgcccaattttcatgggctcaggtaaaggtggattcaaaagaaaaccttaaccctatcgtaaaaagttttgtagatgaagtaaataataattctcagctagagggtatggcttacgaacttctggatggtataggaccacgtcttgtaggaactccggaaatgcttgcagctaacgaatggagcgcagaaaagcttcgttcatggggaattgaggctaatcttcagcagtttggaacatggaaaggatggcaaaggggaactacccatgttgatatggtatttccacgtgtaaagtcgttggcagcaacgcaattggcatggagtcctgcaactaaaaaagctattgaggcagaggtagttgttctgccaaaagtgtcttctaaggctgaatttgataaatggcttccctctgtaaaaggaaaaatagtactgatggctcagtatcagaaaatcggacgttccgatgaacagatcaaagaatttgcaaccccggagctttatgaaaaactaaaagcagaaaaagatcaggctgccaaggattttaccgcttatgtaaaaaatatcggctacgataacaatacccttccggaagcattggaaaaagcaggagcggcaggaattgctatttcaaactggacaggtattatgggggctaacagaatctttggagcaaaaacatcgaagattccaatgattgacattgatgtagaggactatggaatgctttacagaatggcggaaaagggagctcagcctaaaattaagattgatgcacaatccaaagttcttcctgatgccaaaaatttcaataccattggaatgattaagggtaaggaaaaacctgaggaatatgtaatcctttctgctcaccttgattcttgggatggtgctcagggagctacagataatggtaccggaactcttaccatgcttgaaaccatgagaattctaaaaaaatattatccaaataataaaagaacaatcgttataggactctggggaagtgaagaacaaggattaaatggttccagaggctttgtagcagacaatccgcagattataaaaggagtacaggctgctttcaaccaagataatggaacagggcgtgtaatcaatatcagtggtcagggttttgtgaaagcatatgactacatagggaaatggcttgatggagttccgaaggcggtaagaagccatataaaaaccgacttcccgggaatgcctggaggtggaggttcagaccatgcttcatttgtagcagcgggtgtacctggtttttctctaagttcattgaactggggatattttggatatacctggcataccacaaaggatacctatgacaaaattgtcttcgatgaggtgaaaaataatgttatcctaacagctgcattagcatatatggcttctgaggatccggaatttaccaacagagaaaaaagagtaatgcctagggatgaaaaaggcggtacggtacaatggccggaagcaagagaaccaagaagaagttctaaggattataaataaaaaacgttaaaacttacaaatacaaaaggctgtctccatggaggcagcctttttttattaaagaaacctttcgattgtaattaaacataacgtttcaggtctgaaaattttgaaatggagggcgaatgtggcgcgtctagttgaccaaagccgtattcacagaagataaaaggtaatccgttggaagttgcagaatcataatctgtttgcgtatcgccaatgtatacagaattttcaatagataaatgatttcgttccatcacgagttgaatattttcggattttggcctttgcgttcgtccgtgagattcaaaatctacaaagagatcattgaattgataatattctaaaaaagattcaatataaccatcctgacagttgctgacgataaataggttgtgtgtattggctaggctttttaaagtagcttcaacatcattataaaggattccaccctgcacacgaagcaccttgttttcctgagctacaatctcagaaagaacttctttagctcttgcatctgaaattccgggaacaatatccttgacaatataatgagccaataaacccatgtattgatccatgtcttcaggctttaattcttgttttatcaactgatgcttgcctaaaacgtcattccatattccaatgatagtgcctcttgggtcccacaatgtcccatccagatcgaagattaaattttttgtactcaatactattgttttatatttaatgtgttgattttaaaattgatagattataaaatcatactcagttgaactctttttcttgcctcgtccacctctgttacttttaccctgacatgttgatgaagctttaccacttcattcacatctgatacaaagccttccttcaattgtgaaatgtgaaccagtccgctttccttaattcctagatccacaaagcatccaaaagcggtaatgttattaactattcccggtaaaatcatccctgcctttaaatctttaatgctttttacatgaggatcaaattcaaataccttggctgcctttcttggatctaatcccggcttttcaagctcctttaaaatatccttaattcccagaattccaatttcttctgtaacatagctttcaggttttaccaacgctattttttctttattggcaattagctcatcggttttaattcctaaatctttggctattttttctacgattccataggcttcaggatgtacggcagaattatctaaaggatttttagaattggagattcttacaaaagcggctgcctgctggaatgctttttctcccagccttggaacttttttaagttgctttctatcttcaaaggccccattttcagctctataattaacgatgttttctgccatcttctctccaatccctgaaacatagcttaataaagatttactggccgtattgatgttaattcccacagagtttacacatttcatcacagtagaatccagctcattcttcagttgggtttgatccacatcatgctgatactgcccaacaccaatagattttggatcaatttttaccagctctgccaatggatcagaaagtcttcttccaatagacactgcgccacgcacagtaacgtcataagttgggaactcatctctggcaattttacttgccgaataaacggatgcaccagcctcagaaactacaaaaacctgcaatggcttatcgaaggcaatcttttttataaaaaattcagtttcacggcttgcagttccgtttccaatggagatggcttcaatattataagcattcaccatagagcggatttttttcatggccattcctgtttcattctggggagcgtgagggtagagggtttcattatgaagaagatctcccttttcatcaaggcaaactactttgcatccacttctgtaaccaggatctatagctagaattcttttttctcccaacgggggggccaaaagcaattgtcccaggttttcagaaaaaatttcaatggcttttttatcagctttttctttggcttcctgtaatgtttcattagaaatggcaggctccagaagtcttttgtagctgtcttttatggccagggcaatctgttccgaactctcgttgttagatttgataatggccttttcaataaagtcaatggcttcttccttatcaataccaatgttcacctttacaaacccttctgtttcagctcttaacattgctaaaagtctgtgggaaggagttcttgagagactttcctcccattcaaaatattgggagaacttctgggcatcctcttcctctttttttgcctttacaacttttgaggtgataatagccttacgttgatataatctacgaagattcttacgaacatacatattttcattgatccattctgccatgatatctctggctccctgaagagcttcttcttcagacgggacctcattatttaaatattttgaagccaaaaactgaatatcattactcttttggctcattataattttggctaaaggttccagtcctttttccttggcagtgtcagctttggtttttctacgttttttaaaaggaagatataagtcttccaattcctgtatatcaaagctttcttcaattctttgtctaagttcaggggtcaaagcgtcctgttcctctatagattttaaaatagattcttttctcttaacaatctcttcaaactgcttgctaatctttgaaatctgctcaatctgtgtttcatccagatttccggttttatcttttcggtagcgggaaataaaaggaatggtacagtcttctgctaataattgtaaggtattgttgatgctcttttcggaaatattgagctgtttctgtataaattctacggtcgtcattgttctgttttcggatggctaaaataaggttttgggatgagaaatagtagggtgctttctattttagttaacaattgctattgccattccatcatattcttttgcgcctaccgtttgcataatagtagctgtaacttttgggttattagccagcattttattaaaacgttgtacacctttcactttttcatcatgagtattctcctccaaaactttaccctcccgaatgacattatcacaaatgatgaccgttcctgggtgtgaaagctgtaatgccaattcaaaatattcagtatatggaggtttgtcagcatctataaaaataaaatcgaaagcttcttcaccgtgagcaatgagttcttttaaaacatccattgctttaccgattcgtaaatcaatttgatcagaaagtcctgctttttcaatattctgacaggcaatatgagcatgatgaggatcaaattctacggtaatcactttaccgtctgcaggaagtgctctggtcatccaaatggtactgtaggctcccaaagttcccaattctaatacacgcttagctttacaggtaagaagcatcacctggagaaatttaccctgagttggagttacactgatttgtggcattgaagcatcatctagtgattgaatagtttcctgaagaacggcatcttcaggggctaccagattgctgatgtactgatctactttttcgaataattgctgattcatttttcttaaattaataattgaattctagtgattgattattgtaacagaggaggatttactactatttatttgagcccaaaagggatacatttaaagactcaattgggcgcgaaaaacagaaatgttctcaaaatctgaatcctgaactgttaaaaataatatgtgttgtaactgtttactaagatagtgaattttgagagctgtgacaactgaagctgtatgggataaaataaaaatcccccgtattggaagacgaggggcttaaatgttttcacaacggaataatccttattgtgaattgctttcaaaattattaagacaaatataggagaaaaatctttactataattatggaaatccgtaattcgaatattttttttatttctatttttatatggtatctaaaaaaataataatgatgattaaaaatatacttggtttagatttaggaactaattctattggttgggcattgataaaacaagattttgaaaataaacatggtgaaattcttggaatgggaagccggattatcccaatgtcgcaggacattttaggcgaattcggaaaaggaaattctgtttcacaaactgctgcaagaactgattacagaggagtgagaagattgcgtgaaagatttttattgcgaagagaaagacttcatagagttttaaacgttttgaacttccttccagagcattatgcttcgcagattgattttgtgaaacgattcggaaaattcaaagttgaaaccgaacccaaacttgcttggaaaaatattgaaggaaaattttcatttctatttcaaacctctttcaacgagatgcttgaagatttcaaggcaaatgaacaggatttaaaagttccctacgactggacaatttattatctccgtaaaaaagcactttctcaaaaaataggaaaagaagaactggcctggattcttttgaattttaatcaaaaacgtggatattatcaattgcgcggtgaagatattgaggaagaaaaagataaagtttttgtaacgttaaaagtagataaggttgttgattctggagaaagtgtcaaaggaaaaactctttatgatgtgtattttgaaaatgggtggaaatatgaaaagcaaattgtaaaaactgaagattggatcgggcgcacgaaagaatttattgttacagaatctattttaaaaaatggagatataaaaagaacttttaaaactgtagattcagagaaagattggattgcaataaaaactaaaactgaacaggagatagatagatctcacaaaaccgttggagtatatatttacgaaactcttcttaaagatcctaaacaaaaaatcaaaggaaaaatggttcgtaccatcgaaagaaagttttataaagaagagctcaaaaagattttagaaaaacagaaggaatttcacagtgaattacggaatgatgatttctacagcgattgcattcgggagttatatgggaataatcaatcacatcaattgactttaagcaaaaaagaattcgttcatctctttatggaggatattattttttaccaaagacctttgagaagccagaagtcatctatttctaactgtactttggagttcaggaagtataaagatgaaaatggagtagagcatacacaatttttaaaagccattccgaaatccaatccgcattatcaggaattccgaatctggcagtggatttttaatctgagtatttataaaaaagatgatgattttaaggtcaccgaagattttttaagtacaatcgacgattttgaaaatctgtttgagtttttaaataacaggaaagaagttgatcaaaaaacattgttgaaacattttaaactgaatgaaaaaaactatcgttggaattttgtagaggataaaaaataccctggcaacgaaacgaaaacaatgatttccgaaagattgaagaaagtggaaagtatttctgatgactttttaactagagaaatagaacagaaaatttggcacatcatctattctgtaaatgacaaaacagaatacgaaaaagcattaaaatcttttgcagggaaaaataatctggatgaaaattctttctttgaagcattcaaaaaaattcctccttttaaaagtgaatacggttccttttcggaaaaagccattaagaaattgttgcctttaatgagactaggaaaatattggaattacgaaaatatcaatgagcattcaaaagatagggttcagaaaattattaccggcgaatttgatgaaaatatcaaagataaagtgagagaaaaggcaattcatcttaaggctgaaaatgatttccaaggcttgcaattatggttggctcaatacattgtctacggaagacattcagaagcatcaatgattggaaaatggaattccgtagatgatttagaagaattcctaaaagaatttaaacaacattcgcttcgcaacccgattgtagaacaggtgattacagaaacgcttcgtgtggtaaaagatatctggttgaaatacggaaacggagctaaagacttcttcaatgaaattcatattgagttaggaagagaaatgaaacaaacaaaaagtgaaagagcagatgccacaaaaagaataacggaaaatgaaaataccaatcttcgcatcaaagctttattggccgaaatgatgtatgaccattctgttgaaaatgtccgtccttattctccgatgcagcaagagattttaaaaatttatgaagatggaattttaaaatctgatatcgaaattgaggatgatattctgaaaatcagcaaaacagcacaaccttctccatctgatttaaaacgatacaaactttggcttgaacagaggtataagtccccttatacagggcagattatcccattaaataaattatttacaccagaatatgaaattgaacatattattccacaaagccgatattttgatgacagctttagcaataaaattatttgcgaatcggcggttaataaactaaaggataattatatcggtttaggatttattaaacattttggaggaacgatcgttgaatgtggttttggaaaaaatgtaaaagtttttgaagccggagaatatgaagattttgttaaaaagcattatgccaataatagagggaaaaggaataagctacttttagaagatattccagaagaaatgattcaacgtcagcttaatgatacacgtcacatcagtaaatatatttcaagggttctttccaatattgtgagagaagaagatggtacagatgaaggagtgaattccaaaaatgttgtacccggaaatgggaaaataacatctcaattaaaacaagattggggtctgaatgatgtttggaatgaattgatcttgccacgttttgaaaggatgaatcaattgactaactcaacagatttcacagcctggaatgaaaatcatcagaaatatttgccaacggttccggtagaattctcaaaagggttttcaaagaaaagaattgatcatcgccatcatgctttagatgctttggttattgcttgtgctacgaaagatcacgtgaatttacttaataatcaatcggctaaatcagacacgaaacgatatgacttgaaaaagaaactgatgaaatttgagaaagtagtctacaaacattctcaaaccggagaaagagtagaacgggaagttccgaagcagtttttgaagccttgggaaaactttacggttgaagttaaaaatagtttagagaaaatcattgtaagctttaaacaaaatcttcgtgtcatcaataaagctactaatcattatgaaaaatatgttgaaaaagatggcgtgaaggtgaaagaaagagtagagcagactggtacgaattgggcgataagaaagtcaatgcataaagaatttgtttatgcaaaagtgaatttaccttgggtaaaagttagtggtaaagagatattaactgcaattagaaaaccgttggatataagtttcgatgagaaaaaaattagcaactcaataacggatactggtatacaaaaaatacttttagcacatttagaaaaatataaaggaattttagatgataaagggaaagaaatcgctcctgaaatacttgcgtttacaccagaagccatagaagagatgaataaaaacattattgagctaaataaaggagtatttcatcagccaatttttaaagtaagagtgtttgaaaaaggatctggaagattttcggttggacagttaggtaataagaaaaataaatatgtagaagcggctaaaggaactaacttattttttgcaatttatgaagataaaaacggaaaaagaagttatgaaacaattcctttgaatgaagtcattgaaagacaaaaacaaggattaaattcagtcccattagaaaataaaaagggacataaactattatttcatttatctcccaatgatttagtttatgttcccgaagagggtgaatttataggaagagtttttaatttgaatgatttaaataaagaacaaattaaaagaatttataaagttgaaaaaacttcaggtactgaatgttacttcgttcgtcaagatattgcttttctaataaagcaatacgatgcaaaaaccaaaattggagaattggaaagccagaataaacttcaagtcacaatgtcagaggatagaaccaaaattgccgatgtttgccttaaaattgattgtgatagactaggtgatataaatattctaacaaaagaaaaaattaaaaaaatgtttgatgaatatagataatattgcgattgatacaaatgttcttttatatgcttttgataataaagatattaaaaaacaagataaggcggtagagatattgcttaaaagaccatttgttactcatttagttctttttgaatttataaaaattcttgaaaggaaatggaaaaaagataagaaagaagttacaaaacttactattaaaatacttaatgaattggtatttccactgtcacagcatagcgatatgtataattatgcctattttttgaccttaaaatataattatggattgagtgatatttttatactttcagattcaatacttaatgactgtactattttactttcagaagatatgtgtaatggaatgattgtcgataaaaaattaaaaatcataaatccttttttatgatcacccgctccatatatattggtaatccagcttatcttaaactcaaagatgatcaaatgtatattttagaaccctccaccaaagaaatgaaaggtaaagttccggtggaagatttggggttgctgatgttggatcattttcggattactatttcacatcagttaattcaaaaaatgatgggaaataatgtggtggtggtaagttgtgacggtcatcatttaccgcacggaattatgcttccgttgtatggccacactgaacattccgatcggatcaaagaccagttagaagccagtgaacccctcaaaaaacaactttggaaacaaacggtcgaatgtaaaattgaaaaccaaaaagaagttttaaaacggttaggaaattattacgaaccgatgattgattaccaaaataatgtgaaaagcggtgatattaccaatatggaaggcattgcagcacaacattactggaagtatcttatcagtctggattttttgagacaacgttttggagattcacccaatcagtttttcaattttgggtattctgttctcagaagtattgtcgcaagagctattgttgaaactggattacttcctgttctcggaatttttcataaaaataaatataatccttattgtctggctgatgatctgatggagccttatcgtccttttgtcgacttattagtaatgcaatggttggcagttaatcctgagactgaagaattaacgaaagaatttaaagcttttattttacaaattgcaaccaaagatgtaaaaatagatgataaaaccaggccattattggttgctgtaaaaacaactgctacgtcactgtataaatgttatacgggggaaaaacgcctgatctcttatcctgaactgatatgaatgccgaaaggtttaacgcttaccgaattatgtgggttttagtattatatgatttaccgacagaaactaaagccaatatgaaagacgccaaccgctttcgtaaatctttgcttgatgatggttttacattatttcagttttcaatgtatgtaaggcattgtccaagtcgtgaaaatgctgaagttcacattaaaagagtaaaatttatgctcccaaaagcaggtaaggttgctattatgtgcatcactgacaagcagtttggagatattgaaatattctttgccagaaataaagaagatccacctccaacctttcaacagcttgagttattctaaattttgaatcctaaaaacaaaaacaatctactgagaatcagtagattgttttttgaggctgtgattaatcacgaagataataatttttgaaagcaattcacaac

SEQ ID NO: 1359 - DNA, 16112 bp, synthetic construct
  misc_feature 1..16112: note = Synthetic
  source 1..16112: mol_type = other DNA
tgccgagactttatatgagttcggtaacgatgaccagcgtgaacgctacattccgcgcgtttgcaacggcgaaaccatgtcgatggacctgacagagccggatgccggctccgacctccaatcggtcatgctgaaagctacttacagcgaaaaggacaactgctggtacttgaacggtgtaaaacgtttcattacaaacggtgacgcggacattcacctcgtactggcccgttcggaagagggaacaaaagacggccgcggcctttccatgtttatctacgacaaacgtaacggaggcgtgaacgtacgccgcatcgagaataagatgggtatcaaaggttctccgacctgcgagttagtattcaagaatgcgaaagctgaactttgcggagaccgtaaattaggccttatcaaatacgtaatggccctgatgaacggtgcccgcctgggtatcatggcacaggctgtaggtctgagtgaagccgcttaccgcgaaggttacgcctatgctacggaacgtaagcagtttggtaaagcgattatcgaattcccggctatctacgaaatggtatccctgatgcgtgcaaaagcagacgcttcccgctccatgttgtacgaaacagcccgcttcgtcgatgtatacaaggcattggacgacatctccaaagagcgcaagctgactcccgaagaacggaccgaaatgaaaaagtacagcaagctggcagacgctttcactccgatgggtaaagggatgactacggaatatgccaatcagaatgcttacgatgccattcagatacacggaggttccggtttcatgaaagactatgcctgcgaacgcctgtaccgcgacgcccgtatcacgaatatctacgaaggaacgactcagttgcaggtagtagcagctatccgccacgtcaccaccggcacttacctgaatcaaatccgcgaatacgaagctatcgaatacaaaccggaattggcaggcttgcaaaacaagttgaaagcaatgacggacaagtacgaaaagctggtagctatggttacggaaacgaaagacaacgaatatatcgatttccaagcccgccgcatggtagaggctgccgctcattgcgtattaggttatctgttgcttcaggatgctaacaaagacgatagtttccgccgctctgccgaagtgtatgtgaattacggccaggctgaagtggagaaaatcagctcgttcatcagcaacttcaaccgcgaagatttgacttattacagacaataacaaaatatccggataagaaggggctgccgcaaaagcagtcccttcttttgtgttttaaattctccgaagcagaatgcttctttttctaattctttaccaaatgaataatatgcgatttatactttcaaaaacaatcctggttgcaggagccatcggactattgctccccgcttccacacaagcctcgacaaccgacacggataaaaaactgacggaatatgtccgtcctttagtgggtacggacggattcgggaatgtataccccggttcacaagtgcctttcggaggtatccagattagtccggatacggatttcgactattatgatgccgcttccggctacaagtacaaacacacaaccctgctgggtttcagcctgtcgcatctcagcggaacaggcattccggacctcggagatttcctcttcatgcccggaaccggtaaaatccgactgacacccggcacgcacgaaaacccggatgtcggctaccgctcccgctacagccacgaccaggaatgggcttcccccaactattacggcgtacatttacaagactacaacgtaaaggccgaaatgacttccggcgtgagaagcggcatgttccgtttcacttatccccaatcggacagttctttcatcctgttagacctgaaacacacgctttggcagaaatgcaaatgggcgaatatacggatgctgaacgactctactttaaccggatacaagctggtgaaaggatggggaccggaacggcacatatacttcaccgccgtattctccaaaccgttgacggattttggtttcgtacaagacagcatccccgtcctctacaacacctcccgtttccgcagcacgatggaagcttggggcgaagatatcaaatgctggatacgtttcaagacaaaagcaaatgaagaagtgtacgtcaaaaccgctatctccgccgtaagcacggacggagcctgcatgaacctgaaggaactggacggtctgacgttcgatgccttaaaaacactcggagaaaagaaatgggaagaagaactttcccgcttttccatcgaaggaaacccaaaacaaaaagagacattctatacttccgtctaccattcattcctgcatcctttcatcttccaggatgctgacggacagttccgcgggttggacaaaaacattgaaaaagcagaaggcttcaccaactataccgtattctccctgtgggatacctatcgtgctttccatccattgttgaacctggttcactcggatgtaaacgcggatattgccaactccatgcttgcccattacgacaaaagcgtggagaagatgcttcctatctggtcgttctacggaaatgagacctggtgcatgataggttatcatgccgtttccgttttagcagatatgattgtcaaagaaatccccggtttcgattacgaacgggcatacgaagcaatgagaacaacggccatgaacccgcattacgactgccttcccgaatataatcaattaggatgggttccttacgacaaagaaaaagaatccgtatccaagaccctcgaatatgctttcgacgactattgtatcgcccaggcagcccgcaaactgggaaaaacagacgactaccattatttcctgaaccgctccctctcttatcagaacctgatagacccggaaacaaagtacatgcgcggacgcgacagcaaaggcaactggcgtacgcctttcgctcctattgcctaccagggaccggggtcggtcaacggctggggagatattacagaaggctttaccatgcaatatacttggtatgttccccaagacgtacagggatacatcaatgccatggggaaaaaactgttcgaggcccgtttggactccatgtttactatcgaactgccggacgatattcccggtgcgcacgatatacaaggccgcatcggagcctattggcacgggaacgagccttgccatcaaattatctacctgtacaattacctgaaacagccttggaaatgccagaaatggatacgccaagtgtccgattctttctacgggaacgaaccgggctcattaagtgggaacgatgactgcggccaaatgtctgcctggtatatcttcaatacgatgggcttctaccccaccgcaccttccagcaacatatacaacatcggttcacccaccttgcccgcggtagacatgcgaatgacaaacgggaaacatatccgggtaaccaccgaaaactggtcgccccagaatgtctacatccgcaaaatgtatctgaacggcaaagagtacgataaatcctacctcacttacgaagatattcgcaacggagccgacattaaattcgtaatgagccgaaccccgaacaaaaaacgggccgtttcagcaggaagcattcctccgtccctgtccgcaccgaacaagacgatggaatataagaaataaacaacctttttcatggagccggcctatcaccttttgagaaccggctccacaatttcgtttgtacgattccacgtaaagacaaatagacgaggaaagccatccaaagcgcatgatttcccatctctccttcaaaaagataataaacaaggaagaaacaccctgaagcgaccaacatcgcccacagcatctgacgggtagccgtagcccctatcaaaatgccatcccaaaggaaagctgcaaaaccagccaacgggacggccaatacccaataaaaataactcccggcctcgtgaataactgaaacatcattcgtcagcagtcccaaaaaaccctttccccccgccgcatacaaaacggtaaagaacaaagatagcccgacaccccaaccgaacaacaaccgtatcatcctgttcaatgcctgcttgttgcgagcaccgatataccgccctgccaaagcttcccctgcataagcaaaaccatccataatgtaagaaaacaacgtaaacaactgcattaacagcgtgttcaccgccagcacgacatccccctgcctggctcctgtcgaagtaaaaaaggttgtgacagccactaagcataaagtccggaaaaagatatcgctattcaacgaaaagaaacggcgcatagccgccttctctcctatttctctccaacgaacattcaccttcaaccgcccataataccggaaccagagcaaaacagccatcagcaggccgccatactgggcaagcaacgtgcccaaagcaaccccttccaccttcattcccaataaaaagacaaaactcaggctggctacgatattgacaacattctgcgtaatggcaataaacatcgggaaacgggaattttgcatcccgatataccaaccggcaaagccatataatcccaacactgccggagctccccaaatacatatattaaaataaaccgttgccagccgctccacttccggcgtcgtttcaatcagggcaaaagccaatttccgtatcggatactgcaacagcaacaaacaaagagagatacacacaccgacactgacagcacgaagcaacacacgaaccacctcacgtaaatcccggctaccgaaagcctgcgaagtcataccgctcgttcccatcctgagaaagccgaaaacccaataaataatcgtaaacaacattccccctacggcaatagccccaatataagaagccgctcccaaatgcccgacaatagccacatcaatcaatcccagcaaaggaacagtgatattggaaatgatggaaggaatagccaattgaagtatctttttgttcatgtacgcacaatctgaattggaagccaaagatagttataaaaccgattatccgcagcattgctttcatattcccgtgccaaaacgcgatgcatcaacttcttttctttccttttctttataaccgccaaagctataccggaatacaactgtcacattacgggtatcctgccacagtttcatacggcttctctgtccctgttcatccacacgtgtcacaggcgaactaccttcaaacaaatcattcccccgtaccgtcaggcgcatcttatctttggcaaatgtccaaaccaagccggcagaaacattgtgtatccgttctatgtcatataagccctgaataacaggagagatgcaataaccactcaattccagcgaaaagtcccgtttcgccgtcaggaaaaaagtatttgtcagctccgcccttccgaacagttttttccgctcaaaagagatatcatataaagtccctttattgtggatagcacatcccatcaacgtcaaccgggaactcataaaaccacctaccttaaaaggcaacacagccaccattccgtacatattataaatatccatattgattgtctgaaaaacagcacgcagttcatcgtggcgttgataagtcatttgttgtatcttatccggcaggatattcgcgaacaatccgaacacatatttacttttcaggatataattcagttgaaacgaatacgaaagttgcggtttcaaatccgggttgccaatcacggaactgtagacattcatataataggtattaggcgttgtcatccaataagacggatacgacttatcacttgatatagaaagtacaaacatgccggtaggaattactttatatgtaaatgtcagctgcgggaaaggagatacttgttcccacaatatctttttctttccggcagaatcgacggaagctttataatattgaagggaaaaagaagccttcagcgaaatgttttccccaaactgtttgctaaatccgacaaagcctccgagcgaataatctttttgtcttaaccggaaagtcccttccgctgcttccgtatcatcaatagacaagtcggattcattacgggtatccgacaaagaagcatctgccccataatccaacacccactctttttcaaacttgcgactatcgtttatgtagaagtttccacgatgaacctgttggcgggaaaatgtctcaatcgtctggacatcctccttttcaaacgtgttatccagatactggatatcgtcattcttataaaaagtataatccaggccggcatcaaatccattatggccggcataaccaatccttgcattatgcaaatcggaaccacctttaagttccaaccccgtttcaactttctggataccgacaaaatccgtcaaagctccccttcgggaaatcatattcggattgtaaaaacgaccggtataagaaaacgataacttatcttcatttctcaagtcgaaatcgaaagccccccttatattatgtgataagtccgaataattattccaatcctgttggcggatatcatatgatttaccgtccacggcaggctgtgccgtcatctcctcttcctgccgtccatgtccataagaagccgaataagagacatccgccgaataacttttcccgacatacgacaaaccgacccgtccggaaggggaaaagaaatgaccttgcgtaccggtcagggagacctcacctttcaatatatcccggaaattcttatcattttccatcacaacgtcgatagctccccctctcaccccataccggggtggcgcgctgtacatgacatcaatccgcctcactttggaagaagaagtagacttcagcaattcgaccaattgttccaccgtcatggagcttttgcggccgttaagcaaaattgtcgtagcaggagccccgataatcgttatgttatcgccctctttccgtatgcccggcaattcgcctatcacgtcaaaagcattatccaccggtttgttcctgactaaattcggaatgtcgtattgcaatttgccccccgacacctttaccaacggacgttcccctttcacaaacacagccggcaaatcgattgtcatactatcatttaccagaatatgttcatccttgtccgtactttgtgccgaaacagacatctggccgaaaaaaagccctgcgcataaataataacaaacagatttcatggtattcgtttttcttgtaaagtttatatttggcagcgacagttccaaatattcctttcctttagtaagactatataacaactcccggcatgaatgttatttagtcttaccaaataagccgggataagcaaactttccctacatttgtttacatgaagacttcattcaaatacatgataatactggttattctttccctttcaggcattttcatttaccagttattctggataaccgatttatatcatttccggcagagacaaaacagggaagagatattgatggccgtcaagaacgccgaccatatcgaactattcgaccgggcggatatcctcggcaaacatttccagaaacaaagagaaacgtccgctattgccgacacggaaggaggaagagccatcagcacaaaattcctgaataaagattcgataatacactcacgaagtatcctgtctttggacagcaatatttatcaccctgaatactccaatgagaaaatcggtaaaatgctcaaaagcacagcagtcgaagttggcaacgatttcaactcattaggggaactgggactacagatgcaacgtgcccttcatgaaacaatcgatacgctgatgcctatccgaatagccaagttcgatagcatcctcacggcctatctgaaaaagaaaggattggagatacagcactttacagaaatccgggacttaagagacagttccgtgacgacctcttccattccggcaaacgccaatctgccccaatatgatttgactaaatgggaatataccacatacaataaaaaggcctattatgtctatacggaacccacacactatgccacactgcaaatgatggccggcattctcacctcgtctttcctgatatttctcatcctgctcctgtcgtttgtttatatgcttcggttccttatccaccagaaaacggtagaacaactgaaagatgatttcacccacaatgtcacccacgagctaaaaactcccatagccattacctatgcagccattgaagccatgatacattataatatcacggacaacaaaacaaaaacggacaaatatctgcatatctgccaagaagagcttcgccgtctcagcagcatggtggaacaaatcctatcgcttggcctggaacataaaaaagaattcaagctcaaattcgagcatatctgcttgaacgacatgctcaataagattatcgagcaacaaaacataaaggcatcgaagccattccgtaccgaattaatattcaccccggcaacaatctcactggaggctgaccgcacacacctttacaatatcatcagcaaccttttggacaacgccgttaaatattcgtccgaccccccgtttattcagatagccgcccatacgacagaccaatccgtcattatccgcataaccgacaacgggctcggtatatcgaaagaacatctgccatacatattcgacaaattctacaggatacccatcgaaggccggacgcccgtcaaaggctatggcatcggcctgttttacgtaaagacgatgatacaaaagcataacgggagcattcatgtcgaaagcatacctgataaaggcagcagttttataattacattaccacaattatcacaaaaacatggacaataaaaaacgcatcttaattgtcgaagacgaagtaacattagcaatgatagtcggcgacgcattagaggaagaaggacaccaagtaatcacagccgaaaacggccttcaaggtatcgattgttactacaagcatcatcccgacattatcatagcagacattatgcttccggaaatagacggtttcgaaatggtccgccgtatccgtaaagacgataaatccgtgcccgttctttttctgagtgcccgttcctcgaccgacgatatcgtcttcggcttcgaacttggcgccaacgattacgtgcggaaaccattcagtctgcgcgaactggtagcccgtgtcaaagccctactctgcacaaacgaccaaaagaataaaaaaacagaattttatgaaatcggactttatactttctatcccgacatccaaacattgcttattgccggagaaaaagagaagctttccttcaaagaatcagaaatcctcaaacgtctttgcgaaaacgaaaaccaccccatctacagcaaagatatcctgttggcagtctggggagacgacagcttttacaatgcccgaagcctccacgtcttcatcactaaactccgccataaactggaacaagatatgagaataaaaatattaaatgtaaggggtataggatataaattgatttatgaagcatttatgtgaataaacactaaaacgtttcaacatatttctcgcagtggaacaaaagtttctctctagtgaaacaaaagtttctccgtaatgaaacaaaagtttcctcatagtggaacaaaatgactcataccgggaaaatctgttaacattcccgcctataattctcatcatatatatagaagtggtagtggtggcaacaaacaagaaaaacaacatactgaactttacccttaaaaacagtaaacaaatatcggatgatactaaaaacaaaaagggcgagttgccccgccctgaatgttttcacaacggaataatccttattgtgatttgcttcaatttatctttgttgtggcaaatatatacatattttctccaaaaaacaagtatatatttgtttttattgtctatttttgaaaaaacataaaaataaactaccatgaaaaagatattaggactggatttagggacaaatagtattggatgggcattgatagaacaagatttcgacagtaaacaaggaaaaatattgggaatggggagccggattatccctatgagccaagatatactaggcaatttcgatgctggaaattccatttctcaaacagcagaacgtaccagctacagaagacatcgaagattgtatgaacgctgcaatctaagacgagaacgtctccacagagtgttcaatgttttaggttttttacctgatcattatgctaaagatattgacttcgttaataatttcggtaaattcatacctgaaaccgaaactaaactaccttgggttaaagatgaagaaggaagattcaaattcctttttcaaagttccttcaatgaaatgctgaatgatttcaaagcaaacggacaagacataaaaatcccctatgattggacaatttactatctccgcaaaaaagctttaactcataaaattctaaaagaagagcttgcatggattattctaaatttcaatacaaaacgaggctattaccagttgcgtggagaagaggaagaagatgtgccgaacaaatcggtggaatttcactctttaaaaatcattgatgttgttgcagatgaaaaaccaaacatcaaaggcgaaacttggtattcactacatttagaaaacggttggatttatcgccgttcaagcaaaaatcctttatatgattggaaggataaagtgcgagattttattgttacaaccgatttaaatgatgacggtacggtaaaaaccgataaagacggtaatgaaaaacgctcatttagagcaccaaatgagaatgattggacattgctcaaaaagaagacagaagcagatattgagcattcacaaaaaacagtcggaacattcatttacgaaactctcttacaaaatccaacacaaaaaattcgtggtaaattagtacgtactatcgaacgtaagttttacaaagaggagcttctggctattcttaaaaagcaaattgaattacagccagaactatttaccgaagaaaaatattacgattgcgtgaaggaattataccgaaacaacaccgagcagcagtcctttttaagcaatcaggatttcgtacatctgtttgtgaatgacatcattttctatcaacgtccgctacgaagtcaaaagtcgtcaatagggaactgctcactggaatttagaatatataaagataataataacaatactattaaggaatatctaaaaggcattcccaaatcaaatccttattatcaggaatttcgattatggcaatggttgtataatctgaaaatttacaataaagataacgaaacagaggttacaacaatgtttataaccaacatcgaagatttggaaaatttatttgacttcttgaataatcgtaaagacatcgaacaaaatatacttattaaatatttattgaaacaaaaagatataaaggggaaaaacgaaacagataaataccgttggaactatgtagaagacaagaaatatccgtgcaatgaaacccatgccatgttatcaacacatttagcaaaagtagaaaatgtgcctgataattttttggaaataattgacacgaaagaatttaccaacagaaagacacaagaacacggaaccgcaaatttagggactcgcgaatatcaactttggcatataatctattctgtcactgataaaaaagaatatgaacaagctttgagaaactttgcgataaagtacaatctagaaacggaatccttcgtagaaaatttaaaaaaatttcctccattcaaaaatgaatacggttcatactcagagaaagcaatcaaaaagctattgccattgatgcgaattggaaaatactggaaatatgaagccatagatgaaaacacaaaagcccggatttccaaaatcataacaggtgaatatgatgagaaaataaaagaaagagtccgcgaaaaggcaataaacttaactgaagaacagcattttcaaggcttacaactttggctggcccagtacattgtttatgacagacattctgaagcagaaattgcaggaaaatggaaaaatgttaccgatttagaagaatatctgaataaatttaagcaacattcattacgtaaccctattgtggaacagattattactgagacattgcgagtagtacgtgatatatggaaacagtatggccacagtcgtgaagatttctttgacgaaattcatattgaacttggacgtgaaatgagaaacacatccgaagagcgtaagaaaatggctaatacggtaatagaaaacgaaaacaccaatctccgtattaaggcattgctcgctgaattacaaaatgacagcaatgttgagaatgttcgcccatattcaccaatacaacaggaaatcttaaaaatttacgaagaatatgccgtttcaaatattgcagacagcgacgacgataaagattttattataaaaatcagcaaaactgcacaaccgtccagtgcagatttacaacgttataaattatggctcgaacagcgttattgctcgccttacacaggacaaataattccgcttggtaaactatttacttctgcctacgagattgaacatataattccacaaagtcgttattttgataacagccttagtaataaagtgatttgcgaagcagctgttaataaaaagaaagacagagaacttggcttagaattcatcaaaaatcaccacggagaaattatagaaacagggcttggacaatctgtgaaaatattagaagaggcagaatatatagaattcgtaaaacagcattattctaaaaaccgttccaaaaagacgaaactactattggaagaaatcccagacaaaatgattgaacggcaaatgaatgacacccgttacatcagcaagtttatttcagctcttttatccaatattgttcgtgcagacagcaatgatgacggcattaattctaaaaacatactacctgtaaatggaaaaataacaacaatcttaaaaaaagattggggattgaacgatatttggaacgatttaattttaccgcgcttcgagagaatgaatcaactgaccgaaacgagtaaattcaccgcttggaatgaacaatatcaaaaaaagctgccagtaattccattggaattgtcaaaaggtttccaaaaaaagcgtatcgaccaccgtcatcacgcaatggatgccttagtgattgcctgtgtcacacgtgaccataccaatctactgaacaaccagtctgcaaaatccgagaattcgcgtcatgatttacaacgcaaattacgttacacagaaaaatggattgacaaggacggcaaagaaagacacaaatactcagaattcaagaagccttgggacaaattcactgttgaggccaaaaatggattgtctaaaatcatcgttagtttcaagcagaacttaaggataatcaataaagccacaaataaatattgtaaatacaaaaacggaaaaaaaataaaggtcaaacaagaaggcttaaattgggctatccgcaaaccgttacacaaagaaacggtttatgcacaagtttccttacggaaaataaaaatagtacgattcagcgaagcaattaagaattggaaaagtattgtagatgaaaaattaaaagaggaaataaagcgtctaatcagtttacataaagacaattacaacactgacataatgaataaacacttcaaagacagaaaatataagtttcaagatattgatgtttcaaaagttgaagtttattacttcgataatggctactctgctgcaagggaatcacttaacacttctttcaatgaaaagaaaatcaaggaatcagttacagatacagccatacagaaaattttactcaattacttatcgacaaaaggaaatgatcccgatttagccttttcgcctgaaggaattgaagaaatgaataaaaatattatacaattcaataatggcaagtttcaccaaccaattataaaagtgcgagtttatgaaactattggtaagaaatttgtggttggaaaaaaaggcaataaaaaagataaatatgttgaagcagcaaaaggtacaaacttattttttgcaatttatacagatgaaaatggtaatcgttcatatgaaactataccattaaatattgttatagaacggatgaaacaaggtttaaatgcagttcctaatacaaatgagaaagggaacaaattattattccatctatctcccaatgacttggtatatgtaccaacaaaagatgagattataaatagtatcaatttaaatataacagatataaatcctgaaagagtttataaactgacagattcaagtgagactacagctaatttcattcctgcctctatcgctgaagttattttcaattataataaagatatacaaaaaaagataggaataaattatccaattcaaaatgaaattggaataggttctcgtgggtctaaaaatcaaaaagccattacaggggagatgacaaaagagatgtgtataaagcttatagtggatagattaggaaatattttagaaatgagaggattatgagtaatataaaactttctcaagacaaaatactacataaaaaacaaattactatttattctaaatgaggaataataaattttcaaactaattagtcatgataaaaagcacattatacttcggtaatcctgcatatttatcattgagaaacaatcaattgataatcaaacttccggaagtagagaaaaatgatactttaccggatagcttcaagagagatacggtcagaagtaagcctatagaagatatcggagttgttgttttagaccacaagcagattacaataacttccggggtattggaagctcttctggaaaacaactgtgccgttattacgtgcgacagcaaaagtatgccggttggacttatgctgcctttatgtggaaatacaacccaaaatgaacgttttcgggatcaactggatgcatctttaccattaaaaaagcaactttggcaacaaacgattaagatgaagattgagaatcaagcaacagtcttatctaaaagccgaaattgtgggattaaaaacatgcgtgtatgggctaatgacgtccgaagtggcgacccggataatttagaagcgcgtgcggcagcctattactggaaaaatctatttcctaagattgaaggttttaccagagacagagaaggccttcctcccaataatttattaaactacggatatgccattttgcgtgcagtggttgcccgaggattagtttcaagcggtttacttccgacattaggcattcatcatcataatcgctacaatgcctattgtttggcagatgacataatggaaccttatcgtccgtatgttgataaattaatagtcaacatcataaacagtaattgcaacattgcagatttatcaaaagaaataaaagcaaagttattaacaatcccgactttggaagtttcggtgaacgggaaacgtagtcctctcatggttgctgtaagtcaaacgacagcttcattatacaaatgttttagtggtgaacttcgccacatagcatatccggaaatgtaatatgaatagatttagtgaatatcgtattatgtgggttcttgtattttttgatcttccgacagacacaaaaaaagaaaagaaagcttatgctgatttccgaaagaatttgcagaaggacggttttactatgtttcaattctccatctacgttcgtcattgtgcaagcgcagaaaatgcggatgtgcacataaaaagagttaaatcctttcttccacccaatggtcaagtcggcattctatgcataacagataagcaatttggcaacatagaacttttcttcggcaaaaaagaacaaccgattaatactccaggccaacaacttgaacttttttaaaataagaaatcctgccttgcaagcaggatttcttactgaataacaactacttttttattttctaatcgcaagcattaagcactgaaatacagcaaattgcgcacaatcagttgttttcagtatgtcaaagataatagattgaaagc

SEQ ID NO: 1360 - DNA, 16083 bp, synthetic construct
  source 1..16083: mol_type = other DNA
  misc_feature 1..16083: note = Synthetic
tatgcccgtggcgaaggtgcggcgcacgtcggtatcgatgagggccatctccgcggcctcgtagaaatacttgtcgtgcatgtagtggatgaggttgagcgtcttcacgtaaacggcagcgagccactgcatcatgtccatgaaccttggcatgaactcctcgtaggtcagcacgtcgccctctatcggacagtatgccgggcccacctgctcgcgcgtcttgctgtccacaccaccgcttatggcataggtcaagcacttggcgaggttggcgcgcgcgccgaagaactgcatctccttgcccgtctgggtagcgctcacgcaacagcagatgctgtagtcgtctccccatacaggacgcatcacgtcgtcgttctcatactgtatgctgctggtcttcacggagatgagtgccgcatactgcttaaacgactttggcaggcggctgctgtaaagcaccgtgaggttaggttcgggcgacggccccatgttctccaacgtgtgtaggaagcgaaaatcgttcttggtgaccatgtggcgaccgtcctggcctatgccgcccacctccaacgtggcccaaacggggtcgccggagaagagctggttgtaggatggtatgcgggcgaacttcaccatgcggaacttcatcaccaagtggtcgatgagctcctgggcgtcctgctctgtcagggtgccctcgttgaaatcgcgctgtatgtatatgtcgaggaaagtggagacacgtcccaccgacatggccgcgccgttttgggtcttcaccgcgccgaggtaaccgaagtagagccattgcacggcctcgcgcgcgtttgtcgcgggcttagagatgtcgaagccatagagcgccgccatgtctttcagtcccttgagggcctttatctgcatggccacttcctcgcgcaagcgtatcacgtcgtctatcatctcgcgctcgcccatgttcaagaggtcgttgtgcttctcctggatcaggaagtcgatgccatagagggccacgcgacgatagtcgcccacgatgcgaccgcgcccgtaggtgtcgggcaggccagtgaggatatggttgtggcgcacgcgcttcatctccggggtgtaagagtcaaacacgccgtcgttgtgggtcttcacatagttatggaatatgtcatgcagcttctccgagggttggtagccgtaggtggtgcaagcctgttcggccatctttatgccgccatagggcataaaggcacgcttgagaggcttgtcggtctgcaggcctaccaccttctccaggtctttcgtcttgtcgttgatgtaaccggggccataggccgtaagacctgagaccacttccgtctccatgtcgagcacgccgttcttggctcgctcctccttctgcaattgctgcagttcgccccaaagggtgtcggtagcttcagtgggccctacaaggaaactctcgtcaccatcgtattgggtgtagttattctgaataaaatccctaagattgatttcttccttccattgtgtgccatggaagtcgcgccatgcgtttttcataaataaaactttggtgttggtttataaaacttaggcatgcaaagttaggctttatttccctaacaaaagattttttttgactaattaaagtgacaaaaacgacaatttagcgcactgccatgtctcgaagacatgagcgtcaaggcatggcagcacgtgaatcccaacatgagtcgtgctgcctctggataccacaggtcccacaacacacgagcacgccaagtcgacccacagaggtgtcgatgggatggaagcccaggtcgccgggcgtgaagtaaaacttctcgtaataggctgggtcgtcggggatgtgcatcttacggtatttgccggcaatggagccgtcgctttctatcaccaccgcagtgttgtgacacagtcccgcggcacgcttctcgaagagcgaggtgacgatgaccacgccaagctcgcgcgcctgttgcccgaaaagctcggtggatggcccgggaatggtctcggcaaggtcgaataggtccacgttctccgtctggcagaaataaatactgttgtgaagtttacttaaaagtttacgcaaactcctacggcgtgtcgtgtttgtttcatgccatttggcaaatccaaatatacatttgaaccccttaacgaaaactcaacgctttccttagcctttttttgttcttatgcgagataacaaatagtggaatactggagactgttaagcctataccaatccccaagactacgtcccatgctttcccgtcatctttccaattaatattagtgtccgcattgttacccacatctcctatcaaaccgactattgtaccacaaagacccactccaagtgtagtaaatgcacacgttttgagcttcttgtaccttttccaataaatagtatgttcataccccttttgagagtttatctttgccacatctttatacattggaaagggagatgacaaacatcttacagaatacgattcatattctttcgcatttgccaatagcgcacaaaacaagaacataagagtatatatgtatcgcatagctggattgaaaattagatagtggggatttccaccccactatattgttttatttatctattcggattatttatctattcggatatatccttgataataggtggtttttccatttttttgctaatattggcacataatgttggagatattggggcatccaccaccaagcattggcatcatgaataccgtcattcagtctacgaatcgcctcaatatgtcttcgtacttgtctatcctgcgatccctgaggaagggccaccaacgcctcacctgctcagagcgggcaaggtctatctccaccacttgctcacactcgtcgtcgttgccggcacggaacaccagatctccctgcggcccagccacgaaactggaaccccaaaactgtatgccaccagtctgatggcttgggtctggctcgaagcccacgcggtttacggttatcacgggcaggccatttgccacggcatggccgcgctgcaccgttgtccacgcctcgcgctggcgttcctgctcctccttggtgtcagaagactcgtagcctatcgccgtgggatagataagcatctcagcgccttgcaacgccatgaggcgcgctgcctcaggataccactggtcccagcaaaccaagacgccaaggcggcccacagaggtgtcgatgggatggaagccaaggtcgccgggcgtgaagtaaaacttctcgtagtaggctgggtcatcggggatgtgcatcttacggtatttgcctgcaatggagccgtcgctttccatcaccaccgcagtgttgtgacacagtccagcggcacgcttctcgaagagcgaggtgacgattaccacgccaagctcgcgcgccagttgcccgaaaaactcggtggatggcccggggatggtctcggcaaggtcgaagaggtccacgttctccgtctggcagaaataaagactgttgtgaagttcctgcaacactatgagccgcgcgcccttcccggcaagctgcctgcacttgtcggcaaggcgcttcttgttttggtcaatgtcggcagtgttgtgctgttgtataatacctactttcaatttcatgttcgtaaaggttttaacttaaaagttgttttttatcaagcccttgggcaattgcatcgtgaggcagtgtatggagccgtgctgacgcactatgacagacgcgtccacggcgacgatttccctgccggggaaagcctcggccaccaaagccttcgcctgttcgtctttttcccgctgcccatacactggcacgatgaccgcgccgttaatgacaaggaagttggcataggtagcgggcagccgctcgccgtcgaataccatctcgtctggcatgggcaacttgagcaacctgtatggcttgccctcaacggttgtcaaggcttgcagctccgtctccagcgccttgaagtcggcgtattgctcatcagcctcatcgtcgcagcccacatataacaatgtgtcgtcggggcatatcctcacaatggtgtcgatgtggccgtcggtatcgtcgcccacgaggttgccatgccgcaaccataccacgcggtcggcgccaaggtcgcccttcagcctctcgcctatctccgcctcgcttaaaggctggttgcgacgcggggcgagcagacactgggcggtggtgaacaccgtgcccttgccgtcgctctctattgagccgccctcaagcacgaagtcgtcgtggctctccaatgcggccgagaacaggcctttgccatgaagcgcagaagtgatggcattgtctttttgccagctgaacttctcgccccagccgttaaacctgaagtcgagcagcttgaggctgccatccttgccgcttcgcaaggttatgggtccgtggtcgcgcgcccacgtgtcgttgatgtcgcacgccaccaccgtgacacgtgccatctccgcctccgtcagcgaatcactaagcaaagtctcgacataggctgcgtcttttgccgcaatgacgagccgctcacgcgcggctatcacctttgagagcgtcaagtatgtagacgttatctcgtcgatataatgtcgccaatcggtatccgggtttggccaagtgagcattacgccatcttgtggctcccattctgccgggagcgtgtattcgggttgtgccatgaatgttatttatttgttgtatgcaaaagtaagcaataacacttaaaaatcaaagctcatcaagcaaatagttggttgccaagcgccactattttatccttggggcaaccaatttgacacaaacatggtatgggggcccatcaacggtgccatgggatatgcgggcattcctcctccagataggcgcgcatcagcgtgagcgcctgctccatgtcgcctgctatcaccgacttcacgaacttggtcacgacatcctcattatccttacggatacacctcaatatgactactgcctgaactgccgttctttattattcgtatctgcgtggttatgcgctcgctcatggtatcggtgtggcttatcacgcccaccttcttgccttgcgacgactgcagcatggcgagcgagtcgatgaccgtggaaagggtgtcgggatcaagcgtgccaaagccctcgtcaatgaaaaggttgtcgaaggaaatgttgcgcgacgagagtgccgacaagccaagagccagtccgagactgacgatgaatgtctcaccgcccgacagcgacgtcgtgtcgcgtatgtcgtcggcacgatcgtggtcaataacccttatgccaagcgagtgtttcacctgcaccagctcatagcgcgtgttaaactttcgtatctccgcgttggcatgagctatgaggaaacgcagcgtgtagcattgcgctatcttgcgcagcgtgcgtccatcggtaccaatggcgtcggttatggcagtccactcgcctgccgtcctctccgcctgcatcttgcggtcgtgcatgatgcccatctgctgccgcgcgtggtcatagcgttgctttcgcgattttgcctctacgagttccgtgtcgggttgcgcttccagctctgccttgcgccttgcgaggtcgtcgcgcgaggcatcaggcttcgtcgcctgatgttcggcgtgctccttggccgccttgtcaagtagcgtttgtgcctttgtcagcgcgtcatccttcgcctgtacgcatttcctcatccgttcccagttgtcggtagcggaatagagcgagactatgtcggccactgtcatggagttttcgccattcttctcgttgtaggctgcaacccacgctgaaagctcgtcggtgcgccgccctacggttttctccgccgagcgcgactgtttcttgcaagcctccatcttgcccgacaacgcgctgaggttattgcttagctttgctatctcttcagtcttggcagtcaccttgttgtcggcttgcttcactttctccgcaagttgtgcttcatatttgtcagggtctttgtcacccacctcggctttcatgtccccgtgcaagcgttccgccgcggctttggcatcgttgtagactttcaaggccgtggccagggcgtttttcttttccttgagttgcgacagcaggttctccgtcttgcccttggcggtggcaagctgcgtcatggcgacattccttgcctgttcagccaacttcatccgcttgtctgaatcctccttatattcattcagttttttctcggcacgctctttcgccttgcgcgcgttctcaaccctcttcaccaaggcgttgtagctgtcaagggccttagttgcctcttgcgccttccgctcaacgatgggcagcgactcgccgagagcctcagccgtggcctcccattcaggatgcctgccgtgcatggtgtcccagtcggcggcggcccgctttacgtcagcctcaagagaggctatgcccttccctatctgcttcatgctcccgtctatgcttccctgctcctttgtcaggtcggtcaaggttcgcgtctgcctgtcaagctctttttccttgtcctgtatgagcctgtcaagctccgacatcacgggggcaagtgtggcgtcgtcgacaaaaggatgatgagtggcgccacacagcgggcacggctcgccgtcgtgcaggccatggcggtgagcctgccaatcgtcgcttgtcatgagcgtgtgcgtacggcgcaaggtgtccaactctcttttcaggctttcggtatcaatgccgcctattgccgcctttatcccttcacttcgcttcttcaggacctccagctccatgacgttcttttcgaggcgcgtctttttatcatcaaggtcttgcagcgtctttatggccgacttgatgtcaccaagatttgcgtcagcctccgtcttcgcgttttgaagggtctcgacatccaagccgtctgcctttgcggcctcggccgtataagcatcggtcaaggaagccaccgcctctgcgagccgcttggtctggctctctgtctcggcagccgatgcctcataagcatcttcgcgtgtctttacatcatcctccgcacgtgatatatccgctaaattgccatcaagggactcttgtgccgccacgactgcttgctcgccacggtctgcttcggcctttttctcagccacgcccttttccgaggccttcagctccgcctttatggctcgcgcgcggtttatgtgcggcttctgcttgtcatgctcatcgagtgcggcttggcgagcctctttcagatgtttaagcgtgccggcctccttgtctacatttgccttaatcgtccctatttgcgcctcggctgatttgatatcggcgttgagcctgtctatgtcgcgccctgttttccttatgtccttgtaaatgtccaccgcttcggtagtggcatcgtgcagctcgagtcgcgccttctgccctgccatggcgtcaacctcctttttggcgagttcaaggctttcgccgcaatctttcaagtccttgctgatgtcatcctcacgcgcgtaccagtcgagagccgtttttatgttgtttagctccttacggttctgcgcggcacgctgctcaagttcggcaatgcgcgcgttaagctcggccaactgctcatcggtcaggtcgtcttgctcataggcagagagcttcgcgcgtatctcgttgagattttctacggcggcgcgacggtgctctgctatcttctccgatacacgcgtgtaggtgccgtcgtctccgatgagcttctccagcagttcatagcgttcgtcctccttggcattgaggaagttggcaaacgacccttgggcaatgagcaccgtccgcaggaactgctcataatcaaggcctatgatgtctggcagcgagctccagtccacgggttcctccgtctgcttgccgtctttcacgccaatacggtaaagcgacgtttgggcgttatcgtatttcacgcgcaggaagcggacatgccattcggcgcgatacaccatgccgttattggccaggaaggtgagcttgctgtatcccgactttctgccacgtgtcaggatgttgcggctgtcggtcggcgcgagccggttgttctcgccctcctccggactgccgaatatctctatgttctggttgcggtcgcccttcctgcgcggatagcgcggggcacggttgtagagcgcaaggcagatggcgtcgagcagggtcgacttgccgctgcccgtaggtcccacgatgctgaatatcgtgctgtcggcaagtgccccgtgctcaaagtcgattacctctccttcctgacggtcgagcgaggcgaggtttagtatctcaagtttaagaaatctcatggttcgattgtgtgtgtcatcagttgtcggcagacagctcgttcattacctcctttatcatctccgacatcttcgagccgtgccttatggcgaaagcctcacgcagggtgtccatggggtcgcggttcaagatgtcgtctatgctgccaatgcgccgcgagtcggtgatggttgtgatgtcgagcttcggaatcaccttctgcgtcttgcacagcacggcgtccttggtggccatcaggctctccagcttccggatggcttctggcgccggcttgtcgagcaagacgcgcagctccacatactcgaacgcctcgcttggcttgtcgccctggcggtcggcgagctgcttgacgatgagcttttgcagtttcttgggtggcagggcctcatcgccctcaggcaacacgcgcagaggatgctgcggacgatattccacgaactccacctctggttgcctgtcctggcctatggtcagcaggtccacgccgtgccgatagtctttctccgcaaacgacattggcagtgcgctgcccgtatagcgtgcccagtcggtgccccagacgcgttggcgcttgtgtatgtgtccgcaggtcatgtagtcgggatgcccttcccacttgtcgatgttcacctcctcctgtccgccgatgattatcttctcgctcgcgtcgttatcggcaatgtcggtgccatgggcgtagaggtgcgccatcattaccgtcggcttgtcgggatagagctggcgggcacggtcggtgagctgccgcagaaagcggttcacgccatgcgagtagctctcgtcggccactacatctgagcgcagatagggcaccgcaagcaccactacgctgtcgccgccacggccttgtatgggtatgatgaggtcatcgtagtcggtctgccaactgcccgacgcgccttcctcgtcgtccgacggcacccacgtgcgcctcacgttgccgcgtatctctacattatagcgttcgagcagcggacgcggggcctcaagtcggttagacgaatcatggttgccggctgttatcacgacggtcatgtcctgacacgcccgtgtcgcttcggcaagaaactcataataggcatgttgtgccgcggccgaggggttgccgttgtcgaagatgtcgccagccacgagaagtgcgtctggttggcgcgtcgtgatctggtccaacagccagttgaggaaatggcggtgctcgggcagacggtcgttgccatggaagaggttgcccaggtgccagtcgcttgtggatattatcttcatcggatatctatatatatataaggtggtctaagacagaaaacgtttgcttcacgccacattgatataacgcaatgcaaaaatagcaattattttcttaaagatagcagtaatgctgaccatgaaacaaaaaaagtccaccgttaaaggacgatggaccaacctaatgttttcacaacggaataatccttattgtgatttgctcaaaaatatggtgcaaatgtatgcttttgtatccattccacaaaataatttcatcagaaattttgcccaaacgcaagattagtataaatttgtatccgtttcatgctcgttattcattaaaaaacggttttatatgaaaaatatagtaggcttagacctgggaactaacagcatcggttgggctgtacttcaagaaagcgcaatcaacgactatgaactgaaaaagcaaatatcaggttccggcagtaggattattcccatggacgctgcccaacttggtgatttcgcgaagggcaacaccgtgtcacaaacaaaggaacgcactggatatcgtggcgtcagacgtttgcgggagcgttgcttgctcagacgtgaacgcctgttgcgcactcttgacataatgaattttcttccaccgcatttctcggcgtcactgacaagatacggcaagttcaagaacgctgacgatgagcctaaattggcatggagtaaggacgacgacggcaaggctgcgtttcttttcacaagttccttcaatgagatgcttgaagatttcaaggacacccacccggaactgcttgccgacggactgaaggtgccttacgactggactctatattacctgaggaagaaggccctgacaaaagccttgacgccatacgagcttgcgtggataatacttagcttcaatcagaaaaggggttactaccagcttcgtggtgaggagacgcaagcagacaacagcaagaaggaagaataccttgcccaaagggttgttgacatcatcgacacgggagagaagaaaggaaagagcacatggtttgacgtggtgctcgaaaacggcatggtgtatcaccgacctgccgagaccaaacccgactggattggcaaaacaaaggaatttatcgtcactaccccactcgacaaggacggcaatccgaagaaagacaaggaggggaacataaggcgatcgttcagaatgccaaacgacgatgactggaacctgcagaagataaaggcggagaaagacatcgacgactctggcatgaccgtaggcgaatacatttacaacgctctcctgcataacccgaaacagaagataaaaggaaagctcgtgagggtcgtggagcgcaaatactataaggacgagctgaggagaatactcgaaacgcaaaagaaattcataccacagctcactgattccgggttatatacgagatgtatagctgaactgtaccaaagcaatgaagcataccgtcagtctatagccacgcgagacgatttcacttacctgtttgtcgacaacatcatattctatcagcgaccgctgaaaagcaagaaatcgctgatagacaactgtccttacgaaagccacacttatataaaagacggagaggagaaaacggctccggtgaagtgcatagccaagtcgcaccctcttttccaggagttccgcctatggcaattcgtcggcaacctgcgcatttaccagcgacaggcgcaagtgggcgacaaagtgaaactcgacgttgacgtgacagggcaatacctccagacggaagacgacagggccgccttgttcgactatctcaacgacaggacggagataaagcaggacaccctgctgaaagacttcttcaacatgaagaaacctaaaggcaaggacagcgtttacccgtgcaggtggaactatgtggaagacaagacttacccttgcaatgagaccaggggtaaaatccttgccagactgaagaaggcaaacatacaaaccgatttcctctcagacaaggccacagaagaacacctgtggcacatactctattccgtggaagacaaggatgagctacgcaaggcactggagaagttcgcgtctgacaataatcttgagcatggtttcaccgatgccttggccgacatggagcctttcaagaaagaatacggcgcgtattcggcaaaagccataaaaaagcttctgcctctcatgcgcatgggcaagcactgggactacgacgccatcgacgagaacacaagaacgaggatagagcatatcatcaacggtgaatgtgacgacaccattcgcgaccgcgtgagggaaaaggctataaaccttgtctcaccacgccaattcaggggcctgccgctatggctcgcgtgctatatcgtgtacgacaggcatagcgaatccgccaacagtggccaatggactaagtctgacgacatagacaggtatctctgccagttcaagcaacactcgttgagaaaccctatagttgagcaagtggtgacggaaacgctccgcaccatgcgcgacatctggaaaaagtttggcaagcccgacgagatccacgttgaactgggacgcgacatgaaaaaccccgccaacaagcgcggcgagatgaaccgtcgcatgcttgagaacgagaatgctaacctgcgtgccaaagtattgctcaccgagctcatgaacccggagtttggcgtagagaacgtgcggccatactctccgagccagcaggagctgctcaggatatacgaagacggggctatgagcaatggcgagaacgatatcgacgatgagatatcggccataatgggcaagctctcgcaaaccgacatcaagaagatgccaacgcacagcgaagtgaggcggtacatgttatggctcgagcaaaactatcgctcgccctacactggcgagatgattccgctcgcaaagctcttcacttctgcctacgagattgagcacgtgattccccagtcgcgctatttcgacgactccatgtcaaacaaggtcatctgtgaggctgaggtaaacaagctaaaagaccgcatgctgggttatgaattcattaagcggcacaagggggaagtggtgcagctcagcatgggacgcaaggtcacgatactctcgcccgaggaatacacgaggcacgttgaatgtcaatacaagaacaacaaggcaaagatgcgaaagctcttgatggacgacattcccgacgagttcataaaccggcagctcaacgacagcagatatatcagcaagctcatcatttctttgctctcaaacatcgtgcgcgaagacggtgaggaggaagccacgtcgaagaacgtcatagcctgcaacggaaccatcaccgacaggctgaaaaaagactggggcgtaaacgacgtatggaaccatatcgtcttgccacgcttcgaaaggctcaacgagcttaccggtaccgataagttcacgaccatgagcaaggaagggcatgagataccggccatgccgctcgagctgcaaaagggtttcagcaaaaagcgcatcgaccacaggcaccatgccatggatgccatagtcattgcctgcaccacgcgcgaccacgtcaacctgctcaacaacgaggcggcaatggcaaaaaacaacagcaaccgcattgccctgtcaaggaaactcagacgctacgagacggtaaaggtggtaaaagacggcgtaagcaaggaaatgtcagtggccaaggagttcaagaagccatggagcggtttcaccaaggatgtggagctggcgctgagggatatcgttgtcagtttcaagcagaacctgcgcgttataaacaagacgacaaactattaccagcacttcaaggacggcaagaaggtagcagagcctcagacaaaaggtgaggcgtgggccataagaaagcccatgcacaaggagaccgtgttcggagaggtgaacctgaggcgcgtgaaggaggtctcgcttaaagaagcactcaaacgcccagacgacatcaaggacaaggagctgaaagccaagataaaagacctgctcaacgctaagtgcaacgaaaagcagataaagaaatatttcgaagacaacaaggacgtttggagcgacgtaaacctgaagaaaatcaacatcttcttcttcaccaaggagacgaaagaccgcttcttcgccacaaggaagcctatcgacacttctttcaacaaagacaagatcaagaatcaggtcaccgacacggccattcagaaaatcatgctgcgccacttgaagcttaaaggcgacaacgctgaagaggcgttctcgcccgacggcatcgaggagatgaacaggaacatcgcggagctaaacggtggcaagaagcatcagccgatattcaaggttcgcgtgtatgaaaaggctgacaagttcgccgtgggccaaacaggatgcaagagtaagaaattcgtggaggcggcaaaaggcactaacctcttctttgccatatacgaggaagagcagatcgacaagaacaccggtgagccggtttccgtaaggagttatgactccatcccgctcaatgtcgtcatcgacaggcaaaagagagggttgccgtctgccccggaaaacgaaaacggaacagcgccaaagtatgtgctctcgccaaacgacttggtctatgtgcctaccgaagaggaaaggaaaagcggaaggattaatgtgccgctggacaaggaaagaatatacaaatttgtggacggaagtggtaccaccgcaaattttgttccttactttgcttctaacattatattttccatggacaaggaaagggcaaaaactttttgcaatggacgcattatccaaaatgaatttggagaaggcagtcctaaatccaagaatgagcgagcattaactggagaaatgataaaaaaagtctgcatccccataaccgtgacccgacttggtgagattacactaaagaaatgacaccctgcatacaccgaatggcaaccatacggaggccattcggtgtttttttattaacaccttaaatcaaggcctatgatcaagaaaaccctttatttcggaaaccccgcgtacctgtctttacgcatgggacaaattgttatcaagcttccggaagtggaacgcaaccccgacttgccggaaaggatgaaacaagagacggaagtgacaaagcctatcgaagacataggcatcgtgattctcgacaacaaacgaataacaataacccaaggactgcttgaggttctgctcgaaaacaactgcgccgttataacctgcgacagccacagcatgcccgtcggccttatgctgccgctatacggcaactctacccagaacgaaaggttccgtgagcagttgggggcatctcttccactacgcaaacaactttggcaacaaaccataaaagcgaaaattgaaaaccaagccgcggtgctggcttcatatagcaaagcatctaccaagactatgcaacggtgggctaatgacgttaggagtggtgacccggaaaacatagagggaagggctgccgcatattattggaaaaacgtcttctcaggatttgaacagctcgctggtttcacgagagaccgcaacggcatgccacccaacaacctcttgaactatggatacgccatactcagggctatcgtggcaaggggactggtgtcgagcggaatgttgccaacccttggcatacaccaccacaacaggtacaatgcctattgccttgccgacgacatcatggagccatatcggccatacgtagacaggctcgtgctgtctatcatcagggaatgtggagccagcgacctggagctgacaaaggatgtcaagttcaagcttcttggcattcctaccatggaagtggctatcaacggcaagaagagcccgctgatggttgccgtcactcagaccacggcttcgctctacaagtgcttctccggagaacagaggaaaatagcctatccggaaatgggcacaacataatggttaaccaacctgcagaaacaacatggacagattcagcgagtataggattatgtggattcttgtttttttcgacctgcccacagagacgaaaaaggacaaaaaggaatatgccctttttcgcaagagacttcgttgtgacggtttcacgatgttccagttttccatttatgttcgccattgcgcaagcatggagaatgcagaagtgcacatcaagcgagtaaagtcttttcttcctgaatacggaaaagttgggatattatgcatcacggataaacaatttagcaatattgaccttttttatggaaagaaaaccattccacaaaaatcaccagggatacaacttgagcttttttaacccaaatcggtcattaggatttctctgtgtcgtacggcaaagagaaatcctttaatttttcccatatagataagaatgattgtcgtgtttt

SEQ ID NO: 1361 - DNA, 16070 bp, synthetic construct
  misc_feature 1..16070: note = Synthetic
  source 1..16070: mol_type = other DNA
aaatagtgtttttagaccagtaaatggtgatttaaaagacgaaagtcaattcagatggatgatttttgagttattccatctcgttgaggtggttttcggccgcagagccgtatttttgataaagctccagcaattgatgtactgcctgttcggggagcgatagtatttgtgcgacttgctcaaccgctattttgttgttcagcatcaacagcgctgagaggtacaggcctttttgaatgccttgtttttcacctttagccaagccgatttctaaaccttcgactcttcctttttctataccttcgattctccctttttctataccttcgattctccctttttccaaaccttcaactcttcctttttccaaaccttcaaccctcccttgttccagtccttcaaccctcccgcgttcttctgcatcgaggaaggccgaacgttcggcgcgaatggagtcccagtattggtcgtagtgctcgagttgctctttggagtaggagccggattcgaggatgtggacggcttcactgatgagggcttcgtggagcagttcgtcgggtatttggctggtgccgtcctctatttcggtgaggaacttgagccaaagaacctgcatgcgtttgtcgcgtaggttggcggccttgaattttggcagttcaacgaagacaaattcgaggccttcgatttgtttttcaggatgggcgtggttgacaattttaaagtggtgatagtagtcggccagttggggttcaaacgtttcgttgaccaggctaagggcatagacgggctgtaggagtttgtattccttggcgttgtcgagttgtttgacgtatgcctttgaggcgttgaacaccactcggtttttgaaactctcggtccagtacatctgcatttcgacgatgaattggcgtcctttttggtcacggcaacgcacgtcgacgatggtgcgcttgaggacggtgatttcgggcaccagttcgggcgagaggtattcgagttcttcgatgagggcatcaggctcgagggggagcatgctgttgaggaaacttttgcacaggtgcgggtgttcgccaaagatgcgcttaaaggtgaggtcgtttttgggatcgaggtaacgcataacgtgctgtttggtgcaaagatagtaaaaatggatggcatgtggtagaggcacggcatgccgtgcctctaccatttggtgtttcaaaaaaggtgtttcgtctatttaaaatgcaagttggtcagtattcgggggaagaggggataatcgatgttttttatgattaaatttaaaaatcgttaaaaagcgagaataaccccccaatttgtcgatatgttagcgattcataccaccacgggttcgacttactggacatttatgtcggaggatcagttgtttgtgattagtcacaatggtcaactgagttatgagcatatgcgtgaaaattatttgaagatagctgccgatcggtcgctgccccggacgttgaatgtgttgcacgattgtcggaatgggcattttacttatgatatcggtcaggtgcaggagttggtgagtatttttgaggagatgagtttgtgttttgatcaggtggtgtgggccgacttgcacaaccagcccaagatgacggcttacgggtttatgtttgccaacttgattgataatccgcgcattcagtatcggttattttcatcagaagaagaagcgatgggttggttgacgaacaaacgagtgttggccatcaagcagttgaaggtgaggtgaagcctcaggggagtttttggatggcgttgacaaggtcgttacagatggccagtttgccgttgatgaggctggtggtggtgacgatgcctttgaggcatattttttggtcgggcaggcggtagatgtcttggtaaaagatgtatttgagaccttcgtggaccagtcggagacgcaccacgaagtggtcgccgcttttgagcggagttttgtaggccagatcgatgcgagccactacggccacgattccctgatgaaataattcctgaaagttaagtcccagcgtgagcagaaactcatggcgtgcgtgttcgaggtagttttgatagacgctgttgttgacgattccttggaggtcgcattcgtagtcgcgcaccttaaattccagttcgtaatgatagttttgagacatgagagatgattaattgttgaatggttttatggcacgctggtagatgccgtgcatccaggcgatggccatgccgtagttggtgacgggaatgccggcgtcgatggcaggtttgaggcggttgaggatttgttttcgggtaatcatacatccgccgcattgtatcaacaaggcatattggttgatggggcgggggatggcatcgagaccggccaccacatcgaagtcgagttccttgccggtgaactggcgcatccagcggggtattttcacgcgaccgatgtcatcgcaggtggtgtggtgggtgcaggattcgagaatgaggacgcggtcgccgttgttgagcattgagatgtgcggggttccctttttgtagttttcaaagtcgcctttgaagcgggccagcatgatgctgaagctggtgagggggatgtggggggggatcatttggttggccttgtcgaacacctggctgtcggtgatggcgatggcgggttggatggcggtgtttttgaggaaggcatcgacctgggtttctttgaggacgatgcaaacggcatcgttgtcgagtgtgtcgcggatggcctgcacctgcgggagaatcatgcgaccttcgggggctgcgatgtcgatgggggtgatgagcaacacgatgtcgttagggtggatgaggtcgcccagcaggggcgggtttttgaatgatgcttcgggaatggctttttggatggccgacaccacggggtcgatggaggcgtgctggttgaactcgaccacggccagggcgccggcgctgacgcacagcgaggcgatgtggttggagaggggttgctggtcggatttgttggccaccacgatgaaagggatgtcgtagtgtttaattttttggatgagctgggcttcgaggtcgtcaaagcagttgttggcgatgaccaccacggccaggtcgatgaggctgagggagtggtgggttttgttgacgcgtttgagtcccagttcgccatggtcgtcgatgccggcggtgtcgacgagcaccacggggccgaagccggtgatttcgagggattttttcacgggatcggtggtggttccgggcacgttgctgacgatggctacgtcctggccggccagtcggttgatgagggtgcttttaccgttgttgcggcgtccgtagatgccgatgtgggggtggcggtctttaggcatggcgggagtggatttagtgatgagggggtaaagttagaaagttttttggggagtttgatgccctttgagtgcgtgagggagggctggccttgacaggattgaaatccagccttacaggatggggagagtcgccgcctctgtgtgggagggggcgtgccaattcccgggggattgggtgtttatactttttgggaattttggaggggagtgaaaaagggctattgaactaaattgttcatgcactcttcatacactatctatgctttatctatgcttcatctatacaccatctatgcttgagggtggggtaaactttctgaatcccttgcgtggtaaggctttcagaaagtggggattgaggggttttcggtgattgggggagattgggggtggaggtgtttgtataaaatgatacagattttcgggctgtggaggttttttgttggggtgggaggacttgactggattaaaatccagtgttacaagattgggcgagcggatggctctgggatggatgtgaggggctttgatgcggtggtgtggactggattgaaatccagccttacaagatggggcgagccgatggctctgagtgtggtgacgttgggtgattgggttatgagcacgttgtattagccaaggagcagatccatttcctgagcgaggatggaggattggggtgtggtaatttcccagacgcctttgtcgatgagttgttttttgaggaataggaaggtggtgacggggaactcgtctttttgccatttttgggagtagttgaggagtcccatttgtttgatcatgtcgtcgagttctttgagtatggcgtagaaaaagaggttcatcttgcaggaggcatcgatggccaggtcggtgccggagtcgtcaaagatgtcggtgattttaaagatttttacttgaagggtgtctccgtcgggggtggtgagcacccatcggagagccccgttttggccataccactcaatccaggcctggttttcttcgccccacatgtgagccgggttgagaatcattccggccatgccgttgagcaggtcgtagagggggttggcgtggttggtggcatcaaagtcgacctggttgccattgacggcaaaggtcattttggccatcccgttttgggtgatgcggtatgagaattgaacgggattcttcatttggtgtaaaaagtatcaagatttcgtttcaaggctttgggaaaatcaaggtcttgcaacgtttcattcatcttatgagaaaaatagttcatcaaaaaagagcacccggttcaagcaaaagtgaaacagggattaacggctaataaaaataaaaataagaattaaaagtagaggccatttgtgaaaaaaaatgtggggggaagcgaaatattaaatatttggccgggcataggtttttacatcctcggcggtgatggtgtcggtgcagaggatgatgagacgttccatcacgttgcggaattcgcggatattgccggtccagttgatggattggagctcgatgatggcctgttggtcgagttgtttggggggacatttcagttcgtcacaaatcttcttcaaaaagtattcggccagcagggggatgtcgtcgaggcgatcgttgagcgccggggcgtgtatgaggatgacgctgaggcggtggtagagatcctcgcggaaggttccttttttaatttcgtcctgtaggtttttgttggtggcggccagcacgcgcacgtccacgcggatgtccttgtcgctgcccacgcgtgagatgatattttcttgcagggcgcgcagcaccttggcttgggctgagaggctcatatcgccaatttcgtcgaggaagatggtgccgccgtcggcttgttcgaacttgcctttgcgttgtttgatggccgaggtgaatgcgcctttttcgtggccaaagagttcgctttcgataagttcggaggggatggcggcgcagttgacttcgatgaaaggcatggcggcgcgggggcttttttcgtgcagggcacgggcaatgagctccttgccggtaccgttgctgccggtgatgagcacgcgggcatcggtgggtgccactttatcaatcatggctttcaccttgttgatggcgtcggactgtcccaccatttcgtaggtcttgctcacctgttttttgagcacgcgggtttcggtgacgagttcttttttctcgacggcgttgcggatgcacaccagcaggcgattgaggtcgaggggtttctcgatgaagtcgtaggcgccttttttgatggcttccacggcggtgtcgatgttgccgtgacccgagatcatgatcacgggcacgtcggggttgatggccaggatgcggccaagcacctccatgccatccatgtcgggcattttgatgtcgcaaagcaccacttcgtgtttttcggcttcaaacagttgcagaccttgcgggccgttttcggccagcgaaacttcgtggctctcgtattcgagcacatccttgagggtgttgcggatgcctttttggtcgtcgatgactaggattttggacatggcttttttttattatcaggcattaagtatcaatttcgtttcgttaagagaagaagacatcagacgctgagacagatgatgagattaggaaagatatttagatcagtcttcttcgtcttcgcagtctaatcagtctgtctatggttcaatatcgttaagttatgccctgaaagggcgataagcagtagcgtagggcatcgccctacgatgaatgcaaactcattcttagagccctgaaagggcgaaagcttaacccctttcatggcttgagcgcgatttctacatttaacagggcttagccctgctctaatgctgtcgcccccttggggcttaactaaacgttattggtctatggtcaataattcttcttgtctattattcgattgtactaattaaacgaaattttatcaggtatcaagtatcaagagttgagacgatgtttgattgtcttgatacttgctatttgtgtcttgctactatttattaaaaacagaacttttatggatgatgttgagcagtgcgccttctttgagggcgtaggcgcactgccacatttgggtgatgtcgcatcgtttgacgatgaagtggatgaacatggatgccagcacgatgagttcgacgcgatgtggatccatgcgtttcatggcggcgcgctcctcgatggttgaagccaggaagcggcggtgtatctcgtgaaaatgcgtcatgctgatgtgataggtgagcagcttgctgacgtcgagcagggggtggtatttggccgaaatcatggcggccagggtgtcgaagctgcccgatgagccaatgagggtgtgcacgggatgttgctgcagggcgtcaaagagtagttgcagctcctgttcgaaataggcttcgatggtgtcgatttccggttgggtgatggggctgttgggcgagaacttgtcgaagagctttgagacgcccaggttgaagctgtgtttccagatgacgccatcgcgattggcaatgatgaattcgttgctgccgcccccaatgtcgagcaccatcactttttcgtcggcaatgggcaccacttgtttgatgccgtcgaagatgagctgcgcctcggtttgtccgtcgatgacgcggatggtgagccccagctcctgtttgacgaggttgacgaagtcgttgccgttatcggcgctgcggatggcagcggtggcaaagcaatgaatgttggcgtggttcacctcaaagcgggcaatggtggccaggtgggtgcgcagggcatctaaaccgcgctgcacggcctcgggggtgatggtgcggtggttgatgccgcccttgcccagcttggcgtggcacttgctttcgtggcggatgacgtaggaaccctcgggggtggtttcggctaccagcaggttgaaggtgttggtgcccaggtcgatgatggcgatgttcatcagggtatgagtatcaagatgtgagtagtaagatgttaagtataaagatgcaagtatcaagacacaaggagcaagatgcaagatatagggtgttgatgtgcaaaaatagtgaaagttttggatggaggtgatggggggtgtaactggggtattggttgcggttttggatgatgttggtagatgaaatggataattttgtcatctggttgtgttttttgtttaaaagttgtgcggttttgccatatttaatagctgttataagagatgtgtcgattgaatgttttaccatccatatgaaataagatgcagccatttgagagtttaaatgccgggggggagtatcacgtctacagccatggggtaggagggtgcgatttgtttgtggagccggaggactatgattatttcttgaagctatacggaaaatatgtttcgccggtggctgatactcatgcgtgggtgtggctgaaaaatcactttcatgtgttggtgagggtggatgaaaatggtcaatctgatggttttttagacctgtcaggtctaaaaaacaaaccaccgcaccagcacttttcaaatttgtttaacgcctattcaaaggctattaataaactttacaacacccatggtgccctgtttgagcgcccctttcaacgtaagcgcattgataacccggattatctatgtaatgtggtggcaaaaattcaccacaatcctgtgcattatggtttttgcaaacatccgttggagtatccatggagcagctatttgacatgtctgtcggataaaccaacccaattgcgccgcgatgaggtgatgagctggtttgggaataaggcggcatttgaagcggggcatgagagccatgatttgaaacagaattggcatctgtttgagtttgaggaatgacgtttcgtttgatgggttcaagagaacggaagtgaaggttgaaaaataaaataacaaaatatgagtgatcagcaaaagttgcgtaagatgcttgagatgttgcttctgctttcgggcaacatccgatataccaaggctcaattggccgataaatacgacatttcggagcggacggtgtatcgttatttagagacgtttcaggaggcaggtttggtaattcgacaggaagcgggacgggtgagcattgatcgttgtcagtcggagtttaaggaaattagtgagttgttgcatttctccgaagaggaggcttacattcttgggaaggcgattcatgcgattgatgacacgacagtgattaagagtaacctggtgaagaagctttattcgttgtacgactttaagcgggttgcgcacacggttgtgaaacggtcgcatgccgagaatgtgcatcaggtgctcgaagccattgagcggcgtcgacaggtacgtttgctcgggtatcggtcggcgagtagcaatggcatcactgatcgtttggtagagccgtttgatttcaccactaattatatctcggtgtggtgttacgagccggtgaccggtcaaaacaagctcttcaagacgtcgcgcattgggcgggtggaggtgactgatgaaccgtggcatcaccaagcgtttcatgatgcagggtttatggatgtgtttcgcatcagtagcggtgagcagataccggtgcggctcgagctgtcgttgcgagccaagagcttgttggaggaggagtatccactggcagagcagtttattcaacctgttggtaacggtcgctacctttttgaggcatcggtgtgttcgttcgatggggtggggcgttttgtcttagggctatgcacagaggtgcgggtgctggagccgacggctctttcgttatatctggctgaaaaaattagacaaagtttttttggtgttgacactcgttgacaaaatgcgatggtaattttcggttcataaattatccacagatgaaacgagccatgagcaagctaactcacacatgaggatgattgttggcgagttccatgtggccattgaaaaacaaattattgacacatgaaaagacgacactttacccactttaacatttcgggtttctcgtattacgaaggtcccattgtgtttaacgatttaaaaattggtaccgaactgcgactggtgtatgagcccgacaataagtacgatcccaaggcagtggccatctattttggtgatgagaaactgggctttgtaccccgtagcgacaacaacgaaatcagtaagttactcgagatggggcatgacgtatttgaaacccgtgttcagcgaattgatgccacacaacatcccgagaatcaggtgggggtgattgtgtatgtgaaaaaaaatgacattcaaagcgaagtgtgaagaatggtatgttaaagatatccccgatagggtttttaccttgtcggggataattattttgagattgtatgttttaaaacatctgttatatggtcattagatcgggaattattaccagaattaatattgaacaataaagtatttgactatttttaaacccctgtggacgcaatgaatttgggcaataaaaaaaggcgagttgccccgccttaaatgttttcacaacggaataatccttattgtgagttgcttcaaattgtatgattcaaacatataaatattaaccgagaaaatcaaatttgcaatgaagaaaattttgggtcttgatttaggaacgaattcaataggttgggcattggttgaccatgaggaaacaaaaattgatggaataggaagccgcatcataccaatggatgaagcgacgattggcgattttaacagtgggaatgccaagtcacaaacatcggagcgcacccgcttaagaagtatgcggcgcttgaatgagcgttttgtattacggcgcgaaaggttattgagagtgcttaaattgcttaattttctgccaacgcattatgccgaggccattgatttctcaatacggaaaggcaagtttaaagaaaatcaggagcccaaaatccaatacaaacgaacggaaaatggagagcatgagtttttgtttatgaactcgtttaatgaaatgttgaaggagttccagctgtatcaaccccagctgttgaatgatggaaacaaaataccttatgattggacaatttattacctgcgaaaaaaggctttgcgcgaaaagataaaaaaggaagaactggcatggttgttattgcagttcaatcaaaagaggggctattatcaggcacgaggtgaagaggaagaagaaaaagaaggaaaacttgttgaatatcatgctttaaaagtagttgatgtggttgccgatgagcaacgtaaagggaaggatgaagtgtggtattcggtaaaactcgaaaatggctggatttatcgtcgttctagtaaagtgcctctttttgaatggactggaaaagtcaaggagtttattgttacaacagaagtgaacgaagatggttcggtaaaaaaggacaaagaaggtaatgagcgtcggtcattccgtgcccctaaagaagatgattggggattgatgaagaaaaaaaccgaagcagacattgagcgggtaggaaagactgttggcgaatatatttatgaaacattgttactcagcccagaccaaaaaatcaaaggtaaactggtacgtaccatcgagcgcaagttttataaagaggaacttagccaaattctcaaaacgcaaattcagttgcacgatgaattacaggatagagagttgtacgtccaatgcttgaatgagctttaccagtttaatgaggctcacaaaaacagtattgccgacaaggatttccttcatttgttggtgaacgatgtgctcttttaccagcggccgttgaaaagtaaaaagtcgctcattgccaattgcccttatgaagttcgaacctataagaaagaaggacagaagctcacttcgccaattaagtgcattgccaaatccaatccattgtttcaggaattccgtttgtggcagtttatgcaaaatctcaggatttattcgcgcgatgaggtggtaaacggcaaacaggagaccgatgttgatgtgactgaacgtttttttcccgatgaggcggcatgggtagaactgtttgattggttaagtgagcgcaaggaggttgaccaaaaagcatttttgaagtatcccaaatttggcttgaaaaaagatgtgtccaagtatcggtggaattatgtcgaagacaaactttatccgtgtaacgagacacgcggagccatcctgtccaaactaaaatcatgcagttccgttcctaatggttttttgacacctgacgtggagatggaactgtggcacttgctctattcggttgacgataagcaggaattggtcaaggctttgacatcatttgctatcagataccagttgggcgatgattttgtggaacagttcaaaaagttccctccattcaaaaaagattatggcgcctactccgaaaaagccattaaaaaactgttgccgcttatgcgcatgggcaaatattggtgtgaagatgccgttgatgccaatgctaaatatcgacttcatgccgtaaacgagcgattgtccacgttaacaacaaacactacaattgaagacattgccgatgacgatatccccaaacaggtcatcaaaagttttcaaaaatgtaaatatccattacggggcttcaacacctatcaggcatgttacgcggtgtacggacggcattccgaatcggtggatgcccaaaagtggcaaacccctgccgatatcgataagtttttggccaactttaaacagcattccttgcgaaacccaattgtagaacaggtagtgggagaaacgctccgggtggttcgcgacatttggcaatgctatggtgatggtaaaccaaatttctttgatgaaatacacattgagctgggaagggagatgaaaaatcctgctgacaagcggaaacgcatgacttcccaaattacagaaaacgaaaacaccaacctgcgcatcaaagccttattggcagaattgttgaacgataaagcaatagaggaggtaagaccctattcacccagtcaacaggagatactaaagatttacgaagagggggcgctgatgtctgtatctgagattcctgatgatattttgaaaatctccaagttaaaccagcctaccaagagtgagttggtacgctataaattgtggctcgaccaaaaataccgttcaccatacactggagaggtcattccattgtctaaactttttacgtccgattatcaaatcgagcacgtcattccacagtcgcgctacttcgatgattcgttgagcaacaaagtcatttgcgaggccgaggtgaatgccgacaaggacaacaatacagcttttgagtacatcaagaacaaccagggtaaaatcatcgaattgaattatggcaaaaaagtcaccattatgtcgatggagggatatggccagtttgtgaagcaatattttggccaaaacccggcaaaaatgaaaaagttgctcatggaggatatcccagaggatttcattaaccgacagttgaacgacagccgttacatcagcaaatacatcaaaggacttttatcaaacattgtgcgtgaggagggcgagatggaagcaaccaccaagcgcgtggtgtcgagcaatgggagcatcaccactgttttaaaacaggattgggggcttaacgatgtgtggaacgacatagtggcgcctcgttttatccgattgaacgaactgaccaactcaaccaactttggccaatgggttaacaagggagggaaacaggtttttcaaacccaaatgcctcttgaacttcaaaaaggtttcaacaagaagcgcattgaccatcggcatcatgccatggatgccttggtgattgcctgtgccacccgcgaccatgtgaattatcttaataacgaatatgccaaggcatcggccaaagaaacccgttttgatttgcgccgcaaacttcgcaggattgaacccaaagagatcgtgaaaaagataaacggagagaccgttcgcaagaagattgacgtggccaaggagttttacaagccatggcccacctttacccaagatgcccgtgaagcactggaaacaactattgtgagctttaagcaaaacctgagggtgatcaaccgagccgtaaacaaataccagcgttggcaacccgatggtgaagggaaaatgaaaaaggtaacagtttcacaaacaggtaccaattgggccattcggaaggcgatgcacaaagatactgtttctggagttgttactttgaaaaagaaaaaggcggtgtcgttatcggttgccattgacatggccttgattgatgtgaatgtcattgtggataaaacgttgaagcaagttttaagagggctgattgccaagcaccctgataaaaaggccattgccaagtatttcaaggacaacgattcgcaggttggtggtgtggatgtgtcgaaagttgaggtctattatgcagatggttcgttggctgcatcacgagtggcggttgatgatagctttgattcaagaaccattcttgactgcattacagataccgccattcaaaaaatcatgttgaagcatctggatcggtacaatactgttgaaaacgggaaaacaaaagaacatcccgaattggctttttcacccgaaggaatagatcaaatgaataaggacattgtaaaattgaatggtgggcgtttccataaacctatttataaagtaaggaaatacgaacctgtaggcaacaaattcgtggttggccataaagggaacaaatcggccaaatttgttgaagccgccaaaggtaccaatctcttttttgctatttacaaaaacgaagaaacgggtaagcgcagttacgaaaccataccgttttacaaagtggtagaaattgaaaaacaaaatgctaagcttattaagagtggcactgccaaacgtgccgaattggcgccagtaccattggtcaacgaggcaggcgataggctgttgttttatttgtcacccaatgatttggtgtatatcccagaggatgaagagtgtgattcttctgtcgtgataggaaatgaaggattgacaaaagaacaatgtctgcgtgtttataaatttgtaagttgtactgggaatgaaggacattttgttccgaatttttattcttctcctgttctgaagaatgaggttggtgcaaataataaaagtcaaaacactattgatggaagatatcagattaaatctaattgtcttaagttaagagtaagtcgtttggggcaagtaattattgattgatgttttttggcatactatttggcattgtcaatgtagttatacatagagtggtaaggacgagaggttctaccactctttaatctactttttaatcctgaatcttatgatcaaacgaacgctttacttcggcaatcctgcgtatttgaaaaaacgcgacaatcaattggttgtggaattacccaatgacaccactaagcaatcggcatcggtacccatcgaggacattggcatggtggtgctcgaccatcctcagattacgattacgcatgccttattgatggcattgaacgagaacaatgtggccacattgagttgtaacaatagccacacgcccgaggctttgatgctgcctttggcttcgcatcacgcatacactgaaaaactatacaatcaattggagtcgtctttgcctttaaagaaaaacctttggcagcaaaccgtggtgtccaaaatccaaaaccaagcggcgttgttggctcaaaatggggtgacgaccgacaagatggatttttttgtgcgacaggtgaaaagtggtgaccccgacaatgtggaaggtcgtgctgctgcttattattggagtaacctacttgacccacccggctttaagcgtcaccgttttggagaccaacccaatgccatgttcaattatggttatgcaattttgcgaggtgttgtggcgcgttcgttggtaggcagtgggttgttgccagctttggggattcaccatcgcaataaatacaatccgtattgtttggccgacgatatcatggagccttatcgtccctatgttgatcagttggtgttggcttatgtagatgcgaatgaaacaggtgaggaattgacgcttgaaatgaaacggcacttgttgcaagttcctgttattgatattgtgatagaaggaaaaagcagccctttgatggtgggagtgcaacggaccactgcctcagtggccgattgctttgcagggattacacgaaaaatcctttatcccgaaatgcaatagtatcatgggactcaatcaataccgtattatgtgggtgtttgtgtttttcgatttgccaacagaaaccaaaaaggataaaaaagaatatactcgctttcgcaaattgttgcaaaaagatgggtttgccatgttgcaatactccatttacatccggcactgcaacagtcgcgaaaatgcagatgtgcacatcaagcgtgtaaaatcgtttttggcgcccaagggcgaagtgattgtgttaacactgaccgataagcaatttgggatgatggagttttttcgaagtcaccaaacggtcaatcgaccaggtgtaccccagcagttggaactgttctaacagaatgaaaaaagccctgttggttttgtccatcagggcttttttgagcacagttttttaaattctaaatattgagccatttgtttgttgtttagtgt

SEQ ID NO: 1362 - DNA, 16034 bp, synthetic construct
  misc_feature 1..16034: note = Synthetic
  source 1..16034: mol_type = other DNA
agttggttcagagcatctggtttacacccagagggtcgggggttcgaatccctcatcgcccactaaaatctaactttattttttataaagtacgctaaatcgcataaaacctgcactttacgaagttgcaggtttttttattttatcactgtacggtcaaaattttgaaaacgtccataatttgtggcgctttttgtggcaccaaagaaatttttaaaaatgtgtcacaaaatacaatgtaaaacaagtatatttagcggtggtagtatgacaaatagaatcgaagaaaggttgattagtttcatcctctggtaatctaaattagttcttacttcttctacttgaatatgattttcttcaactgggatatattctgtcttaactgataatccagacagttcattttctgccatgttgagtgcttttgcaagtgctttaaggttatgtacttttggtactatccagattctattctttggatagtccgaccgaaaatccgggaatttgcagagagttcttcctgtatcaaattttgtagctcccttatctgtttgaatttagacatactgatttctaaaattcaatggaggcagtaaataatctaaaagtttacaaaccctaatcattcagctataggctaaaatactaactatacaaagtctaaaaaatcttactattacaatcaagcacaattgtgcatttccaattctgccatcactgatggcagaattaagtcaaactaacaactcaatgtcacttctataccaaggatggtaacaaggcgtgtaacggatatactccataacctatagctccttaaagtatttatggtatgttggtaaaatcttgatatccgaaagtgccatgattttactacgcctaaccttaatttttggttgtttctgcttgtaaccaaggtacaagatgggcactaagcaacgcaaaaatacgtttagggagctgtcctgttcaaagagttagtgatataatattaatcaaggcccgatagaaacacaatacatgcaattttaatttattagataaacttgtcgaactttatgagcgtttgtttcaggcagaaaaagataaagtagcttacttggagaatttttgtttatcattacctaaaattgcatttctctcttctaatactaaaatccataaaaaaagcctcctgattatggacaagaggcaacccaaatgtttacacaacggaataatccttattgtgaattgctttcaaattgtagtgcaatataattaaatatcttttactcacaatagcaaagtagtaaaatacctattaatgggtagaaattatttccataaaaacattataattgaatatttattataatgttatcatttacaaataaatcaaccatatatgagtattgttttaggattagatttgggcacaaacagtataggctgggccttagtagaacaggattttaaacagaaacaaggaaaaatactgggaatgggcagccgtataattcccatgagccaggatattatagataattttggaagtggaaaacccactgaaacccaaactgcttcccgcacaggtttcaggggtacacggcacttgcgcgagcgtagcttactgcgccgcgaacgcctgcacagggttttaaacatcttaggttttttaccccagcactttgccgcgcaaatagattttgaaaagaaattagggcagttctatgaaaatactgaacctaagctggcttacaataataaagactttatctttaagaaagcatttgaagaaatgcttgaggattttaagatacaccagcccgaattagttagtggtggtaaaaaggtaccttatgactggactattttttatttgcgtaaaaaggcgctgacgcaaaagctaagtggtgaagaacttgcctggatacttttaaactttaaccaaaaacgcggctactatcagttgcgtggtgaagagtacgaggaaaataagaataaggaagtagctttttactccttgaaaattgttgacgttactgctgatgaagagcctaataaaaaaggtgaaacatggtattcgttaattttagaaaatggatggatataccgccgttccagtaaaatatctttagtagactggaaagataagatccgtgattttatagttactaccgatttaaatgacgatggtagtatcaaaaccgataaagacggtgtagaaaagcgaagttttagagctcccggcgcagatgactggggacttgtaaaagcaaaaacacagcatgaaatagagtcctcaaataaaacagtaggtacttatatttatgatgccctgcttaaaaaccctaaccagaaaatcaaaggcaagttagtacgtaccatagagcgtaaattttacaaggatgagcttatagctattcttaaaaatcaaattgcattacagcctgagctttttacagacgaactttataacgactgtgtacgcgaactctaccgtaataatgaggcacaccggcttaatcttagtaaaagagattttgtacatctttttgtagatgacatactgttttaccaacgcccgctacgcagccaaaaatcgtctgtaagcaattgtaccttagagtaccgtgtgtttaagacaaaagataaagaaggaaacacggttgatcaaaaagaatacctgaaggctattcctaaatcgcacccgctttatcaggaatttagggtgtggcaatggctttttaacttaaaaattattaacaaagatgatgataccgatgttacgtctttatttttaaaaaccagtgaggatttagaaaagctatttgattttttaatgtcgcaaaaagaggttaaccacaaaggcgtactcaattatttgctaacgccggtacttaaagagaagttcccatctgctaaacctgccgcatttaataaagaacttgcaaaagaaatagctaagttccgctggaactatgtatttgacgataccaaggaaaaagaagatgataaatctaaaacatacccctgcaacgaaaccggttttgaaataagtaagagacttaaaaaggtagaaaaccttccagacggcttcctatcccctgagatagaatataggctttggcatattatatattctgttaatgataaaaagcaatatgaagaggcattaaaatcatttgccaggaaacacagtatagatgagcactcctttgcagaagagtttaaaaaatttcctccttttaaaagtgaatatggttcattttcagaaaaagccgtaaaaaaactgttgccccttatgcgaatgggtaagtactgggattgggatgctatagatgctaaaaccaaaatcaggattgacaagataataaccggtgaatatgacgaggaaataaaaaaccgtgtgcgcgaaaaagcaattcaccttactacaaaaactgattttaagggattacagctatggcttgctcaatatgttgtatacgaccgccattctgaagcggcattggcaggtaaatgggattctgtaacaggccttgaagaatttttaaaagattttgaacaacattcgttacgcaatcctatagtggaacaggttgttacagaagcattgcgtgtagttagggatatatgggtaaaatacggtaaaggcgaaaaaggttttttcaatgaaattcatgtagagctgggacgtgaaatgaaaaaaacggctgatgaacgtaaaaggcttactaataaaatttctgataatgaaaacaccaatttgcgcataaaagctttgctggctgaattattagttgatagtaatgtagataacgtacggccattttcacccatgcagcaggaagcacttaaaatatatgaagatggagttttaaattccagtataccaattcctgacgatatacttaaaataagtaaaacagcccagcctactaaatcagaattgcaacgctataaactgtggctggagcaaaaatattgttctccatatactgggcaaataataccacttaataagctgtttacgcacgagtatgaaatagagcatataataccgcaaagccgctattttgacgatagttttagtaataaagtaatctgtgaatcagcagtcaataagctcaaggacaagcaacttgggcttgagtttataaaaaaacactatggcacggaggttataaaggggctttatataatgactgaagacacctataaatcttttgtaaaggaaaactacgcaaaaaacccagctaagcgcactaaacttttgcttgaggaaattcctgacaagatgatagagcgccagatgaatgacacgcgctatattagtaaatttatttcgaaaacgctgtcaaatattgtgagggaagacactaacgatgacggggtaaattctaaaaatgtattgcccggaaacggacagataacaagcatactccgccaggactggggccttaacgatgtgtggaacgaattgattataccgcgttttgaaagaatgcagcaattacggacagaaaaagatatttcagaaggtgtaagttttatagccttaaataagaatggaaaacctataccggaattacagcctattacattacaaaaagttttccagaaaaaacgtatagaccaccgtcaccatgctttagatgcactggtaattgcttgtgctacccgagaccatattaatttgttaaataacaggtttgcaaaatctaacgagcgttttgacctaaaccgcaaactcagaaaatttgtaaaggtatcttacattgaatcaaaaacgggtgaaataatagaaaaagaagtgccaaaagactttttaaaaccctggggaacatttactgaagatgcaaaaaatattcttggaggtattgtagtgagttttaaacaaaaccttagggtaattaataaagctgttaacaagtaccaaagctataaagatgaaaatggaaatgtaaggattggcaaggacggtaaacctaaaaaggattttataaaacaagttaaaggtgatagctgggcgatacgcaaatcaatgcatactccaatgccatatagtaaaaagatgtatgaatttgaaattttaaagattagtaagaatgtaggaaaacgagaattcattacagatgagttcataaggtcagaggtcgaaagagtatttatagccaataattctaaagttactgacactcaaaaatatttagataaatatccaataattggcaaaactaatatgcctattatttcaactgcatttaaattaaagactgaaaaatttagacggaggcaatctatattcgaactttcaaatcgaggtcaaggaggtataaaatcggctgaagatgcaaagaaatttattgataagattccagactttaaaataagagaagagctattggaacatttaagaatttcaaatgatgatatcaacaaagctttcagtattgatggaattggtaattttaattccaaaagaaaagtacccatatacagagtacccatcgcagaaagtggcactagccgattttctgttggtgtaaaaattggcacaaggcataaatgggttgaagccgataaagggaccaacctgttttttgccatataccaagatgaaaacggtaagcgaagctatgaaacggttccgttgaatatagttattgaacgccaaaagcaagggttaaactcagtgcctgaaacaaatgagaaaggcaatgcattgctgtattgcatttcgccaaatgatttggtatatgtacccacagaagaggaaagggatcctatgaaggctatagattttaaaaacttaaccaaggagcaaaagaatagaatctataagcttgaaaaagcgtctggaactgaaagctattttgtaaggcatgatattgcgtatttgattaagcaatacgacgcgaaaacaaaattaggagagttagaaagtcagaataagctgcaaactacaatgactccagataggatgaagatatctgaattttgtataaaattaaatgtcgaccgcttaggcaatatcactaaagcatgatgatagtctgaaatttttaaacctaaagtaaatgataaagcgaaccctctttttcggcaaccccgcttatctgagtacaaagaatgaacagctggtggtgagttttcctgatgaagacaaatcaccagtcaccattccaatagaagatttagggtatatagtactggagcacccgcaaattacaattacagcaggagttttaactaagctcatagaaaacaagactgccgtgataacctgcgataaacaacacctgccctgtggttttttgcagccgcttaccggccatagcgaacaaaccgaacgctacaggcaccagctaaatgccagtgtcccactcaagaaaaacctttggcagcaaactattagtgctaaaataagcaaccaggcttatcatttaaatgccagagaagtagatgccaaaaaattaaggcgttgggcagatgaagtcaaaagcggcgattcagaaaatcacgaagctatagctgcagcattttatttccagaacctttttacacacgtaccggactttagccgaaatcaaaagggtgtggcgccaaacggactattaaattatgggtatgcaatactaagagccataaccgcaagggcattaataagtacggggttattgccctctgtaggtatttttcacagtaataaatataattctttttgcctggcagacgatattatggagccttacaggatatatgttgatgcattagtatataacttaaccaaacgggttgataattttgaggaactgtctacacaaatcaaggcgcagttgctaactatacctgcactggatgttgttatagaaggaaaacgtagcccgcttatggttgctatgagccgtaccacaaacagtctatatgaatgctatacaggcgtaagcagaaaaatactgtatccggtttttgaactaacagtataaaaatggtgtatggggcctgaccattactcaagattaaaccaatatcgtactatgtgggtattagtgttttttgatcttccgacagaaacaaaaactgatcgtaaggccgcaacaaagtttagaaaagagttattggacgatggctttacgatgtttcagttttcaatatacctgaggttttgcgcaagccgagaaaatgcagaagtgcatacaaaacgtgtaaaaagaattttaccaaaacatggaaaagtaggtgtaatgcaaataacggataagcaatttggcatgatggaaattttttatggccagaaagaaatgcccaaggacaccccaggacaacaattagagttgttttaggattaaaaattcctgatttacatttgagaatttgctaaaagacagatgttttttcaaattctaaaaacaacagtaaataacaggataccagatttttagcgctggtatcctgtgaatcatctactaaagatacaattttgaaagcaattcacaactatcccagaatatttgccaaaccattctatcctgtgaatcatctactaaagatacaattttgaaagcaattcacaacaggcttaaaacaaagcattgatgatagtggcctgtgaatcatctactaaagatacaattttgaaagcaattcacaactacctcaaaacatatgatactatcaggaaccctgtgaatcatctactaaagatacaattttgaaagcaattcacaacacgctgcagggtattctgaaaccatcttatcctgtgaatcatctactaaagatacaattttgaaagcaattcacaacgtgctttatccattcttagtaatgattgtacctgtgaatcatctactaaagatacaattttgaaagcaattcacaacaacctattcctttttcttgcaaaggatatcctgtgaatcatctactaaagatacaattttgaaagcaattcacaacgtattgtcgctatccctgcgtacacgcacgcctgtgaatcatctactaaagatacaattttgaaagcaattcacaaccatacctaatatacccgttgtaatggttctcctgtgaatcatctactaaagatacaattttgaaagcaattcacaacgaatgatatcaaaccccattctctttacacctgtgaatcatctactaaagatacaattttgaaagcaattcacaactaaatcattgaatagcgacatcaggaagcgcctgtgaatcatctactaaagatacaattttgaaagcaattcacaaccggtcttcctggtcctattacttcagcagcctgtgaatcatctactaaagatacaattttgaaagcaattcacaacaaaaacttcctgcttaacatattctatggtcctgtgaatcatctactaaagatacaattttgaaagcaattcacaacatcaaaattgctgattgataaatcctgaaacctgtgaatcatctactaaagatacaattttgaaagcaattcacaactgcagtttccttttctgcttctttgcgttgcctgtgaatcatctactaaagatacaattttgaaagcaattcacaacccttaagctcatttagcaccctgtccgggtcctgtgaatcatctactaaagatacaattttgaaagcaattcacaactggaacctgaaactttaacaccggctgtttcctgtgaatcatctactaaagatacaattttgaaagcaattcacaacgagcaaagacataaattaaggcatgaatggcctgtgaatcatctactaaagatacaattttgaaagcaattcacaactgtaagcttcgcaaatttccataaaggcgcctgtgaatcatctactaaagatacaattttgaaagcaattcacaaccgcctgccgatgttgaaaaatagcgatgtcctgtgaatcatctactaaagatacaattttgaaagcaattcacaacagatgatggtgatatcgaccagtataagcgcctgtgaatcatctactaaagatacaattttgaaagcaattcacaacgctaaaatgtttatcaaatttgcaattcaacctgtgaatcatctactaaagatacaattttgaaagcaattcacaacgatgctatgggtgatgttcagaaaactacacctgtgaatcatctactaaagatacaattttgaaagcaattcacaaccatctttcggtaatttccccaaaagtggaacctgtgaatcatctactaaagatacaattttgaaagcaattcacaacattaccactcccattattgtcattaccctacctgtgaatcatctactaaagatacaattttgaaagcaattcacaacaaaaaagggcactgccttacaaattggtgacctgtgaatcatctactaaagatacaattttgaaagcaattcacaactgtttttgctctttattaattgttaaatacctgtgaatcatctactaaagatacaattttgaaagcaattcacaacttagtatcgtgccatagtttcatttgttgccctgtgaatcatctactaaagatacaattttgaaagcaattcacaactgcgaagtgtaaatacccattggcacactcctgtgaatcatctactaaagatacaattttgaaagcaattcacaacctattttgcttgggtcaatatcttccatttcctgtgaatcatctactaaagatacaattttgaaagcaattcacaacgaaaaacatatagttaatggatttggcaacctgtgaatcatctactaaagatacaattttgaaagcaattcacaactgatgttgatgatgttgatacaaatatagacctgtgaatcatctactaaagatacaattttgaaagcaattcacaacctaaatcagaatagatgtagttttcagcagcctgtgaatcatctactaaagatacaattttgaaagcaattcacaacttagattgcctaatttattatttgctttttcctgtgaatcatctactaaagatacaattttgaaagcaattcacaactagtgatgtaaaagtaaaggcgttaatttccctgtgaatcatctactaaagatacaattttgaaagcaattcacaacacacttcccggtggagtgatataataaagcctgtgaatcatctactaaagatacaattttgaaagcaattcacaacttttattgggtcgcctttgcaggcaggattcctgtgaatcatctactaaagatacaattttgaaagcaattcacaacggtaagccacaacggcaaaaaacagcgcaccctgtgaatcatctactaaagatacaattttgaaagcaattcacaaccccagcctaaacgctttaccgcatctctttcctgtgaatcatctactaaagatacaattttgaaagcaataatttggtattcagcaaaaattgtgtgtactgtacttctgtattcaaaccctttatattatcactaaaatttttatcgatattttttaaaaaaatataaactgtatcttgtttagcaagatgttctaaatcctgggaaaatgaaacagttgcaataaatagaaataggaatttcagcatttaattatattttatcgtatacagcagcaaccacattaactttttttagcttaatatactttttctttaagtctctctcgtcgaatacaaaaaatattttccgtaatgagtttacatttaatgtttgaggaaataatttagctacaccaattttttcaacgtattcaagtttaataatgtttgaactattttccttaagaaattttttcctttttagatttagtacaggatatgattttgcagcatgaataataatctgcttaccgtctggctcaataattctatattcagaaaagttagcatgtactgtacttatgtattcaaaccctttatattttgtactaaaacttgtatgaatattctttaaagcaatatgtatagtatcttgtttagcaagatgttctaaatcttgtgaaaatgaaacagttgtaataaatagaattagaagtctcagcatttatttatattttactataaaacactgcaactaaatcgacttgcttcaaattgatatatttttttttcaggtgctcttcatcaaaaatgaaaaatattttccggcttggatttattaaacccaatgtttcagggaatagtttgcttactccgattttatccacatattccaagtttataatatttaagccatttttttttagaaattttttgcttttcactcttaataatggataaggtttagctgcatgaatcacgatgagtttaccatttggctcaataatttggtattcagcaaaattaggatgtactgtacttatatattcaaaccctttatattgtttactaaaacttgtatgaatatcttttaaagcaaggtatatagtatcttgtttagcaagatgttctaaatcctgcgaaaatgaaacagttgtaataaatagaattagaagtctcaacatttacttatattttactatacacagcagcaaccacatcaactttctttagcttcatgtgtgtttttttcaaatccctctcgtcaaatacataaaatatttttcggcttgggttaattaatttaaaggtttcgataaatacttttacaacacctgttttttctatatattttaagttaataatattatttttattttttttaaaaaactcttttcttttaactgagaagagctggtatgccttaggggcatgaattataatttgctttccgtttggttcaataatttggtattcagcaaaaattgtgtgtactgtacttctgtatttaaagccttcatactgtttgctatagttcttatcaatatcctttaaagcaatatatattgtatcctgtttagcaaggttttctaaatcttgtgaaaatgaaacagttgtaatgaacaaaattacaaacctcagtcctaaatcatattttgctaaataatactccaattacttctactttttttagccttacatatttctttttcaaatcttcttcatccaatacaaaaaatatttttcggcttgggtttattaagcctaatgtttgagcaaataattttgcaataccaatcttttctatatattctaagtcaataatattaaaaatgtttttatgtgtaaatatctttttctttacactatatactggataagccttaggggcatggattataattggtattccatcctctcctgtaagctggaattcagagaattttggatataccgtacttctgtatttaaagccttcatactgtttgctatagttcttatcaatatcttttaaaacaatataaatagtatcttgtttagcaagatgttctaaatcttgtgaataaagattaaggtttgcaattaaaataaatattataaatataattttcatattattaattttttagagccattgcgtctaatcgaatataattaagaaagtaatatctttcttttgaattttctggataaagtgaattgaaggctgtacagtgttgcaaacctaccatgctaatataattaaagtagtcatcccaattaaaggcttctataatatctgaaggtccataagtgttatcgtcttttagcataggctcatttaagaaataattttcgtgtaattcaggatgttccacccggtttatctgtagtggtgttaaaagcttgtcttttaacggagaaattatatctgctaaagtcggtatcatataatccacaaaaaagttatgctggttattttggccaaccaaccctccgtaatgagtgtttgcagcctcaacaaatgtcattccattaataacatctaaaccaaattgtgggccggcatcaggataccgcatttttacgtttaaaaaagcatgtatcagttcatgaacaattgtaacggctatacttacatttgaagcatcatttaaatggctgcgcgttatggttatttcattatacatactttcaggcgttttagttagctgtgatgttgcatttacatatggatcatttgcttggacggcacctattttaaattttatattatgcacatcattgttgccaaataaatttacaaataaatttttatatttatccgattgtaaaagcttatcatatatatccctaaattttatttcctctacggtatttccctgtaccgctgtcaagtcaatattgccaggagagctgtttgagcgtatcatatcaaattttagcccagttttcatcatttggtcaatagcctgcagagcaaaatttttatcagcatcggtatgattttgttttatataattaaaaacatcatcttttatgggagtattggtattaaggaagtctttttgatcctgttcaagtcccatgaaaaaattaagctgaggggaaagttccaactgtggccctgtagtaatagggttaggattagggtttgttccaccgccaccgcctcctccgggagatattccaccacctccaccacctccaatagatccaccaccaccggagccgtccccgggggcttcggtatctatataactaacaacagaacagtttacagccgtccatttgtaacgtacttctacaggattataaccgcctaccaagtcaccgttgtctgggtagtagtaatacgcttctctaacatacgaacatgaccaatgtatatatatggtttttaatgttagttgttcagggtcaaagccaggaagattttcaaattcggttttttgctcaatgtcattaattatttcaccattctgtactttttcaatatcttcttgagtaaagttatattttacaagagtagcatcataactgccttcaacattactcctcagcacaagattttttacaacattattattgttattatcttctattatcctaaaagtgtaattaactattccatttgcattaatcatcagtaccctgtcagtatcgatagtaaatttatattttgtattgtaaacagatttgttgtttaaaggttcacccgttaatttataatttttaattatattataaatctctaatttttgggtttttaaaaaatccagatttacataagtttctgtatttttagcttctcgggtagtttcacttatttcatttaaatcatcattctgacagctaacaaatagcagtaatacaatagagaaggtaaggattttggtaacggtttgtttcataatttataaatgagtgttgtaaaaatatttatgtttatttaaataagctctaaaaccttttcaagtgccatacccctggagccttttattaaaacagtttttcccgaaaatgatttaaattcacggctaaaatcctcataacttttatagaatttcagttgcggattattaagcttattgctataaaaatcctttccgataaaataagtttctattccggtgtcttccacgctttcaacaatttttttatgctcattggtgctgtcattgcccagctcaaacatatcgcctaaaatagcaatcttattgatgccttccagtttagaaaaattatctattgcagccatcatgctgcttgggttggcattataagcatcaagtattattctattgccattccgctccataagctgagaacggttatttgcaggaatatattcttcaatggcttcttttatttgtttatcacttactttaaagtaggagcctattgcaatagcagcacttatgttggcagcattatatatacctattaaattggaatttatggctacgccattgtattctatcactaccatagggttggcttcggttttacttattttcaggtcgcagttatagctgagcgatgaaaaagtgaaacgtggcaggttttccgttttatccttttgaattttatcatcaaggtttacaaaagcggttttagtattttcctgtaaatagttgtacaattcgctttttcctttaataacaccttccacaccgccaaagccttcaaggtgggctttgccaaaattggtaatatagccgaagttaggctcagcaatagagcataaaaattcaatttctttttgatggttggctcccatttccacaatacctatttcagtatcattattaaatgataaaagcgttagcggaacgcctatgtgattgttaaggttgcctgctgtggccttagtgttatattttttggagagtactgcattaatcaactctttggtagtagttttgccattactgccggttagcgcaataacaggcaggccaagttgtctcctatggtatcgcgccaattcctgtaatgatgcaagcgcatcattaaccaaaagcatttgatcaccggctttatagctttcatcatctataacggcaaattttgcgcctttcaaaagcgcttccgcagcaaatgcattggcattaaatttatctccttttaaagcaaagaataaggagccgggtataattttccttgtatctgttgataccgaaccgcattgttgaaaataggagtaaagaacctctgtcgtcatatcataaaaataaaaaagccctacgaatatagggcttttctttatttgttaagaaaattaatttcttgctttttttcttgaattcttaggtcctactttagacattgcacaacggaaacctatgtagtcagttgccatgtcctgaggataatacctcctttgtgcaggatccagccagtaagccctgtctctccatgagccacctttataaacccttacattatcattaactaaagtagtccttttagaagatttgtcatactcccttatcatgttacctaaactgtctttagtaacaaggtgtttaggagaatcatacattctttgctcgtcagaaagttcaccgctttcagagccattatcaaagaaccttgaagattgcctgtcgccatccctgtagttcctgttgtcgctgcgggtatagttctgccttaagtaagtatcttcttctgtaatttgagtctgtgctatttgtcccggtaggttcctgtactgtatcctgccgttgctcagcgtgtca

SEQ ID NO: 1363 - DNA, 16028 bp, synthetic construct
  source 1..16028: mol_type = other DNA
  misc_feature 1..16028: note = Synthetic
tccctggaagtcttctgtatttccattgaaccgcttctgaataggattttccacctaagaatcggttatgcactaaagggacagccaaaggcgtcataggcattctcggtccataagctactttgctgacaaacaaataatcattgaccaacatcgttccttccatagatcctgaaggtatggtgtaagcttcaattaaaaaagtacgaataattgtagctgcaacaacagcaaaaagagcggcatcaagccattcacgccatgcggctttctttttctttttactattttcgttgtcttggtctttctttttccagaattgtaaacgcataaatactttaaaattgtaatgctaagtaagaaaattctttacaaatataagccatactttattataattttgagcaaagcatataaacctttacactctatataaatacaacatgtaataagcacttattagtgtcctatcaagtctctttaaatcaggactttttctcttacttaaaactaaaccaaaaaaaatactcgccctggtttttatcagttacgactacttttttaaagatattattgatcaatttaatccatgattggattagtattgatttctacttcgtgtaaatgaatggtatcttgagttttacctttaaagacaccacgaatagtaatatcctttccggcatcaattgctgcagctaagctattgctattgtcaggacagtattctatgatgagattacttgtaggattagctttgctattactacaatctaactgaaagaatacacagttttgtttttttgatttattcaccatggttacctttcctgttaaatcaatcacattattattatattttgataacgcattttcttcgttttcagcaaagtcgctacatagttctgttccagtaacagaaaaaggggtttgttcttcgttggtagttgttgttgcttgaatgtcagtctcgttttctatgactactttctcttcagttggtgttgtattacaagcatagaaaataaagaaaaagggaagacatagtccagtaatgtatttttttaagatcatgatcatttattttataacattagaaataagtaactacataacgatatataaggtgaaaatgttcattttatagtatacatgaataaaacatgcattaaaaaccgacttcgtattgtgttttaattgacgaatacttttgaacaataatgaaagttggttgttaatactgatgagtaatactaaatatataattatgacgaacgaagaaaataataaagaaaacatggaaacgccacacgaaatgaaaacgttatctggagttttaaattcattgcaaaagaaaggaattgaaaccgaatttctttttgaagatccagatatattaaaaggctttggtaaaaactacaaaagtgaagatttgactttatgtaaaacttatcgatttgaaggaatctcagatcctgcagataatgtggccttgtatttatttaaagacaaagacggaaattcagggtttgtaatagatgtctatggaagagaatctaacttaagtgcaaacttttccgaatttttaaagaaggttcctcaggatgattctttataatcagtatttcttttaaaaattcattttagggtgttattttaataaaaaagaggttgatgaatgaacgtcaacctctttttgtaaattatatttccaatgaaattaattcaatccttctaattctactctcgcagcatcagactcttccattttatttaatgtagaataaatgttgcttaatgcgattaatgattgcttataaaaaacgatatcattttgatctagatttcttgagtttctttgatagatacctctcgaagcttctaagtaagggatagcttcttcaaaggtggcatctcttacctcttttaagttgtcatattttgtttgttctttaatgcttaaagcttgcatttctgtattcactttagctgctttattgaagtaaaaagcacctaattgataattaaacttaccatcttgagggtctaactgtaaagctttttgataagctttttcagagtttttaaggtgtgcatcttgatgttcaccttttgcactctctgctaatcctgcatatacaatacctaaattaaatactaattctggatctgtagggttttgcttgatggcatcttttaatttttctaccatcagttcttcattacctgattctaaatagtagtttaattctaatctcgctaagttttcgttatctggaaatatttttcttccatcttcaattgtggaaagcattgatttttcatctccttctttagcataagcttctgctaacacataatagatattaggatctgaattgataataggatctttcttagctgtgttaaagatactgatagcttctttgttcttatctgcataaaaaccagcataaccttgtaataaagacgattgtgatctaatcgtatctaccattggaatatctttatacattttggtgtgttcttctttcaatacgtctttcaccgcatcaaactgagtataagcttcgttataattacctgtttggtaagccttaactgcaatattgtaaaaatcaatactcaattgaaatttcaaatgtgcataattaggagtttttacaagtttgtcatctaaactaaccgcttttgacaaagccttttgagcttcaatagcattttgatcagattgtagttcggcgctatgatttaaattaatataaatctcagttttagttaaccaggttttggaatcatccatggtcttctcatgcgtaatcgcttcattaatggcatctttagctaactttaaagatgtcgtttctttttctacgtcttgcaatgcacgtgcttcaatagccgtattcaactctttggttgcctctcttacttttgatttttgtgcaaaagttgcagtgctcatcagcccaaggcaagacattaagattatttttttaaacatagtagagtctcgttattatttaatgtaaaagtaaaaataagaaatatttactaattcaaggttttctgtcttgctaaattattttaaactaagtttaggagttgtttaaaaaagtgcacaaaacattttaaaattatcaaatttccattaggtttgatttcaagtataaataaagcgctatgaatatatttaaaagaaaacccttagatgttttattacgagaggcgggagatacagaaacaggattaaagaaaacctttacctctttctcattaattgctttagggttaggtgccattattggtgctggtttgttttcgatcacaggaatggcagcagcaaactttgctggtccagcgatcatgatttcctttgttattgcggcaataggatgtgcatttgcaggattttgttatgcggagtttgcgtctattatacctgttgcaggaagtgcttatacttattcttacgctacgatgggagaattcatcgcatggattataggttgggatctggtgctggagtatgccgtaggagccgcaaccgtggcgtctagttggtctggatatttaagtgaattgttcaaatcttttggagtgaatttgcctccacatttattggcagggcctttcgaacaattaaaattagctgatggttctatgattacaggcatgattaacttgcctgcagtgtttatcgtgactataatgtctatggttttaatcagaggaacttctcaatctcgttgggtaaataacattatcgttgttttaaaagtaaccatcgttgtggtatttattgtgttgggaatgaagtttattagacctgaaaacttgacgccgtttatacctgaaaatacaggcacctttggaaagtttggattttctggaattatacgcgctgctgcgattgtgttctttgcttatattggttttgatgcggtatcaactgctgctcaagaaactaaaaatcctaaagtagcgatgccgattggaattttaggctccttaatcattacaaccattttatatatattgtttgcttacgttttagtgggtgtagctccttatactatgtacggacatacgcaaacgggaagtcctttagcacccattgcgattgcaattgaaaatatgggagaatggcaaaatggtaaaattgtacccgcatatccttggttgaatacgtctatcattatagctattttattaggatattcttccgtaatattagtcatgcttttgggtcaaagtagagtattctacaccatgagtaaagatggattagtacctaagttattcagtactttacatcctaaattcagaacaccttatgtttctaatattgtgtttttagtattgatagcctcttttgcagctttcattcctggtcatatagttggagaaatgacgagtatcggaactttatttgcctttatcttagtgtgtattgggattttagtgatgcgtaaaaccatgcctgaagcaccaagagcatttagagtaccatttgtacctttaatacctattttgggtgtcattgtttgtttatttatgatggtgtttttaccttatgatacgtggattcgactcatcgtatggatggtgattggaatggatatttacttattatatggaatgaaacacagtaaaattaacgatggtagaattttaggaaataaaggtggattacatgcagtacatgccgtggattggggatctatcaaaagagtaggatgggtgtcgattggaatgtgtttgttattattggttttaaccttggtacatcaatatcaatacccaggtgaagagttgagcttgtattacttttctctaatgtttggaggatttcatatgattctatttgctgcggtgatggttaaaaactataataaattagttcgaaataattaaatcactttttgattagaatcattattgaaagcgtaactttaagatatatagatatttttctctttaaaggtaagggtcatctcataaatccttaccttttaataaggtagattatcaaaacattcatttgtaaaaaacatatttatgcaatatcaagtagtcattcagttgagcagtgctgattattcagttcataaagcaatgttggatcagatttcaaatctgattaatgatttagatgacttaaaagtagaagtggtcattcatggagaggcatatccttttttattagaaaatagttattttaatcttcatgtattggacttgcaaaataaagcggtcaagtttttaatttgtgaaaacaccatggataccaatcatttgattcaaaaggatttcattcctgaagttgaaaaagtctcttctggtgttgctcacattgttaaaagacaagctgcaggttgggcatatttaaaagtaggattctaatgttgctttaagaggaatgcttatttttgtagcatgttatacctctttttatcttttttcatgtttttatccccttttgaggtggcgttatctgtgttgcaagaacctttaatcactaaggtttctccagatactattcccgtgttgtatcctcctgatttaaagcaaggagatttgatttttcaaaacggtcattgtggtcctttatgcgaagctattaatacagtgacccctgctatttatggtcgtcatttttctcatattggtatattggctaaaaataaagacgagtggaccatcattgaagctacttaccctgaagtagttgaaattccattaaacgattttttaaaaaaatcgaaagagtctcattgggtcggcagattgactaatgattatgacgacttacacgacgaagccatttcatttgctcgagaacaaataggcttgccatatgacttagattacatttatggtaatggatcctattattgttccgaattagtgcacgatgcctataaagttgccaataacgatgaaaccgtttttcctttataccctatgacctttaaagcgccgggatcagaggtgtattttgaaaattgggtgttgttttacgaagatagaggtatggatattccagaaggagagccgggttgtaatccaggtggattggccaattttggcgatttagttatatttgaattagtagaaggagcgaaataagtatgagtataatcaagcaagaatccgttcagcaagttatgcagcggattgatattgtggaagtgataggtaattttttaagtatgaaaaaaagaggtgcaaattatttagcactttgtccttttcataacgagaaaacaccttcatttaatgtgaatcccgcccgaggtgtgtttaaatgctttggttgtggacaaggaggtgacgccatcagtttcattagagaatatgaaaagttttcttttattgaatcgattcgatggctggcgaatttttaccaaattgaattagaagaacaagaatatacagaagagcaaaaagaaaatcgtgctattgaggaaagtctcagggcgataaatgaatttgcaaatcaatttttccaaaaaaatctctgggaaacagaagaaggtaaaattgtaggtggtcagtattttcaaaatagaggatttactacagaaaccatcaagaaattcgacttaggatatgccttagatgaatgggaacagttttataaagctggattggctgcaggttataaagaagatttgttagaccaagcaggattgattagaaaaagggaaactaaagtctatgatacttatcgaggacgaattatatttcctataaaaagtagtacaggaagtgttctaggttttggagcaaggattttaaatgaaagtgccaaagcacccaaatacatcaatagtccggaaagtaaactttatgtaaaaaacagggttttatatggaatgtatgaagggagaagagctattggacaacaagataattgttatttagtagaagggtatacagatgtcatttcgatgcatcaagcaggtatagaaaatgtggtggcttcaagtggaacttccttaactataggtcaaataagactaatcaagcaaattacacaacaactcactattttatatgatggggacgatgcaggaatcacagcttctgctcgcgctttagatttggctttagaagaaggcttaagagtacaaatagttcctttaggtaaaggacaagatccagatagtttcatcaaaaaccatggtgcggatgcttttaaagaatttgtggaaaaaaaccaacaagatttcttgacttatcgcatcacttcagcttctgaaaaaggaaaaaatgatcctattttaaaatcaaatttagttaatgaaatcgcagagtctttagcgaaaattaaaaaagtagaagactttacacttcaaagctattatattaaaagagctgcagatgcttttgatgtagaggaagaaggaatggtgagtttggtcaatcaatttatccgtaaggaagtcactcaaatatataaacaagaagaaagagataagcaagaagttgatagaaaagcgagacttgaacaagcgagtttagatgaagagccgagtatagatgaaaatggacaacttgtttttcctactgcagttactccaacacagcctacacttcctaaagtggataaggcggagaaacaaatggcttggcaattgatcaaggttttattgagctacggagagaaggattatgaggaagaaacggtcgctcataagttttatgagttgattactgtggatgatataggagatcctttagctcgtgttattgcggtagagtactatgaaaaatggttgcaagaaggcgctttgcctccgattcagtattttacttcacatgaaaatcaagaaattaaatctaatgtcgctcaagtattgacagaaactcatgtgccgagtgaaagttggtcggagaaattcaaaattgacgtacatcatggcgatgagatttatgaggaagaagtaaagtccacttttgcttatttccaattgaaaacattaagaaaactcttagaagagaattataaactgataaaagaatttgcgtattcggatgacttgccagtatatatgcaaacgcatatcgacttgaaagaaaaagaaaaatctttaatgagtttggttattttaaaataaaaaatcatgtgcaattacatagaagggcaattagtagatattcatgaaagggagatttatcctgctcgtgtaagttggaatgaaaatggaactattgtttccattcaaaagaaagctcaagctcccaaaggttatattatgcctggatttgtagatgcgcatattcatattgaaagtacgatgttgcatcctcagcattttgcaaaagcagtgagacgacacggaacgattgccacagtttcagatccacatgaaattggaaatgttttaggtgtggaaggtgtggaatacatgattaatgcttctaaagacttacctatttctatcaattatggtgtgccttcttgtgtgccagcagcaccaggtttagaacgtagtggagccattatcgatagtgaaaaagtgcaatatcttttcgatacttatgatttaaagtatttagcggaaatgatgaattttcctggtgtggtgaatgacgactcggaagtgcttcagaaattgaaaatagccaaagcaagtaaaaaagtgattgatggtcatgcgccgatgttatctggcgaaggcttgaagaaatatatacaagaagggatcagtacagatcatgagtgtacaacattggaagaagctttagaaaaaattgaagcagggatgaaaatcatgattagagaggggagtgcagctaaaaattacgaagctttaaaagaattgattcgattacatcctgggcaaatcatgttgtgttctgacgatgcgcatcccgatcaattgattgacggccatattaatcgatatgtagcaagaatattaaacgatggctttgaattttgggatgtgttgaatatcgcatgtaaacatcctgtcgaacatttttctttagatataggaactttaaaaataggagatcctgcggattttattattgttgaaaacttagagtcattcccggttcaagggttttataggaaagggaaatccatcgaagaaaaagatattgaaaacctggaactttcgactgaagacgtgcctaatcattttcatttgaatgacatttcaatggatgaatttgaacaattaatgcctgattggaaaattaagcgttcaggagagtggaatataatccaagtgattgatcaacaattacttactcataaaaaagtcatcacttttgaaggtagcatagaagagttgctacaaaaacatcccgaatatagtgttttattggtcattaataggtatcaaaaagaggtagagattcaagcttgtatagtcgagaattttggtgatatacaaggtattgcgggcttaatgtctatagaacctattgaaactttagctgataaatttattgctttagagaaagtggttggagaaatgaaaagttcactgactgctccttttatgactttgtcatttttggccttacctgtgattccgtctttaaaattaacggatttaggcttgtttgatagtgatttgtttgagtttgtggtggggattccggagtaggggggctttattataatcagtaaaaggttgtcaaaattaagatttcttaattttacaaatcttaattttacaaatcttaattttctaataagtgatttacaaacatggaaatagttatttaaagtattatatgtgaatcagtatcaagtaaaataaataacatagaaatgtaaaaatacggaatagaaatgccccggaggtagccgaggcgctaaatgttttcacaacggaataatccttattgtgaattgctttcaatgcaaatatagtaaaaatcttattaaaatcataattattttcttttaatcttttttttttgttaaattagctttattcaaatccaagaaacgcaaaatttaacaaaaaacatgaaaacaaaacgtatccttggtctagatttaggtactaattctataggctgggcattaatagaaaataattttaaagaaaaaactggtaaaattattgatcttggaagtaggattattcctatgactcaagatgatattggtaaatttaacgaaggaaacactgtttcaagtactgcagagagaacaagattgagaggagtaagaaggttgagggaaagacatttattaaggaggtatagattacatcaagttcttaatatattaggttttttgcctgaacattatgctcaggatatagattttgaaaagaagaggggacagtttttgcctaatacagaacctaagttaacttacaatagtaatgggtttctttttaaagattcatttaatgaaatgcttagtgaatttaaaatatctcaaccagaattagtaaaagatggtaaacttattccatatgattggacaatttattatttgagaaagaaagcacttactgaaaaaatcaaaaaagaagagattgcttggattattttaaactttaatcaaaaacgaggttactatcaattaagaggtgaagaagaagaggatgatgatagtaaactagtcgagtatcactctttgaaagtggtagatattattcctgatgaagaaggagataaagagaaatgcttttcagtagtattagataatggttgggtttatagaagaaaaagcaaggagtctttgggtgattggatgggtaaggttagagattttatagtcacgactgaattaaatgaagatgggtcaattaaattaacaaaagatggtgaagagagaagaagttttagagcacctaaagaggatgattggggattagtcaaaaagaaaactgagcatgaaattgatcaatcgggaaaaactgtcggaacttatatatatgatagattattaaaaaaacccaaacaaaaaattagaggtaaacttattcaaacaattgaaagaaagtattacaaaacagaattacgaaagattttactaaagcaaattgaactgcaaccagaattttttacagaagaaatctatgttgcatctattcgcgaattatataaaaataataaagctcatagagtagagttaagtaacaaagggtttgtccatctttttctagaagatattattttttatcaacgtcctttaagaagtcagaagtcattaattgggaactgtaaattagagtataaattatacaggtctataactgaagatggtaaggtaaaagaaaacagagcttatttaaaagctattcctagatcacatcctttatttcaggaatttcgattatggcagtggatttacaatcttagaatctacctaaatgaagatgatacaaatataacatcagagttcttaaataatctagagtcttgggaggatttatttgagtatttaaatactaaaagtgaaatcaatcaaaaagacttgataacttttttactggaaagaaagggattaagtgctaaagaagtaaaaaatgatgtgaagaaatatcgttggaattttgtagaagataagtcatacccttgtaatgaaactaaggcatcaatacagttcagattaagtaaagtagatgatgttgaaaaagatttcttaactaatgaggttgaagtgcaactttggcatataatatattccgtaaccgatataatagaatataaaaaggcactaaaaactttcgcaagaaaacataatttaaatgaaacctcttttttggataatttcttaaactttccgccaattaaaagtgagtttgggacttattctcaaaaggctatcaataaactactgcccctagtaaggcttggaaaaaaatggagctgggataatatacatgatgatactaaatctagaattaataaaataataaatggagagtatgatgaaagtattaaagagcgcgtcagagaaaaggcacttcatttaaataatgaagaagactttcaaggacttgatttatggcttgctcaatatattgtttatgatagacattcagaatctgagctttcagaaaagtgggaaactgtagatgcattaaaagactatttaaaagattttaaacagcattcacttaggaatcctatagtagagcaagttgtaacagaaactttaagagtcgttggtgatatatggacaatatatggtaatggcgaaaaggattattttgatgaaatacatgtggaattaggacgcgatttgaaaagttctgcagatcaacgtaagcatttaagtcaagtaattggtcataatgaaaatacaaataatagaataaaatacttattacttgagctgaaaaatgatagtaatattgagaatgttcgtccatattctccaatgcaagccgaagcattaaggatttatgaggaaggagttattagtgcattagatgtaattcctgatgacattgataagattatcaaatcattagcaccaacttcagctgaattaaatagatataaattatggttagaacaaggttatatttctccatatactggtcaaattattcctttaagtaagttgttcacttcagcatatgaaatagagcacataatacctcaatcaagatattttgataatagttttaataataaagtgatttgtgagtctgctgttaataaattaaaggataatcaactaggtttagagtttgttaaaaatcatggaggagagattgttgaaattggctatggtaggagtgtaaaaatattaaatgaagaacaatatcagttatttgtaaaagaaaagtacgcatctgttagaaacaaaagaaatattttgttgatggatgagataccagaacagatgatcacgcgtcaattaaatgacaccagatatattagtaaatttatttcaaatttactatctaatattgttcgttctgaagctaatgatgatgggattaattcgaaaaatttattgccaggaaatgggaaaattactaatagattaaaacatgactggggtttaaatgatgtttggaatgatttagtattatcaagatttaaaaaaatgaatgaaataagtgatagtactgactatacgagttggaatgatagacatcagaagtttttgccaacagtacctttggagttatctaaaggattccaaaagaaaagaatagatcatagacatcatgctttggacgctttagttattgcttgtgcttcaagagagcatgtcaatcttttaaataatcaacatgctaaatcttctaaaagacatgacttaaataggattttaagacattatgaacagcgaacttattataataaaaataatgaaaaaataacaagagatgtgcctacattatttttaaaaccttgggataacttcactattgaatccaaaaaagctattgaaaatgtcatagtcagtatcaagcaaaacttaagggtgattaacaaaacaaccaataattaccagaagtttgttgaagataaaggcaggttggttaaaaagtatgttaagcaaactaaaggtgatagttgggcaatcagaaaacctttacataaagacacagtttatggtcaagtaaaattaagaaagaaaaaacaggttaggctaagtgcagcattagatagttatggtgatatagttgatatatcattaagggaacatgtcatatcattagtagcgttaaattatgataaaaagcttttaacaaagtatttcaaagacagaaataatacttggaatgatattgatgtatcaagagtagaaatttattattgggatgacaaacaagtagcaacaagagaatttttagatacatcttttactgagaaaaagattgttggaaaaataacagatacaggtattcaaaagattttattagcacatttggaaaattatattgacttatctgaagatagtccagaaaaattagcttttacaccagaaggaattgaggaaatgaataataacattgttcagcttaataacggtaagttccatcaaccaatttataaggtaagagtatatgaaaccaaaggtagtaagttcaatgtagggcatgttggaaataaaccctctaaatttgttgaagctgcaaaaggaacaaacttattttttgctatttatgaaaaagagtctggtgatagggattatgctacaattcctttaaatattgtagtagagcgtttaaaacaaaagcttactcctgttcctgaatataatgaaaacaatgaaagattgttattttacttatctcctgatgatttagtttatgtgcctctttctgaagaagagaatattgaattaatagatttttccaacttgtcaattgaacaaaaagaaagagtttataaaatggtaagtgcaaccaataaagtatgttattttattccaattaactatgcttctcttattaaagcttatgatgcaaaaagtaaaattggagaactggcaagtctaaataaaagtgaactaactatttgtggtgaaattagaattaaaaatacttgtgttaaactaaaatctaatcgattaggacagattaatatagtataataaacggtaataatagctgtgtttttaatttaaatcactaagatgaaatagttcatgttggagagtactaaatgttttaacgatgataaaacgcacattgtttttcagtaatcctgcttatttgaaattgaagcaaaagcaaatgtatgtagaatttcctcaaaaggagcgtcagtcggtgactattccgattgaagatattggtatcgtattattagagcatgatcaaattacgataagtcatccctgtttgaatgctttagtagaaaataatgttgcggtcatcacttgtaatgataaaaaaatgccttctggaatgttgatgcctttagatggcgctcatacacaatctgaaagatttaaatatcaaattgaagctacaattccattaaagaaacaattatggcaacaaactataaaacaaaaaattgaaaatcaagcgcaattattagaacatattggaaaggatgccgcaccaatgtattattggatggagaaagtaaagtcaggtgatgttgataatatggaagccagagcagcagtgtattattggtctaaaatatttgaagatcattatcctaattttaaaaggcacagggaaggggagaagcctaataatttattgaattatggctatgcaatccttcggtctattgttgcaagagctttagtctcttcaggccttttacccactttagggatatttcatcgaaacaaatataatgcgtattgtttagcagatgatattatggaaccttatcgaccttttgtggattacttagtgtttcaaattattaacgaacatcacattgaagaagatttaaaaacaactatcaaagctgctttagttaaagtagctcagttggatgtcgtttttgaagataaaacaagtcctttattgataggtgtttctagaagtacagcatctttagccaggtgttttatgaaagaatccagaaagataacttatcctaaaatgcctttataagatgtattccagattaaatcaatttcgagttatgtggttatttgtattttttgatatgcctactgaaaccaaaagagatagaaaagcacatactatttttagaaaaaggctgttgcaaaatggttttgccttgtttcagtattctatatatttaaggcattgcgcaagtcgtgaaaatgcagaagtgcataagaagcgagtggagaatattttaccagataaaggaaacatttgtatcctatcggtcacagatcatcaatttggaaatatccttttatttcatggcaaagaagtgacagatatgcctgaaacgcctcaacaaatggaattattttagagaaaagcaagactaaattaaaaatcccggaccaatttggttcgggatttttaattctaattttctttgtagtgacttgacaatcaatagatagtgttactgtctgttgtggcaaatctactaaaagtaaagaatgaaagcaattcacaaca

SEQ ID NO: 1364 - DNA, 16020 bp, synthetic construct
  misc_feature 1..16020: note = Synthetic
  source 1..16020: mol_type = other DNA
ggctggtaaaatctatttctaaaccagcgaccccattctctgctatacagactgtcaacatcgactatatgtcagctaatccgcaattatacaaacagctgaaacttcatcctgaatttgtgtctgtcatcaaacgttttgaggacgcttctcaaggtcagaaattccgttatattccaaagtcattactgaacggttctccgagtcatctggcagacgtccacactggtgatatcatcagtattatcaccaacaaagctggtttagataccagtcatgtcggtattgttttctgggatggcggaaaacttcacctgatgcatgcatccagcctctacaagaaagtggtgatggacaccaccactttctatgattattcacaacgtcagaaatcccatcttggcatccgggtttaccgtgtgctgtagattatttgaaatcaaaggcaatcagtagtttctatccggttttcttctgttacacaacaccctgaaatcacaatattcgcatgtatgctcgttgtttgtctgtgagaatgccacatccttgctgaatatttctctgattaccccttccagccgttgatggaattcctctttgtactgactggcaaaatcagtcactagctttttctgttttgacggtcccatactgatcatcgctgttttcttcgcttcattcatatccacaacagccggttttatatacatgagcgaggttccgaccggttgtttgcagtaatctgtatagatatcagcataatagaacgtctgtaagatatgataaggtctggtgctgagattcatgttgaacaagtcgtcaagggtctgtgctgtatttgctttggaactggttttgtagtccagaatcctccgttgctcctgtggagtaccgacaaagatggtatcgattcggtcgataattcctcccaggctaacggtaaacccttctatatcaacctctttgatatggtcttggttctccactgcattgacagtcatcggacacaacaatgcatcgtatttcaactgtttggccacatatttgatgataacctccctgttgagccattgttctccattgtaccttagcatactttcttttccagccttaaagaactcctgccggaatccgttgtcaacatattgttcgattatctccttgttattggctaacgcatgcagatcgctggactgcagcactctgcctatcagaggcttataaatattttccatgcaataatggaaaatcgttccgaacacgtcgttacccacttcttcgtcgagctcgtcatccactttcatccccgcaattttttccagatagaatttaaacgggcagttgatataactgttaagcgctgaaggtgagaggaaccgtctttttccatccggttgcctgctgagcttatccttcagtttttgaatcatctcatcggtcttcttcacttcaaatacttgctgcggatatgacaacaccttcgattcaagcgagttataatggattctggtgctttcgttgaatataaggtcctgttccacaagcatctgtgtcatatatctcgacatctcgcctttagacatttcattttccgcattggagtagatgagagtgatatgttctgcccgctgtatgagccggtaaaacccataagcctgcaaactcgactgacggtcgaaagtggtcatgccataagcttccctgagtgtgtaaggaatgaacgaacttttacgtatagctttcggtatgttctcatcctccatgccaaggatgataagattcgggaagtcgagtgtgcgggtctcgagcattccgattatctgaataccctcagccggttctccgtggaaaggcacagaactgctttgcagaatctgacgtatcagtttcaccatacgctcctgactcatatctaatccttccactttcatgaaatcggggtcattgagaatatggtcgtaaatcattttcagcctgttaagcaatacatgtgcattatataccgactcctcatagagctgacggtcgaaatccggattcttctccgacggatcagcaaagaagctcactcccactctctgcaccatctcagacaagtaggtaagcagttctgccacagaactccgcatctggaaaagggtgtttaaaaactcatcttcagagaaaaagtcctcagttataaagaagagatgtttttcctttatatttttcagtttctgattcgccgaatctccagcaatcctgactgtgaaaggatgccgcagcagattagccacctgcttatagttccacatgccgctgcctctctttccgtaaacctgcagttcgagcattgccatcacaaaacttgccaccggcgtttcatagagtggaaagcccatggtcacattgattttatacgggttatccttatctgccacaggcatcgcatgcagcatcggctgaaggagtttctcatttgccagtaccactgcatattggttgaaaggatgcttctgtctggcaagcatttctttcagcagattacccgcatagcgtgtctgagcagtgtttgacggactttccacaaatgtgatttgtttgtctttcctcatggaatcaaacacaggatggtcttccggcagttcggaaccgaaatgccggatattgtctctgatgaaacgtccggcttcaaagaaagacgcctcgtttcccttcacatacgtcaggtcatagtcccagtagaagcatgccctcccctcctctttcagtctttccatcagttttttctctgttgtgttgagcacattgaatcccacaaatacaaagttttgctgccggaagcggtcagttgggatgccctgttcaatcacatcacgcttgagcatcccttcataggctatattgttttttctaagtctgttccggaaaattgtataagttggaagaagcaggttccacacactgaggaacttctctctcagtttggtgtcctcagtttgcttgaaatagccgaaatagcgttcgatggctctaatctgctcttctgagagatagtctgtggtggtaagttcgtcgaggtctttcaggttggtaaaaatcattttgggatccgacagattattatcaatatcatcgaagtcgctcagcatgacctctccccatgaatagaaactgtcaatggtttccgtagtggcagctccgttcaattctattgccgcctgctgataggctgcaaaaagatggaatataagcagcggctgatcagccacatcgaaatccgacatctgatggaacatatcgttgagagtggcataagcaggtgcccacactggttttccggcaatggttgccagatattgattgacaaagaggccggccctttttgttggaaacaccaaggtgatatttctaaggtcaccagcggttttctcatataaatcgtttgctatggtttttaggaacatatctgttaataatgatttaggctgtttatctatttatttccacgatttcatcacgtcgtatataccagagatagccggatatattccggtagcccatttggcggagcagatccatatattttttcacctgtttcttatagtccggatcttgcctatatcctgtcttatagtcgattacgatggtctgactgccatctgtaatcacacggtccggccgtttctccaccactttcccgtcttcctcaaagacgatggtgcattcgttgatcactgtccatctcggattgaaccacgactgagcctgtttgttcccgaatgcctttctgaccagtttccttacctgttcccgataatattggtcggcaaaacacccttcaaagtcgagtttcctcaccaccctgtcgagctggtccaccgttttcatctcagacaggatggcatgtagcacgagtccttcattttggtacttcacctgaggatcgtcgtcttcaatgccagctatgaagaggcgtgagcggttcgactgccggaattctccgcctgatggcctgctttcgaacgacagcagcattctttccggtgttttcaacagcacattctcagtggtcttatgctttgtctgaaaccccatgacttgactgtcggcatatacataaaccattgcttttatgtcgtcatcggtggtttcttgaatagtgcctgcctgttcaatattctccggcatggattttatgaggaggtcaaagattgtggcatattctgtctttgcgttttttgcattcagcgacgcgttattcaagtcgctgatagcgataaggttatgcgtagctctggtgaaagccacatagaggaggttgaggttatctacaaactgtttgagtagttcctcctgatattctttggcaaaggcagaatttgccagactattttgtatgtttaccggactgagtggcaattcatcaaaaggagcctcatccggagagcaccaaaggagtcctctgtttccgtctctcaatttccagttggcaaacggaaggagcacagaatggaattccagtccttttgccttgtggatggtcatgatacgaataccactcacggttccgtcgctgatggttttctcagccagtttctcatcccaaaatttaaggaaactgtccacatcggtgttgttgtcttccaagaacttacggagttggtcgtagaacgcgaagagataagagtcctgatgttcgatttccgacagattgagcaggtcgtagagccgttcacatagttcgtaaagaggaaccattgctatatccttgaaattttctttcagtttctgtggtatcagctccctcagcgagtctatatctttcataaatagctggttgacagcctcttttgtgtgattcttctccacatgctcataataataaaaaaggaagagagcaagtgacagtctgtcgtcgggattctggataactttcaaagcattcacgatgattctgactgctggcgaagcgctgagctggtaagcctcattgctcacaacgctgaccgtttccccgtttaccggctccatataattgtcgaaataatcacagatcagacctatctgtcgacgggtcctcacaaggatggcgatttctttctgcggtattcccgcttccatcagcattttcacattttctccgagacgccggcattgccatgtctcatatttgttcataccctgcaggttctccgactcatctgccgcattgtttttatcttgttttgtcatacattcaatcctcacgtatccgtcggtaagtgtcttcccctctggcaccttctggctggaattgagatatgcattttcgatggccttggagtctccctgtgtttcctcagcatagcatttgctgagtttttctttagccagttcaaagaatgcgttgttgaagcggattaccctggcgtcacttctgtagttggtgtcgagcgggtcaggactcacataaggtccgaaaacaggattgtcctgaataccgttgagaatcgaccattctccgttacgccatctgtagatgctctgtttcacatcacccacgataaggcattcattgttgtcgtcgagacaattcttgatgagtggtttgaaatttgcccattgtagtgcggatgtatcttgaaattcatcaatcatgatatggttgaatcgggtacctgttcgctcgtagataaacggtatatcgctctcctctatcatctgattgaggaaatgattggtgtttgacaggaggaaatccccccgttggctggtcacctcatccacctttttgctgatggtattgatcagagcaagcgaatgcatgtgtttctccatggcatccacggtattaaccacacgattggtttcctcaatcttagcaatggcattattcagaaatgccacaaggccttcgttttccacaacagacagcacatgcgggtctttcgaccagttattcacatctgccgcccatttcctcgcggtaggtgtcacattcggaacagagccgtcagccaatttttcgaagaaggaatatggtccgccagacttccctgtaaaatctcccacactcaagtcattagcattgcagattgctaaaaacttcataccatattcgggtagcatttttagagcctcctccctcaaagccctgattttctttctgaatgtaggcaggaattgttcgtcttccagtctcttacgtagttcttgcccgaactgcagaaaattttcgtcgaagatattcttgccgaatttttccagttcccagttgatggtccagtttttattatcttccagttttgagttgataaaatcgatcacctgtttttcgacggctttgtcgtaacggactgattcaatcagtgcatccacaccttcatggagtgccgcattattgtcaagatccacccgcaggttggctgtgaggttcaggtcgtgtgccagttcgcgtacaatagactggaagaaagagtcaatggtctcaatccggaaaaaatgatactcatgaataatcatcgagagagccttggcacagttactgcggatgatatcctccagcggtttcgtcttttttccgttctcataccatcccctgatatcctggctgtccatgatggctgaaagataatcctcagaatctctcaatcggtgactgattccgtacaactggcttaggatacgggttttcatctcccctgtggccttattcgtaaaagtcacagcgagtatatgtctgtatgaatctggggatttcaccagatgtttgatatattcgacagccagcttgaatgtcttgccactgccggccgacgccctgcagattttcagcttatgtggtataggggtcatcgtctctcctcgattccctgaaaaaaacaaatcattatgattttccatcgtgtattatttaattagaaatacaagtttcggaagttataaaatgaagttaaagaggaagttaaaatgaagaagaatgcagggaatgcaaagaatgcagggaatgcaaagacgtttgtttgactattgtcttatcttctcatcttcttatcttctcatcttcttaaaccaacttttgtcctgtgcggagcacataaatttccgtttcacggagatttactcccatttttacttcagaaagttgaattagaaattcaacaatacaaatttacggaaaaaaaatgagaaaaacaagaggtcaggttccagtagggagaaaaaaattccggtttcgtttctcaacgtgaccggaatgtaaaaaaattatagagaatcggggagaattattagattagcgtttgctaaccattgcaaaggtattataattaaattaaaccgccaagcatttcgtaaaaaaattttcaatttttctataaaaatgtaccattttccctaatttggattaaaaaatagactattttaccataacgaaaccgccgtccttagccatcgtaatcttaaatttgtcaggttggttaatggtcacactcttatcatagtccggatcctgattcttcaaattgtctttatagagctggactttatccccttgtcggataaagcgagagaggtcgatggtgagcttgagtggttcgccggtggcattcacgcccacgatataccatgtggaatgatgctggcgggcaagcacacagtatttaccggggtatccgtcgataaagcgggtgtcttcccatgttgtcggaatctcacgcaggaggttcatgctcacctcaggcgctcctccctcctccaccgtctcaaggttctccggtgtgatggcaaagttctgtatcggattttggaaaagcacggtcgtggccagttcgaagcagtctgtagtacggcgaatatttcctcccttattacccttgtggagattccggttcataaagcatcccccaaattccatacatcccactgcattgcggataaacggatgcaggcaggcgttgtacgactccatatcacagaaatgctggttgaaatagatgttctcgctggcaaggacagcctcacttcccacatagttcggatacatccgctcccatcctctcggcagtgtgcatccatggaaaatcaccatcagtccgttgtcgtcggcatcgctcagaatctgctcgtagagccggatggtctcctgcttgtcgccaccgaagaagtccaccttgattcctttcaccccgatgctcttcatccagcgcatccactgcttgcgggatatggagttgtccatgaggttaacaggtccctgtgtgatgtcgttccagtagccgctggagctgtaccacagaaacacatccactccctgtgaatgagcatattccacaaggcgttccatctgctctttgccaatattgttgtcccagtagttgtcaacaagcacatattcataccccatggctttggcgagattgacatatcgcacctggtcgtcgtagttgatggagttgtcctgccacacaatccagctccaggtgccacgtccgaacttatagtcgttccgggtctcatacagcggtttcaccacgtcgaacgggatggtggtctccacaatcggcgccagtgtgctgcccacggtgatggttctccacggtgtctgccccggcagggagaaagccggctcaaccgagccgttgccgttgttctcctcagccatcgggagttccacggtgtagagtcccccgccctgatggtcgctcagccggcatccgcagtagcggctgtccacgccagtctcgctcaacagcacccatcgtgagcctccatccaccttgaacaggcatgggaacgtatagccatgcccatactgcgatttttccgtcatcggcatatcggccttgtattcctcctcatagctcggtttggtccgtttccacccaatcatcgcatcactctggggagtgaggaaggtggtggtgccgtcgggaaaatcaaaccccgtctgttccttcatgatgcggattgcgcctgtgtcgcggtggcgttccacctcatagcggaaagcgatgtcgttgtccgacacgaggaaccgcacggcgaagcgctgtccgcgggctgtgcgcaggttcactttcagtccattggcctgaaaatggcagaatcggcgttttgccctgttcagctcatactgctcgtccacagtgaattcctccgcgttctggaactgaatccccgatgcatagtcaccgatattggcagtgaagccgagcggcgacggctctatgacttgttttccgtcgtaactcaccgaataaaccggttttcctccgtcgatatcaaaggtgagtttcagttttccgtcttttccgctgatgctggctgtctgagcacagcagattgtggccatacagaccatcagtaatgtgataaagtttcttttcattattctcgttaattagtttttttctgccacaaaattagcaaaaaaagggcacaccggcaaaaatatgtggcattaattctttgtgtcacacagaaaacagaaaaggccatgcggacgtttttgggggggcacacactcttaattatgaatagggagaggcttcacatttttgttacctttgtaagagtacttaggcaactttggaaatcataaataaaatatggcatctctagcaactgctggtgattggaagaggagccactagtgtttgcgattatgcaaaggtactaatttgaaagcaaatcaaaagacctgttcaccagaatacacccttctcgcagacttcctaaaagcctgttaagcgcaaaagcgacaatgtaaaaattaatgtggctgttggaatcttttaaggtcaaaatttgaagatatgaaggattttaattaaatttgcagatgaagatgggagaggacatagttataacctatctagaactgaaaaactaatcccataaaacaaaaaaatgctcccgttaaaggacgagagcaacctaatgttttcacaacggaataatccttattgtgatttgcttcaaattagtgatgcaaaagtaagaaataaaataataactaccaaaaaatacctcaaaaaatatgaaaaaaattttaggacttgaccttggaaccaacagtataggttgggctttagttgagaaatctgacaaagaaggaaggattatcaaatcgggcagtagaataatcccgatggatgcaggtgaacttagtgactttgcaaatggtaaaacaaaatccaaaaccgcagatagaacatcaaaaagatctgccagacgtttgagggagcgttttctcctacgaagggagcggcttcatagattacttagaataattggccttcttccaaaacattatgaagaacgtataggttgggatattgagaacgatgaaaagcattttgggacttttcttgagggagaagagcctaaaattaattatttaaaagatgaaaacggtaaaaataggtttctctttgaagactcttttttagaaatggtaaaagaattcaaagggaagcaccctgaattgaaatcaatacccaaagactggactttataccaccttcgtaacaaagctcttcactctaaaatatcaaaagaagaactcgcatggatcatccttaattttaatcagaaaagaggttataaccagttaagagatgaagtcctggattcacaagatgggaaaaaatcagaatacaaagagcttattgtaaaaaaagtaactccagacgaagactctaaaggagaaaagaagtggtatacaattgaatttaaaggaagtgatattatatatcgaagacaaagtaaatatgacctcgattgggttggaaagaaaagagggttgattataactacaaagattgatgagaatggggagacaaaactaaaaaaagacggaagccttgattatagtatcaaatcaccagaagacgatgactggggacttttaaaaatcaaaacagaacaagacctcagactatctggcctcacaattgggcagtatatatatcacgctttattagataatccttcacaaaaaatccgtggtggattagtaagagttattgagcgctctttctataaagatgaattaagaaaaatcctagaaaagcaatgtgaatttcatccagaattcaatgatagagatttatatgaaaaatgcatcacagaactatataagaacaacactgcccatcgaaataatattaaaaataaagatttcacttatttaatacttgaagatgttcttttctatcaacgtcctctaaaaagtaaaaaatcgctgattgacaattgtccttatgaatcacataatggttttgacaaggaaactggtgaaataaaacaatttccaattaaatgtatcgcaaagtcaaatcctttctatcaggaatatcgtatttggaaatttctaagtgacttacgtataatagcaaacacttatgaaaaagacggtcatttgtattccgatgtagatgtgacacaagaatttataaaggacagctatgcaatgtctgatttatttttgtggctaaatgatttggcaaaagtagaccagaaaaccatgcttaagaaacttggcattaaaaaggcagaagaaaataaatatcgttggaatttcgtagaggataaaatataccctatgaatgctacgcgtcatgctattttatcaaaacttgataagggggagaaacttactaaagaaaatgaatacttattgtggaatctcctttattccactcaatctaaagcagaaatagacaaatccttatccgagaacaccccatcgggaaaaccgaatactaataaactctataataaattgaggaaagacggtatttcttctgaatcgctggagaaaataaaaacaataaaattacctgatgaaggatatggtgcatactctgaaaaagcaattaaaaagcttctccctctgatgagaactggtcaatgctgggatgctgataatatagacatgtacacagcatctagaatccaggcatttattgaggagaataatcttgataacttttccgaacgtatttggagccgtatatcttcattaaaaactgttgattcttatcaaggattacctgaatggttagcatgttatatcgtttatggtaggcatagtgaagctaatgaagttgttaagtggaaaacgccacaagatattgatatgtatctgaataatttccgtcaatattcactaaggaatcctgtggttgagagcattgtccttgaaacgctaagagttgtaagggatttgatggcaaagtatggaagttttgacgaaattcatattgagttaggacgtgacctgaagaatccaagtgataaaagagcctcaataactaagcaaattcttgaaaacgaaaacacaaatcttagaataaaagctcttattagcgaatttactgatagtgaattcaaaatagagaatgttcgaccttattcaccgagtcaacaggaattgctcagaatctacgaagaggatatcctcaaccaatacgaacctgattcagagattcttggtatcattaaagaattatctaacccaacggtacaaccttctagaaataaagtgttaaaatacaagtgttggcttgatcagaaatatgtttctccatatacaggaaagcctataccgttatctcgtctctttacttctgattatgagattgagcacatcatccctcagtccagatactttgacgattcattttccaataaagttatttgtgagtcagaagtcaataagctcaaagacaatcttttagcttatgaattcatcaaacaacatcatggttatacattacaaagtggtgtccgtatttttgaagtaaaagagtatgaagaacatattaaaaacgtatattcttcaaggaaggcatcttctaagcgcaaaaaactattgatggatgacataccaacagacttcatcgaacgacagctaaatgacagcagatatatcagtaaggttgttaaatccttgctttcaaacctagtcagagaggaggatgaaaacggtaatcttgaacctgaagccatctcaaaaaatctaatagtgtgcaatggaactgtaacaacaagattaaaaagagattggggccttggtgaagtatggaattcaatagtacttccaaggtttcaaagactgaatgatttaacaggacgtacatgctttacaactacaaataaagaaggtaaggagattccggcaatgccactagaacttcagaaaggatttaatattaaacgtattgaccacagacatcatgcaatggatgcaattgtcatcgcttgtacaacaagagaacatgtaaacttgctgaataacgaggcatcacttcctaagaataaagaaatgaaatacgctctttctcacagacttaggagatacgcagaagaaattgttaatggacagaaacgaaatattccaaaggagttccttatgccatggccttcattcaagactgattgtaaaaattcacttaatgagattgttgttagtttcaaacaaaacataagagtcctaaataaagccacaaacagttattttgcttacaatgacgatggccataaaattctgaatcatcaacatggatccgatcactttgccattaggaaatctttacataaggagaccatattcggacatgtgaatttaagatggaaaaaagaaggaaagttgaaagaagctatttcaaaaccatctatgattgttgataggcgattgaaaaagaagattcaggagatgcttaataagaactattctgaaaaacagattttagcttactttaaaaatttctcttatgaatggaaagaatttgatttcaacaaaatagaactgtattacttttctgacgaaaaagaggcattagttgccactcgctttgggaatgacctggttagtatatttagtggtaaaacgaaaaaagaagaaatcgaaaaaactattgaaaaaataacagattctggcataagaaatattttaactacatatctatgtcaaaatttaggcaatattgaggaagcattctcacctgacggtttagagaagatgaatgataatatctcctcctataataacggaaaagagcataagccaatatacaaagtgaggatgtttgaaactatggggcaaaaattccctattggcataagtggtaataatgcaaaaaaattcgccgaagctaataaaggaactaatctgttttttgctgtttatgtcaacgatgagaatattcgcacttattcgagcacacctctaaatgaggtaatcgaaagacaaaagcaaggattaacgcctgtaccagaaaccaacgaaaatggtgataaattgctgttttatttatcccctggtgatttggtatatgtgccggatgaagaaaacaatcatgagtatataactgaatttgatgcgaacaagatatacaaaattgtcagtttttcaaaaaatcaggcatttttcataccggtatatatagcatcgccgatacttcaaactattgagttaggtgctaataataaagcagaacgttcatgggatagagtgatgattaaagaagtttgtattccaatatcaataaaccgtttaggtgaaattacacaaaaatgataaagaaaactttatatttcggtaatccgatatatctgagtttacgatataatcagttagttctcagacaaccagatattgaaaagaatgatactttaccagaaactttcaaaaaggaatttgaacgttccattccgatagaagatattggtgtcgttatactggataatcgtaggattacaatcacaacaggagtgatggaggcactattaaataataattgtgccgtcatcacttgtgacagtaagaatatgccagcaggtctgttgttacctttatctggaaacactttacaaagcgaaagattccgagaccagattgatgcatcactgcctctcaaaaagcaactttggcaacaaactgtccgccaaaaaattttgaatcaggcaaaagtgctcgagatgcaaacagaaaaggtggcaaagaatatgttagtttgggcaaatgatgtgaaaagtggtgatccagataatctggaggcccgagctgcagctttctattggaaaacggtttttccaaaaattcctgatttcgttaggggaagagaagaagcaccacctaacaacttattaaattatggctatgccattctcagagcttgtattgccagagggcttgtagggagtggcttactccctacactgggaattcatcatcacaacaaatacaatgcctattgtcttgcagatgatatcatggaaccctaccgaccttatgtagataaattagtggctgacataatggtgaagtttacagatatcaacgaactaactgttgagttaaaagctgaattgctcaaaattccgaccctggatgttgtgattgatggaaaacgtagcccccttatgattggggttggtattactacggcatctttatacaaatgcttcaaaggcgaaataaggaaaattctatatcctgaaatgtaaaaaatgagcacctctgtttcacgactaagcgaataccgagttatgtggattcttgttttctttgatctgcctactgaaactaagaaggacaaaaagagatatgttgaatttagaaagaatcttttaaaggatgggttcaacatgtttcagttttccatatacatccggcattgtgctagtaatgaaaacgcagaagtacatttaaaaaaagttaaatcttttattcccgaatatggaaaggtcggtttgctaactataactgacaaacagtttggtaacattcaacttttctatgggaagaaaccagcaaagcctcaagccgctggtattcaactcgaactcttctaacacaaaagaaaatccaccgttgatggtggatttttctttagccaaacgcccattttttagtttgtaatcctcaccgtatctaactgattaccaatatagtatcgagaatcgggtgtttatgactatgcaaagatactaatttgaaagcaaatcacaaccacgacgcgtctgataattatgagtatcgtggtgtttatg

SEQ ID NO: 1365 - DNA, 16016 bp, synthetic construct
  source 1..16016: mol_type = other DNA
  misc_feature 1..16016: note = Synthetic
gattccacaggaagctttttaacagcttcccagttgctttcttcactgccgtcgcctaaaacctgttccttttggtcaatattattcggaagtcctgaaacattactgagtgcctgcctgatcgtaacggtttcccatccggccggcatgtcttttatatacagggaaagaggatcgtctaccttcagctttccctgttcctgaagctgcataacggccacccctacaaaagccttggtcatggagttgatagaaaatacggtactgttttttgtcgcagcctgctgttcaatattcgcaagcccgtaatggctgagtttaaccagtttcccgtttcggatcaccgccagctgaagtcccggtattttcatccgggccattttatctttaatatacagatcgatgctgtccggagttttctgtgacgaaacccggttggaaaaaaagataacgaaaaataaggaacatatttttataaggttcatctgaagtattttataggtataacaataccggcttaggttgtattacatcaccgtaaagataatctatgatcaccggtgttaacaggataggatggttttgttcgaaaacctacttataaataccgctgaaaagaagtatttcagcatccgatggattattgataatccggacaaaaaaaatagcagataacactgctgttatctgctattgtaataaaataaagaaagtttaacctttcttcaaaattatgctaaacgtacgttaactgcgttaacgccttttgtaccgttctgtaattcgtaagttacgacatcattttcacgaatgttatctactaaacctgaagtatgtacgaaaacatcctgtccacctgttgatggtgtaataaaaccaaatcctttggcatcgttaaagaattttactgttccttgttgcattgtaatatattataaaattattgtattaaatttttggcttttgccgttaccgggctgattttacatcagtacgggtttaaatcgatttgttaacaaaaatgatggggatattttttagaatcttgaacggttcaaggtgaaaaaaatgattcatctgatataatgatgacaaacttagcggctgataaagcgaagactgatagaaaagagtaaactctgaaatttcagaagaagcatttggcagtagcctgattattctacaaatgtacgtataatttattgaaaagcaaattttttttaagttttatttattttctgtcaagaattaacattccgttcatcgtgggagtaccgaatagatatcctgtaaatagataggggaccttatcctaattcagttttctggttatctttgccggaccgtccggaacctgggatgtgcgccggttatgcgttccatttctcccggactgtctgatataataaatcggtaagtttaatctgatgaatcccgtactgaaacattgaatacactgaaatataatcttgccgcggtgctggcattctctatctggggcactttcagcctggtgctgaagccgctacatgcctacagcgcgctggatatccttttttaccgggtattcatcggtgcactggtcatgtcgttgatcacggtcctttttaagaggaatgcgctcagggagaacttaaagcatttcaggtctttgccgcgaaaagccaggcggagcgttgccttcctgcatgtcggaagcagtattttactggccgccaactggttttcttttatttatgtgatgaaccatatcagcgtaagggccacttcagtggcatatctggtctgccccatcatgaccacgatccttgcgttctttgtactgaaagacaggctgacgaaactccagtggttttccgtaatgctgagcgggatgggatgcatcctgctgtcttatgcagatatggctgatatggtatacagcagcctgatcggctttacctatgcctgttatctggtcagtcagaaaaaaaacggtcagtttgataaatttctggtcctcaatgttcacatcctgatatccgcattggtcctgctgcctttttttccttcattttccgggcctgcgccttcggaattgaagttttatttctatgtcgggattattgctgtcgtttacaccattatcccattactgttaaacctgtatgcgctgacgggcatcagctcgtcaaaggtgggaatgatcctgaacatcaaccctattattgcctttgttctggccggagtggtgtatcacgagccgttaggcgccttgcagacaggggcttatgcactcatattctttgccgtacttgttttcaatgccgggagcattttcaagtcggatacccggaaacccgttcagtaacagcttcgtatcatccggaagtcatccatgaaaaagggaagataggtccaggcgtattggtatacaatcatggcagcataattgtatctccactctataaaaaaacgatggaaaatttaaatatttcccctttcagcatgatgtctctgatcgttcctttcatcatgacagccatcagtatctattatgcgtccaaacgcttcaatacggaagccatacttttaacggccggctcaatacttgttttcgtgactgctgtatttgccgttttcatgccttacctgatttggagccggcatatgccaatggatgaggtgtccttgtattatggggtgctggggacaattacctttataggaaacctccttttcgccataggcttttttatgctggtgcttaccgtcatcaggaagaatgaagcaggggccgctaaaaagctctgaacccattcctgttgatatttcttatcgttttaagtatggatgaacaccgccttttatactgccgtaataaaggcaaaaagcccgaatatgatgcccggtgaattggccatgataatcggcatatccctttcaggttttttcatgaacccgtagacgacccacagggtacagttcacagcggccaccagcggctgcagccattcccctttgttgccggctagattgctccggatctgcggaatgtaagagacatacatggccatagcggtggccgtggctacccatcccaatactttgaaaaatttttcgttgtccataatttgtgttttaaatgagtatcaaatataagtcaaagtgatttgcaacttacatgcccaaatgaatccacagaaagaagcggaccattttagtcggaatctctgccgtttgatttgaccgggcatgacaggaatggcctgaagcagactgttgaagcatgatattttatagacggataaaactttataaatttttaaagcctgatttttaacgctgttcccactgattcaggactatttaggattgtctgctggccgcaggatttctgtggactttctgttttttatcaacattgtattcatcattatgatcatattattttcaaagcccttttgaagggactttttttgtttaccgttgctgatatcgctacgtttcagccggaaaatcagataaaacggcagaaaagcgataaattttaatgaatgggtgcattttttttatgctctgttaggctggaaccgccataaaacctatatttgcagcctaaattttaagaaacaatgaaagaacttatcgaaaaaatcaacgcagaatttgaagctttcaccaacgaagcaaaccaacaggcagaaaaagggaacaaggcagcagggacaagagcccgtaaatcagctttagagctgagcaaactgttcaaagacttcagaaaggtttctgttgaagaatctaaaaaatagttaatttccaaaaccggcttgaaaaagccggttttttttatgacctgacttattttattgactgcactttcattgacaccgtcaattatttcttttataaacggaaaaaattttttgttaaaaaatttaaacatcccgattgttattcccaaatttcacggcttttagttaaatattgataatttattattaaataactcattccgtattgaattgtatcgtatttgaaatatatatttgtcgtattaataaacatgaacaaatttatatgaaacgaatttttattttattttccattatttcaacacttctcccggcacagaaaatacaggtcattgatgccgaaaacaacaaacccattgggaatgcccggattattcttgagaataaagtggtttacaccaatgatgacggttttgctccggtagaacctaccgggaagaatcttgagatctctgcggccggtttccagaaacaaaatctcagttcatttactgcgctggtaaaattgaaacccagctttaaagatattgaagaggtaaagatggtgaatgttgatatcaagacgattttcgaggatgtctttaaaaattatcataaaagatattttgacgatccttcgctgtacgatatcaccttaaaacagcgggcttttgacaatgataaattacactttatggtcattgcagaggccaaattgtggagcggaaacaacatgtacaactggaaaaacggcattaaaaagaattatgatgatattgtacagatccaactgaataatattaaatatttgaaaaatagtaaatcagacagcattttcagccaaaaaacggatgagttctcccatgagattgtcgggaatttcttttttaattttgaaatctaccgcacgttattgaacttgagaaataaagcgaccagattttccggtaatttaatttctgatgatggtgaagagcaggttattaactgtaaaataaaatcaagttatgggactgatatcagtggagaaatcagatacaataaaaaggataaagtcattacagggtatgaattcacttatctgcagggcgattttccgacagaaaagaaagtaactgccgatgggaaagagtttagcagaaagcttggcaatgcaacaataaaatttgaattttacaaaaaagatggggtatatctgccttccctgaatagtttgaatacagataattttgttattttctataaagaccaggtccatacgaaaaaagccagccgggaaattgtctataacagtttttcaaagtctgatcaaaaaggtctggaatctaaaattgatttcaataaaagcatatgggaaaatattcctgtaaaagaagataaagaaactacaattttactttcaagagaagaacaggaatttatcaatcagaataacagactatgaaaaacatccttttaccagcatttattttagcttcatttgcatcaaatgcacagacgcaccgctttatttatgatgtagaatacaagaaagattctatacaaaatttgactgccaaagaaaactatcatctggatattgaaccgaaacaaataaaatattatccacgcgatttttttgtcggagactctttggttacccataatcttgcgataccgcaaagcgcagattttaatacctcgaatattcttacccataaaccgggaacagatgattatgaatattatgatgttttagaaaatattattttaaaacttccgtcaaaaaataaacagaactggaaactgacggatgagaaaaagaaagtgaaagacttcaatctccagaaagccaccaccacctggggcggaagaaactggattgcctggtttacttctgatattccatttcaggaaggtccctataaatttcatggtcttccgggattgattgttgaactttatgatgaccaaaacaattacaaatttgacctggtgaaaacccagaagctgacaaaaccttatgtcaatcagtacatcagctatgtgatcgagcaaagtgttccggtcaatgaagaaaaatacaccgctgcaaaactgaaatactacgattctcccgtcaatgcattgagaaacaatagcggctcaatcaaaaccaatgaagaattctacctcagcgacgggacaaaagtcggacaaagcaattcccgtgaagtgaatgagcgtttgagagaatcggtcagaaagtacaataacccgattgaattggataaagcgataccatatcctttgtaaaagtttatttatgaatccgtgaaagtctgtgtgatttgcggttgaatatttcccgcatattatgaaggttttcacggatttatttccgtaaatgcttgtgttattgattgatcaagcatttttctgagcttccaaacctgactttcttttacggtataagtatgacacagtttattattcataaacatacttaaacgggtctcaataacagttcgggttcccattgctacatctttgatggttcgttctgagaacttaggataaaaatttgccagacaaagaaaatttctctttaaagatttagagatttccggataatttccattatcatcaattactttcattttaaaaagtttcttacctaaagtcgttccccaatgagtttcggtgatacttccgactatcataactagaggaatcgaactcataaaggaatacattacaggcaggtgaaaaataaaatataaaaccaaaaagaatggagtcatatcaataaacttcgcaacttttcttttctggtcacttccataaaaatctactttgtaaggtaaatcatattcaaattcattataaatacgcttaccttcaaagtcaaaatttcttgttgccctccgaactatttttctttctttcagttctgaaattttcatgagttttttattataatatcatactcagctggatcctctttctcgcctcgtccacctccgtcacttttacctggacgtgctgatgcagctttaccacttcattgacgtcggagacaaaaccctctttcagctgtgagatatggaccagcccgctttccttgatgcccaggtctacaaagcatccgaaagccgtaatgttattgacgattccgggaagaaccattccggttttcaggtttctgatgctttttacattcgggtcaaattcaaaaatcttagctgcctttctgggatccagtcctggtttttcaagttctttcagaatatccctgatgcccaggataccgatggtttcattgatgtactgttcaggattgatcagcgcgattttctctttgctggcaatcagctcatcggtttttatccctaagtctttcgccattttttcgacaattccatacgcttcggggtgaaccgcagaattgtccagagggtttttagcattggtaatccggataaaggctgccgcctgctggtaggctttttcccccagcctcggtactttctttaattgtttccggtcttcaaaagccccgttttccgcacggtaatccacgatgttttcggccattttttcaccgattccggagacgtagcttaacagggatttgcttgccgtatttatattgatgccgacggagttgacgcatttcatcaccgtagaatccagctcctttttcagctgcgtctgatcaacatcgtgctggtattggccgacgccgattgatttggcatcgatcttcaccagttctgccagcggatcggccagccttctcccgatggacaccgcgccgcggaccgtcacatcataattcgggaattcatcccttgcaattttactggcagaatacacggaagcgcccgcttccgaaaccacgaaaacctgtaacggcttgtcaaaagcgattcttttaatgaaaaattcagtttcccggcttgccgtcccgtttccgatggagatggcctggatgttataggcattcaccatcgaacggatcttcttcatcgccattccgctctcgttctgcggcgcgtggggatagagcgtttcattatggagtaaatcacccttttcgtcgatacagacgactttgcagccacttttataaccggggtcaatcgctaaaatccttttctctcctaagggcggggccaaaaggagctggctcaggttttcagaaaagatctcaatggcttttttatctgctttttctttggcttcctgcagggtttcatttgaaatagccggttcaaggagccttttataggcatctttaatggctaaagaaatctgctccgaactttcattatcggatttaataacggcgttcgcgataaaatcaacagcttcttccttatcaatgccgatatgcgtcttcacaaagccttccgattccgctctcagcatggctaacagccggtgggaaggggtccggctaaggctttcttcccactcaaaatactgtgagaatttctgcgctccctcttcgtctttttttgatttaacgaccttggaagtgatgaccgctttccgctgaaacaggcggcggaggttcttgcggacgtacatattttcattgatccattcggccatgatgtccctggcaccctgcagggcttcctcttccgatgaaacctggccgttgaggtattttgaagcaacgtgctgcagatcgccggctttctggctcataatgattttagccagaggttccagccctttttctttggcagcatccgccctggttttcctgcgttttctgaacggcaggtacaggtcttccagttcctggaggtcaaagctttcttccagcctttgttttaattcagggcttaaggcattctgctcttcaattgattttaaaatactttccttccgtctgacaaggtcttcgaattgtttgctgagctttgaaacctgctcgatctgtatttcgtccaggtttcccgttgcatctttgcggtaccgcgagataaacggaatggtacagtcttccgaaagtaatttcaaagtggcattgatgcttttttcaggcaccgtaagcgcctgccggatataaagggttgcgttcattttaaattcaaaacgctaaaataatcaaattttaacagggcatgtatccggatgtaccatctttttgttattttagcattgggttcggaaaaccgggacctcatttcttgatgtatggtaacgggcacaggggatgaagtttcctatttttggtaccggcaggagctgttgtaaaagatcctcgtcaatcccaatttaaaataaactttttaaacaattatatcatatgaaaaaattaagtattatggcattagtggctgtcggcatgctggcagcctcttgtaacaaggaaaaatctgcggaaaacgcaaaaacggcccaggagcagacggtagcagaaagcaaaggcgaaaagctgatggtggacgctgccacttccgtggtgaactggaaagccttccataaaggaggaatggcgccgcgttgggggacattaagcgtacagtcgggagacctgagcatcgaaggcggacaggtaactgccggaaacttcgtgatcgatatgaactcccttaaggtagaccctgcttccgtaacggaaaaagataaaaagcctgccgaccttgaagcgcacttaaagaacccggatttcttcgataccaagaaaaacccgacttcggatttcaagattaccagcgtgaccgatcttaaagctgccccggccgatgcaatagccggagccaacaagactgtaagcggaaaccttaccctgtcaggaaaaaccatgaatgtaacattccctgcaaaagtagacgttaccgaaggggccgcctctgtacaggccaagttcacggtcaacagagccgactggggcatcaagttcgggacttccgaagcagacccggcagaatggatgatcagcaaagacatcgaaatcgccgtggatgtaaaagccaagaaataatattattgttagataaattctcaatgaagccgccctatacgtagggtggctttttttatgtatttaacttgcgggtatagacaaaaaatgccccgaagatagtcgaggcgctaaatgttttcacaacggaataatccttattgtgaattgctttcaaaattataattcaaatatagaataattttttattcccgcaactgtggtttcccgtaatttttgtaataaagaatttttatacatttaagaattaataaaaactgaaattatgaaaacgatattaggactggacctgggaacaaattctatcggatgggctttagttcagcaggatttcaaaaataagcaaggtaatatacttgggatgggaagccggatcattccaatgtcccaggatatcctcggagatttcggtaaagggaattctgtttctcaaacggcagaacggacaagatacaggagtgtcagaaggttgcgtgaacggtttttactgagaagagagcggcttcaccgtgtcctgcatgttctgaattttcttcctgagcattatgacgctcagatcgattttgaaaaacgtttcgggaaattcaaatcggaaacagaacctaagcttgcgtgggaaaataccgatggaaaattttcatttctgtttcaggcttccttcaatgaaatgcttgaagattttaagataagcggaaaagatttaaaggttccttatgactggaccctctattatctccgtaaaaaagcactttcccaaaaaataggaaaagaggaactggtctggattctcctgaattttaatcagaaaagaggatattatcaactgcggggtgaagaagaggaggaaaatccaaataaaagggttgaattctattcgttaaaaattgtggatgtactggccgacgaaccgcaaaaaggaaagactgacctctggtattccctggttttggaaaacggatggatttacaggcgctcaagcaagctccctttattcgactggcaagataaaacaagggatttcattgtgacaactgatctgaatgatgacggaagcattaaaaccgataaagacggaaatgaaaaaagaagtttccgtgctccaagtgaaaacgactggactcttgttaaaaagaaaaccgaacaggaaatcgaaaaatcgcataaaaccgtaggaacctatatttacgaaaccttacttcaaaacccgaaacagaaaatcaaaggaaaactggtccggacggttgaaaggaaattttataaagaagaattgagaaagatcctggaaaaacagaaggaatttcatccagaattgcaggacgaagatacctataacgattgtatccgggaactgtaccgcaataacgaagtgcatcaactgagcctgagcaaaaaagatttcgttcatcttttgatggaagatctgattttttatcagcgacccttaagaagccagaaatcttcagtttcaaactgcacgctggaattcagaaaatacaaggttgaaaatggtttggaacatattcagtatttaaaggcgattccgaaatccaacccttactatcaggaattccggatctggcagtgggtttttaatctgaatatttatgaaaaggaaaatgaggataacgtcacaaaagaatttctaagcacaaccaaagattacgaaaatctttttgagtttctgaacaatcgaaaagaagttgaccaaaaagctttactcaaacattttaagatcactgagaaaacccatcgatggaattttgtagaagataaaaaatacccctgcaacgaaaccaaaacaatgatttcatcaagattggacaaggttgaagggatcactaataattttctgacaagagaaattgaacagaagatctggcatatcatttattctgtaaatgacaaaaccgagtttgaaaaagcgttaaaatcattcgcccgtaaaaataatctcgatgaacattcattttctgaggctttcaggaaattcccgccgttcagaagcgagtatggctctttttctgaaaaagccgttaaaaaactcttgcccctcatgcgtctgggaaaattttggaattatgctgctattgatggaaattcaaaagaaagaattcagaaaatcatcattggagaatatgacgaaaatattaaagataaagtaagggaaaaaacgcttcatcttaagtctgaagatgattttcagggattacaattgtggctggcccaatacattgtttacggaaggcattcggaagcatcaataaccggcaaatggaattctgcggatgatcttgaaggatttttaaaagagtttaagcagcattcacttcggaatccgattgtagaacaagtgattacggaaacccttcgtgtagtaaaagatatctgggtaaaatacggaaacggggcgaaagatttctttagtgaaattcatgttgaactggcgagagagatgaaacttcccgcagaagaaagagaacgtcttacccggcagatttctgaaaatgaaaatacgaatctccgcattaaggctttactggctgaaatgatggatgatcattcggtggaaaatgtccgtccttattctccgatgcagcaggaaatcctgaaaatttatgaagacggaattttaaaatcggatatcgaaattgaagatgatatcctgaaaatcagcaaaacggcacagccttcttcttcagatttaaaacgatataaactgtggctggaacagaaatacaaatccccttatacaggacagattatcccgttaaataaactgtttacaccagaatatgaaattgagcatatcattccgcaaagccggtattttgatgacagtttcagcaataaagttatttgtgaatcagcagtcaataaactaaaagacaattacatcgggcttgggtttatcaaacagttcagcgggacgattgtcgaatgcggtttcggaaaaacagtgaaagtttttgaaacaggtgaatacgaagatttcgttaaaaagcattatgccaataaccgcagtaaaaggaataagcttcttatggaagagattccggaaaagatgatagaacgccagcttaatgatacacgatacatcagcaagtatatttccggccttctgtcgaatatggtcagagaggaagacggtaaggatgagggtgtcaattctaaaaacattattcccggcaacggaaaaatcactacccaattaaaacaggattggggattgaatgatgtctggaatgatctggttttgccgcgatttgaaagaatgaaccggttaaccgactctgaagactttaccgcctggaacgaaagacatcagaagtttttgcccaccgttcctgttgaatattcaaaagggttttcaaagaagaggatagaccatcgccatcatgccatggatgctttggtcattgcctgtgctaccagagatcatgtcaatctacttaacaatcagtcggcaaaatcggataccggacgttatgatttgaaaaggaagctgatgcagtttgaaaaagcagtttacaacgatcctcaaaccggaaagagaatagaaaggggagttccgaaaaaatttttaaagccttggaatggttttactgttgatgccaggaataagctggaaacgattgttgtaagctttaaacagaatctccgtgtgatcaataaagcaaccaattattatgaaaagtatgtggagaaagacggtgtaaaaaccaagatggtcgtaaagcagaccggaacgaactgggcaatacgtaagcccatgcataaggatacggtttccggtaaagtggatttaccctggataaaagttcctaaaggaaaaatagtgaccgcaacgagaaaaagcctggatacttcatttgatttaaaaacaatcaattcggttacagatacagggattcagaaaattctcagaaattatcttgagttcaaaggaagtcctgaatctgccttttcgcctgaaggaatcgaagacatgaacaaaaacatacagaaatacaatgatggtaagccccatcagccaattggcaaagtaagagtctttgaactgggtagcaaatttcaggtcggccagaccgggaataagaaagataagtatgtagaggctgctaaagggaccaacctgtttttcgcagtttacgaaaataagcatgggatcagaagttatgaaactgttccattaaatgaagttattgaaagacaaaagcaaggcttatattcttgtccggaaactaaccaaaagggtgagaaattattattttatttgtcaccaaacgatttagtctatatacctacaggagaacagcaatataatataaatacagttgattttaaaaatttagataaaaaaaacatttataatgtatataagattgtaagctttactggaaataggttgtatggaattcctttttcattgtcaaatgtaatagttaataaaattgaatatactcaactcaataaaatagaatttacaagagagaaagaaatacttttaaaatttaatgtcgaccgtttaggtgatataaaaacttttactacagatgatgttagaaaaatttttaatagctaaaaatcttgattttacggatgcaaaatattcacttgatactaatattttagtttatgcttacgaagagtcaaattatggtatttcagaaattgctattagtttgatcacttcaaaagcttcaatttctaattatgtttatcaggaatttttatttcagttaaaggataaaggtatcgtaaagaagaatatttcaaaaatcggaattgatttattagctatattaaatttaaataagattgataaagatacgtatagatatgctcattatctaatgactaaacataattttcaactaggtgattcaattattttagcggatgcgattttgaatgattgtaatattttatattctcaggataatatgggacatcatggtttagttgataaaaaattaaaaattattaacccttttaaatagttattcatgatcacccgttctatttacatcggcaatccggcctatctgaaaatcaaagacgagcagatgaaaatcttgtgtccggaaaccagaactgaaaagggaagtgttcctgtagaggatttagggctgctgatgctcgaccatttccagattaccgtttcccaccagctgatccagaaaatgatgggaaacaatgtggtggtcatcagctgtgattcccatcatttaccccacggtatcatgctgccgctgtatgggcataccgaacattcggaccgggtaaaagaccagctggaaaccagtgagccgttaaaaaagcagctttggaagcagacgatagagtgtaagattgaaaaccagaaaaatgtactgatgaaactcgggaattattatgaaccgatgatggattatcagcagaacgttaaatcgggagacatcaccaatagggaaggcattgcggcccagcactactggaaatacctgatcagcctggatttcctccgggaacgtttcggggattcgcccaaccagttctttaactttggctattccgtactcaggagcattgtggccagggccattgtggaaaccggactgctgcctgtcctggggatttttcacaagaacaaatacaatccgtactgcctggccgatgacctgatggaaccgtaccggccgtttgttgacctgctcgtgatgcagtggctcaccatgcatccggagactgaaatgttaagcaaagaattcaaagcgcatctcctgcagatcgccacgaaagatgtgagcattgaaggtaaaacaaggcctctgatggtggcggtaaagacgacagccagttcactgtataaatgttacacgggagaaaagcgcctgattgcttaccctgaattaatatgaatgccgaaaggtttaatgcataccggattatgtgggtattagtattgtatgatctcccgacggaaaccaaagccaatatgcgggatgccaaccgtttccgcaaggcactgattgatgacgggtttaccttattccagttttcgatgtatgtgcgtcattgcccgagccgtgaaaatgctgaggttcatattaaaagagtcaagtttatgctgcccaaagcagggaaggtagccatgatgtgcattacggataagcagttcggggatattgaaatcttctttgccaggaataaagaagaaccgccacctaccttccagcagctcgaattattctgaattttacatcctgaaaacaaaaataatctgctgaatttcagcagat

SEQ ID NO: 1366 - DNA, 16002 bp, synthetic construct
  source 1..16002: mol_type = other DNA
  misc_feature 1..16002: note = Synthetic
agcacatatttcagggtaaacttttcttttcttgcattaaccgttcttaaatccagcccataacaaagcgtgtctttcaggggtggattcttcgctccgggtttctccacaggcgtaaatgtgtaagttccgttttcaggatccggcgatccgattacctgaaactgggtatccgttccccttcctacgcttaccaccgttccttcaaaaaggcaaatagaaggatataacagaattgattgaagattcggcaaattcggggaaggagcaaccggcggagcataaggcattgaatgtttgtaattcagacaggttatgatctttagtttacactcatttccgtctttcagccatttctctccgttaatcataagtgcaagttctgccacagtacagccatgtacgatgggtacaggatttaatcctacaaaagaggagaactttttctgtaaaaccggaccatcaacataatgaccattggggttcggtctgtccagaatcatcagcgttttattgttttcggcacaggcttccataacatagtgcatagtggaagtataggtataaaacctggttcctacatcctgaatatcaaaaatcactacatcaattccttccagctgtccgggggcaggctttttatttgatccgtaaagtgaaacaattggcagacccgttttcctgtctattccgtttgaaacatgttctccggcatccgcagtacctctgaaaccatgttcaggcgcgaaaattgtctttatttttacgcccagcgacaataatgaatctgccaggtgggttcttttaatagtagaagtatgatttacaaccagggcaaccgttttgcctttaaggtcagggagaaattcaacaattctgtctgctcctgttttaacagaatgatcaacaggtaatttgggtgaattatgacatgaacaattatccccgtctcttccatacaaagttgctcctttcagatatgattgaaactttgatgaagaacaggcactcataaaaaacaggaaagtaattaggtaaggttttttgatgaatcgaaacattgtcttttatttgttctaaaatattaaaattagctgatgtattcggaaaaatcgaataaaaaacatccttacctttcttttaaacacttgaatgatttgcactaatgactgaaatgccatcaatttttatacgtattgactattacctgccttttccgtcacttcctgaaatcaataagttttaatcctgaggttttgcattgattttatacaatctaaagatttaattccctatccatcgaatcagctgaacagcttatgaattttgcttatttcatctcccggcgaatacaagatacaaaaaatgaatcattttctgcaacagttacccgtataggcgtgggcagtattgcccttgggctggcagtcatgattattgcttttgcagtgcttttcggatttaaaggagccatcagacaaaaggttttcagccttagttctcatataaaagtttcgaagtttacggcaaattcttcctatgaagaaaatccgatcacgaagcaatcagatttatacagacactacagaaacatcccggaaatcgctcatatacagaccgttgcacaaaaggcaggattattaaaaacaaaggaagatttgtcgggagttgttctgaaaggtatcggaaaggattttgacacaaaaatgtttgcacccaatatggttgcgggagagatgatcgctttccctgattcaggttattccagggatattcttgtcagccggcaaatcgcaggaaaacttcggctgaaacccggagataatgctattatttattttctcaataatccggaaagaccccggaaattaaccattaagggaatttatgaaacaggattggaagagtttgacaaaaacctgataatcggagacatctctttaattcagcgaattaataactggggggtcgactctgtaggcagttatgagatttttgtgaaagatttcagcaaattgaaccttgccgttgaaaaagtgcagaataagatccaacccgatatgcgcctgatccctgtcacaaaaatgtatcagggaatgttcgactggctggatatgcttgaccggaatatgctgatttttctgatcctgatttcttttgtggccagtttcaacatgatttccattttgctggtactgatgatggaaagaactcccatgatcggccttttaaaagccctgggcagtccggactggcaaatccgcaaagtttttatttttaacggaatctccatgattatcaaaggtttactttatggaaatctgatcggcatcggagtatgttatttacagcaatactttcatattattcctttggatccggccagttattatatgaatactgtacctatttcaatggattggctggtaatcatactattgaatgtatcaacactggcacttgtctcgtttgttttattaataccaacattggtgattaccagaattcaaccagttcgggcgattgccttcaagagttagatttcaggaatacaggaaaaggatacaataattgagcgtattcattaaattgtgtctttgatcttttgcctgaaaggctaaaatctgatatcttgtatcttatgcctttcaaatgcttttaaattaaaaaaccaggtaaagtaaatgaaaattaaattattcacggcgatagcgttattttctgcaatgacggctttcggacagaaaacagcgcaatccgctaattatcaattcacagtagatcttaccaaagtaaacaaggataaactggaagtgactctgattacacctaaattcaacagcaatgaagcggtttataacctgcctaaaattgtaccgggtacttatgctaattatgattttggccgatattcctccaattttaaggcttttgatataaagggtaaagaattatccgttgaaaaactggataaaaacagttataaaatcaaaaatgccaaatctctttataaggtttcctacctggtagatgatacctgggattcacctgaaatcgcaggtgaatatgtttttgaaccggccggaaccgatattgaaaaagatacactttttgccattaatacacatggattcttcggatatttcagtgatttaaagaaaaatacctatcaggttacttttcgtaaaccggcagggttttatggctctacttctctgacagcaagctctacttcagacagtgaagatacttttactgttccgaattatatggatctggtagatgccccgattatgtactcaaaaccggatacaaccattttgaaaattggcggagccgacatcctcgtttctttgtattctcctaatcatatggcgacttcaaaggatattgctgcaaacatcaaaacccttcttgaatcacaaaaagaatatctgggaggtacacttcctatcaaaaaatatgctttcctgattgttttgtctgataaccttaaaaacggaagttatggcgctttggagcattcgtattcttcattttactacttacctgaagctacggcggaagaactttctcagacggtaaaagacgtttgcgcacacgaatttttccatattgtaacccctttaagtatccattctgaggaaatcggtgattttgattacaacaagccaaaaatgtccaaacatctttggatgtatgaaggtgtaacagaatacgcagcaggccatatgcaggtgaaatacggcttaattgacttaggcacatacatggaaatgctaaggggcaagatcaccaatatgcttgacaaatacgatgaaaaaacaccgtttacggtaatgagtgccgatgtacttgataaatacaaagaccagtacaacaatgtatatgaaaaaggtgctttaatcggtttatgccttgatataagattacgtcagctttcaggcgggaaatacggtacacaaaatctgatgcgtgatttatctaaatatttcggaaaagataagtcatttaaggatgatgaactgtttgataaaattgctgaagtttcaaaactccctgaaatccgcacatttttcacaaaatatgttgaaggaaatgagcctttacctttagaggaaacatttaaaagcgttggcattgaatttaaaaaggacatcaaagtgaaagccattacattcggtgtttccagagataaccttggtgtaaatcctgataccaaacgtattttccttgtgaacaacaatggcatcaacgcttttggaaaagctcttggcttacaggctgccgatgaattggtttcattgaatggagaaagcctggaactgagtaatttcagaaatgctgtttctaaatttctggaaaatgccaaagaaggagatgaggtaaatatggtggttatgagaaaagaagaaggttcggaaacaaaagtagaaaagaaactttcaaccaagcttttcattcctgaaattgatcagaaaaatgtccttgcaccggtagaaaacccgaccgacgctcaaaaggcattacaaaaagcctggttatcgccggaaaaatagccgcatccggagccttgaatttctgaatttctttataattttcagcagttcaaggctttgcggaaatcttatacgaatattgcacaatcatgaaaacattttttatcaatacgtttttcaaaaaaaactttacaccagtttgtgtactgacgctgctgttttcggcaaatttgctgaatgcccagaaccggaagtacctcgttttattgaaagacaaaaataattctacctattctgtttcaaaacctgctgagttcctttccgcacgtgctattgaacgtagaaaaaaacaaaatatcagtctgactgaaagagatttacctgtcaaccagacttatctgaaatcgatctcagccacaggagcaacagtccggtatacttctaaatggatgaatgctgtactgattgaggccgacactgccaaacttcgtaaagtcctcaatcttagttttgtaaaaggaattgaaggcaatacagctttagacagtcctttctcaaccggaggcagaatcggtcagaaaaccagtacaaaaggtaagatagatgtattacctgattacggcaattctctcagtcaggtagccatgatttctgccaatgaaatgcacaggcggggatttcatggggaaggaatgttaatcgccgttttagatgagggctttcttaatgcaactacattaccctgttttaaatctttgttcgatgaaaaaagggtggtagatacttatgatttcgtagggaaggacaaaaatgtatatgataccggctcacatggaaccgcagtattaagcactatggccgcatacgtggaaaaagaattgataggaactgcctataaagcttcatttgcccttttcaggacagaagacagttcttcggaaagtctggtagaagaggctaactggttatttgccacagaatatgccgacagccttggagttgatgtattaaattcttccctgggttacaacgaatttgatgaagcacagacaaatcatgtgtatgcagacatgaatggcaaaaaaaccattgcagccagagctgccagctgggctgcaaaagcgggtatagtttgtgtaatcagtgccggaaatgaagggaataaatcctggaaatatattacaactcctgccgatgccgattcgattattacggtaggtgcagttgaccgcaatcaggcttatgccagtttcagttctttagggccctcagctgatggaagaattaaaccggatttaagcgatatggggcaaagtgctgtggttgctattccttcaggaggtacttcaactgcaaacggcacctcgttctcctctcctattctgtgcggtatggttgccggattctggcaatctaatccaacccttacagccatgcaggtgattgattttcttcgaaaatcaggaagccagtttaccaaaccggatgcttttctgggatatggtattccaagttttgaaagagcggaggtattagctaaaaatattctggctgccgaaaaggaaatccagacaggatttaaaatcttcccgaatcccttttcatcacttcagaatccttctctggaaaatgaacaatatgatggaagaacattctatgcttccttaattgatatttacggaaaaatactctggaatggtgaaattaaaaatgaagttgaatcacttccttttcaaagtttttcaccgggaatttactttttaaaaatctataacgaaaagcagaacagtactttaaaaatcatcaaaaatacagaataaagctgaagctcagaaccatcaaaaaaagcctttgaagatatattcagaggctttttctacttaaaacattgctctttagctcaaagaacgtaaatatattattactttgagagattgtctgtgagacgcatccgcagtaaagaaattaaactcattaaatccggaacgatatgccacagtggttaatttatgcgcttttatctactttatttgccggacttacttcggtattggccaaatttggtatctctaaaattaattctgatttcggattagccattcgtacttcagtggtatttctgctggtatggctcaacacgatttcatggcatggattaaaggattttgccaaccttactcccaaaagtgtactttttctggccctttcaggtgtaaccacttccctatcctggattttctattacagagccatgaaaatgggcacggtttcatatgttgcagcaatcgataaaggaagtattctgattaccattctgctttcttttacgctgctgaaagagcctctgacccccaaattattgatcggagcaggttttattctcattggaatgatcgtcctgatctggaaataatacttgttcaggacaaattcagatcgttctccatcaattccggacagctggcaaaatcgggcgaatggtcacaaatgctcttaaacgcagatcatcctttacatcaattggttcaaataaattataccatcccgtacgaaagccacttgatccataattgatatgcacaaaaaaggtattatttaactcatgatagccatcgattacggtagaatgcccataagaactaaagttaccaaaatggaaataaacaggccttccggcttttatttcatttcgaatcaacagcctgacgctgtcttccttaatcaggtgcctaatcttctcattcttcactatttcatccatctgaggttttgggaatggaatatctcctgttatgcaggtataaaattcagctttacattgaaaatgtttttccagttgaggaacaggatttaccatttccagatatctcccggttccgaaatccttccttatagcctccgcagtcatgaaaatatacctcgctactgcctctttcttttcaggtgcagagccaggggtaatttccggaacaaaatccgcccaattcagcgaatgtctttctaaagtatctctcactgcatatccttttgtgcaattatattgcacagaaccaaagggtttcagctgatgataatacaatacctgagccagggctgtactccagcaacccaatacctgatggtcaggactaaaacgggcatattcaccccattgatcccaattcgttttcagtaaaaatgtttttttactgaaatctacaggttgctgccaggcagtctgctctgcgctgatttgtccatacgaacataggctgtaaaagccggatagaatcactaaaattgtttttttcatttcgattaatttttcggtaaagtgaggtatttaaaaacactttccccactcaaaacctgttttgagtgtaaattaaccggcgataaaacctaatttaaggattttataaagtcgttgggagacaaacctgtgttctttctgaatactctgtagaaacttgcttcagagttaaaaccacagtccagggcaattcccagcaatgagaggtgcgttgcttccatactgctaagtctgtttttcacttcctccacacggtattcattgacaaggcttctgaaattcatccggaaagactggttaattacagctgaaaccgaggatgcaggataattaattttccgggctaaatccttcagactcaattcaggattaagaaatagtttttcctcactcagtacctgaatgatacaggtcttgattgtctcaaaatcaatattattctctgtcaaagacagattgtctttcagtgtttcctcttcgttttcagtgtccgggaaaacagaaaagtcagtacccgcgaaggaaaccggcaataaatcaaactgcctggaagtgctatacagttgataacccttcagacccagaaaataggtaagaaaagccataaaaagataaaataactccagatggataaagtggctgcggccaaaaggaagaacattttccaggagagatatagcagcaagagctaagacaaaaattcctgaaagtaccaatagattccttaaccaggtaaattcctggtaactggtatttgattcattttgaaaaagccatatcctgtatttcctgatccggagaaaagaaagtccccaatatacaatggccgataaaagtgccagccaatcttcaagtcctttgatcagttgaaaagaagctctttcaaccatttggtctttcaatgcaaaattatgttccggcaataccacaaaataaagccccagggcatatatcataaatacaaaaacaggtataaaatgtccggaataaatcgttttccagacaaaattcctggaggttgccgcgcaggcatacaagtaaaacaaaggctgaatggcagtgtctatcgcaagcgggaaataacgaaaagtattcacattccataaacccagggtatgcagcaaaatctttgaacttaacagcacaagcgtaataagaataccacataaaagatttttgcttatttctgatggtttgctgaaaagtaaaatagtcagcatgaccatcccctgaatcattcccagtaaaacaatcagatcaaaaaaagtaatagaaaacatcattttacatgcttaaatcaggggattccttagctgaatttcaattattcgattttgtgctgccatttttactgacattctttaatattttgtaattatgtaactgaaatattctttcctcaatattacaccatttataacatgcaagctatcaaacctttaatcattttatccaaaaggatcaatatcatcacaatttgttcactgatgattgttgcaggaacttcaggctgcactgatcactttttcccggacagattcattcctctaaatcctgaagagtatttcagaccaactgttccggattctatagaggtatttgccgctcaaaatccttcaaggccttatcatgaaataggtattttctatttgtacaattcaggaaagaatgccgggcaacaggttggcagagcaaagaaattcatggctgattatggtgcaaatgcaattattcgcctcgatattaccgatacttacctcaaaggcgtagcagtccgctggaaatagatttaggttttaggttaaataaagttatggcaagttgggtgaactgatgatattatcatgaaaccacttgatgtttttagttttttgctatgcgaaacggtaatctttaacgtttaaagctccttctcacttaaattcttatttgccgcattaaggtataccctgctttaaaattattcaatagaataaaagctagtaaaaaataaaagcctcccagtttcccgttagggtaagtcgagaggcgaacttggatgttttcacaacggaataatccttattgtgaattgctttcaatttctgttacgaatataaatgatagtttttatataaaatagcgtatttctactctattttattttcatgtatttctacgctatatcaaaaaccttatttttagtaatttcccttaaaattattttaacatgcgatatatgaaaaatatacttggccttgacctaggcactaacagcattggctgggcattaatcaattatagttcggaaaatcaccaaggcaatatactcggattaggatgtcgaataattccaatgtcacaagatgtattgggaaaatttgacagcggtgtatctatttcccaaactgctgaaagaacaggatatagaagtacaagaaagctcaatcaacgtcaattgctacgcagagaaagattacatagagtcttgaatattttaggatttcttcctaaacattatttggatagtattgattttactaaatattatggtcagtttaaacccgaaacagaaaccaagttggtctataagaaagatgaaaatggaaaatatcaattcttatttcaacaatcctttcatgaaatgcttttggaattcaaagagaatggttgggagaatgtaaaaatcccatacgatttgaccatttattatctccgtaaaaaggctttaactcaaaagataaagaaagaagaattggcatggttgatattaaactttaatcaaaagagaggctactatcagttgcgtggtgaagatctggatgaaaatagtaaaaagatgaacaaattttataccctgaaagtggtagatgttattgaaggagagaaagggaaaagtggtatttggtataatgtggttctggaaaatggctggatctacaaaagagagagtaaaatatctttatcaaattggattgataaagagagagatttcattgttaccactgaattggatgacaatggaaaggttaaacttaataaatataatgaagaaataagaagtttccgttcacccaaagaagacgattggggcttaaggaaaattagaacagaacaaattattgaggaatcaaacaaagaagtaggcacatttatttacaatactttacttcagaatcctacccaaaaaatcaatgggaaattgattaggacaattgagcgcaaattttataaacaagaattagagcagattctaaaaaaacaaatggagtttcacaaagaacttcaagactctgatttatatattaaatgcattaacgaattatacaaacataatgaagctcacaaaagcaatataaagaatcgtggttttgattacctctttattgaagacattattttttatcaacgaccattgaaaagcaaaatcagcttgattagcgattgtagcttggagtttcgtttttataaaaaagcagaccaaactattgaaaaggagcctatcaaatgtattgctaaatcgcatcctttatttcaagagtttagattatggcagtttgttaaaaatctgaagattattgaaagacaaaaagtggtgaatagcataacaaagttcgatgaggatgttaccaatgagtttttcaaaactgaagaagattggatagcattatatgattttctaaatgacaaaaaagacgtcacacaaaagcaatttctggctaagtataaattgaaagaagataaatatcgttggaattttgtagaagataaaacgtacccatgtaatgaaacccgcgctttgttcttaactaaagctgctaaaattgaaggtatgactgcttcattttttgacaaaaaaaatacagaagatttgtggcatattcaatactcggtaaatgatagagcagaaatagaaagtgctataggcaagtttacaaagaagcataatttaccagaagaatttgcaaaagaattctccaatcttcccgcatataaaagtgaatacggttcattttctgcaaaagcaattaagaaactattgcctttaatgcgtatgggtaagtattggaatgtagaaactattggctcgaaaactacagaaagaatcaacaaaatatgtacaggggagtatgatgagaacataaaaaacagagtaagagaaaaagccataaaccttacagaaattaacaatttcaaaggcttacctctttggttagcatcatatattgtctacgacaaacactctgaaggtagtgatacaactaaatggaaaaaccctgatgacattagcaattatttcaaaaatgagttcaaacagcacttattgcgtaaccctatagttgaacaagtcatcactgaaactttgcgagtagtaagagatctttggaaatactatggcaagggtaaagaaggtttttttgatgaaatacatttggaattaggtagagagatgaagaatcctgctgaaaaacgtaagcaaataactgaaaaaaattcgcaaaacgaaaatacaaatatccgtattaaggccctgttggaagaattaaaaaatgacggtatagctgaggtacgaccttattcactctctcaacaagaaattttaaagatttatgaagaaggtatttacctcaatgaaaacaggaaagaccaattagatgcgattgataaaattcgcaagaatagcaagcctacaacctctgatatcctacgctataaattatggcttgaacaaggttacatctccccttacactggagaaataatatcactcggcgaactatttactaccaaataccaaatagaacatatttttcctcagtcgagattttttgatgattcgatgaacaataagataatttgcgaaagtgaggtaaatagcctgaaggataatatgacggcttatgaatttattaaaaagcatagaggtgtaagagttgatttgaatggtggtggatttgtgaacattttaatggttgatgtctatgagaaccatatcaagacatattttactaagaacaaagtcaaacaaaagaatttattgagtgaagaaattcctgaatcgtttatcaatcgtcagttaaatgatagccgatacatcagcaaagtaattaaaaactatttaagcaaaatagttagagagcaaaaagaaggaaatctggaacaagatgctacttctaagaatatagtgcctgttacaggtgcaattaccagcaaaatgaaacaggattggggcttaaatgatgtatggaatagcattattattccaagatttgagcggttgaatatgcttaccaattcaacggaatttgggcaatgggaagacaaacaaggtaagaaagtatttcaaaccacagtacctaacaatagttctaaggggttttctaagaagcgaatagatcatcggcaccacgcactagatgctttagtaatagcatgtataactaaagaccatattaattatctcaattctattaattccgaaagaacaaattattctttggtttcaaagttaagaataatggaagaggtattcattaaaggtgaaaagaagattgtcccgaaagaattccacaaaccttgggaaacctttaccgtagatgctaaaaatcaactattaaaaactgtaataagttttaaacaagataccagaattattaataaaacaataaacagatatcagaaatatgaaaatggtaagaaaataagttctaaacaaatcaatggagagaattgggcaatacgccagcctttacacgcagaaacagtaagtggtaaagtgtttttaagacgagaaaaagagaatccggttctattgagtactgcattaatgcaaattgaggatgtagtagacttgaaaataaaaaccatcctcaaacgaaaggctaaagagttaaataataatgtagaagaactgaaaaaatatttcaaaaagaatccattaacggttaatggaaaggagactgaaagtgtaaaaatttatgaaataatagaagccagtgccacccgaaaaactttagatactacgtttgacgaaaaacgaataggaaaaataacagatacaggtattcaaaaaatactcatgaatcatttacgacaacctatttatcaaagtgcaattgatgaaaacggcaaaaaaataccagctaatgaagttgctttttcagaagaaggattagatgccttgagtagaaatatacaacaattgaataatggaaaatcacatcagcctatcaaaaaagtacgtgtattcgaagaaggtgggaaatttgctttaggacagacaggtaataagtctaacaaatatgtggaagcagctaaaggtaccaatctgttttttgctatttatagagacaaaaatggcaaacgttgttatcaaactattccattaaatgaagccattgaacgtcaaaaacaaggtataagaattgctccggaaaaagataaagatggcaatcagttattatttacactttctcctaatgatttggtgtatatcccaacggcggatgaaatggaaaacctttcgctaatcaattttgaaaatctaacgaaagagcagttttttagaatttataaatttgtcagctgtactggtggtgaagggcattttgttacaaataattatgcaaaagaaattatttcaaatgaaaatggttcaaataataaaaatgaaagaatgcttgaattaattaaatcaagtactatttacgatgaaaaagaaaaacccattatgattaaaacggtttgttggaaattaacaacagatcgcttaggaaaccttagactagccaaatcatgataaagcgaacgttatactttggcaatccggcttacttatcaaccaggttagaacaactggaagtacgattaccggaacaaaatgaaagcaagagcatccccatagaagacattgctgtggtgattttagacaaccagcaaattaccattacacatacagttatagctaaattattagctaataacgtggcattaattacctgtaatgataagcatcatccagtagggttaatgcttaatttggatggtcataccaaacaatcaaaacttttcaaacatcaaatagaggcaggagaacccttaaaaaaacagatttggcaacaaactgttaaaatgaaaatagaaaaccaaggtatcgtattagataattttgacagaaatgacttgtatttgaagcaattagctaaaaatgtaaaaagcggtgatgccgaaaatgctgaagctcaagccgctcaatattattggaaaaccctatctcccgctttaactaaaggtgctaatagttttaaacgagaacgattcggggaagaccccaatcatctattaaattatggttatactattttacgtgccatagtggcacgaagtttagtaggtagtggtttgttgccaacattaggaatctttcatagaaatcaatacaacgcttattgtttggccgatgacataatggaaccttatcgccctattattgacaattatataattgatatactacaaaatgatgtaattaccaatgagctgagtcctgaaataaaagccaaattattaaaaataccagtactggatgtagaaattgataaagaaagaagcccattaactatagcagtgcaacgcacaacggcatcattagcgagaagtttcgaaacaggtaaaaatgtaatgatatatcctaaacaattgtcatataaaataatattttaaaaaaataatggcctcataaaatagaaaaataggtaaaatgtttgaacgcctaaatgcatatagaattatgtgggttttagttttgtttgacttaccaacagaaaccaaaaaggaaaagaaaatagcttcaggatttagaaaacaaatcttgaaagatggctttatgatgtttcagtttagtatgtatattagacattgtcctagtcgagaaaatgctgaagcacatattaaaagagtaaagaaaatcctgccagaacatggccatgtagcaattttatgtgtcactgataaacaattcggagaaatagaaattttttatggaaaaaaaccaagtgaagtacctataggtaatcagcagttagaattgttttaaaaaaatgagttattctgtcctttaattaggtagaataactcattttttatacacttatttttatgtaagtgtctgacaatctgcactatgcaaggttgctcttgtcgaagttagaaatttgaaagcaattcacaact

SEQ ID NO: 1367 - DNA, 15988 bp, synthetic construct
  source 1..15988: mol_type = other DNA
  misc_feature 1..15988: note = Synthetic
agcattggtggactaaggacctgccttatcatgattggtggcatcagttccccgaatacaccgctaccatcaatgccttcacaacggcgtatgatgttcatgcttcgcagtatgaccgtaaattgagtgaggaggggtggttcgaccatcatatgccggatatgaatttagataaccctgacttgctccaatacttcaaacaattatacatctggtggattgaatgggctaacttagacggactacgtgtagatacctatccgtacaatgagaaggctcctatgtccgaatggtgcaaggctattcgcgatgagtatccatggataaatattgttggtgaaacatggactagaccggccagtcaggtggcttattggcaagcaggaacagccaactacgacggctttaatagtaaccttccttcggtaatggactttcctaccgaagaggctattcgccaggctttggagaatgatggtactgcatggggtggaggaatggctcgcgtctacgacgcgcttacggcggactacctctacggagatgccaataacttgctaatgtttgtaggcaaccatgacatggatcgctttgcagatattgtaaaggataatgaccctcgtcgtgtgatgataggtcatattatgattgctacgatgcgcggtattccacaaatgtatgccggagatgaatatatgcagcgttccgtagatatgagtatggggcactcggggatccgtcaaccgctgcctacccaggatgaattgaccgatacacaaaaagaggtctataatcaaatgaaaaccttgtggaattggcgcaagagcgaacctgttttgtgggatggtaaaaccatgcaatggctcggacgtgataatacgtacgcgtacgtaagatataataaggaggaggccgtactcgttttcattaacgccagcgaacaatccaagaccgttccgatgaatcactatcaggaattattggataactacgctaccacaggaatcctgcctcttaatggaaatcaaaccattgacttgacgcaacctatcatcgcagaaccggttagtgcgctcgtagttaaactggataaaaagtaatttttaatagaaaaagcaagaaaaatttgtgtatgtgcgaatttctttgtaattttgcactcgcaaatgcggctttagcacatcggtagtgcatcagcttcccaagctgaggaggcgggtccgactcccgtaagccgctcaactccatcgcagatgaagctgcttacgggtcagcccgtaagcagctcttttttattattaagctgctcaaaaatttagctctcattttgagggctattttttgttcatctttcattttaaggccatttttaggcgatttaagcataggttgatatcaaaatcgacagggtgtcggtagaaaaaagtgattttattagaagaaaaatttggtagtatcaaaaattttatgtaattttgcagcgaattagaatattaattagcaactaattaaattttttgatatgaacgaagacagaattattcctgtaaaaattgacgaggaaatgaaatcctcgtacattgactattcaatgagtgtcatcgtcagccgtgcgcttcctgatgctcgtgatggttttaaacctgttcaacggcgtgtgttatacgccatgaacgaaggtggttacacttccgataaggccactaagaaatcggctgctatcgtgggtgatgtaatgggtaagtatcacccacatggtgatagttctatttatggaacattggtccgcttggctcagccttggaacatgcgttattgcttagtggatggtcagggtaactttggtagtgtggacggtgatggtccggctgctatgcgttataccgaggctcgtctaagtaagttagccgaggaaatgctgcgtgatattgagaaggataccgtagatatgcagcgtaactacgatgaccgtttcttggagcctactgtgctgccttgccgcttccctaatctgctggttaatggtgctaccggtattgcggttggtatggctactaatatggctacccataacttaggtgaagtcatcgatggctgtgtggcttacgtaaaacgtcagattgagattgatgaggctaagaaaaatggcaccgaagtgcccgaagatatatcgattgacgaactgatggagtacattaaggctcctgatttcccaaccggaggtaccatctatggttaccaaggtgtacgcgatgcttttgagaccggtcgtggacgtatcgtagtgcgctccaatgctgatattgagacggataataacggtcgcgagcatatcatcattaccgaattgccttacggagttgttaagagtgatttggtgaagaagattgctgagttagtgagcgacaagaagattgaaggtatatcggatatcagcgaccagtctaaacgtgatatccgcgtggtgattgaggttaaacgcgacgcgaacgcacaagtggtgctgaataaactgtataagttcacggagttacaaagttcattctccgtcaataacatcgctctggtgaagggtcgtcctcagttgatgaaccttaaggatattatctctacttttattgagcaccgtatggacgtggttactcgccgcacccgttgggaactcaagaaagctgaagaaagagcacacttgttggaaggcttaatcattgccgttgataatattgacgaagtggttaagattatccgcgccagtcgtactccggccgaggctcagactaacttggagaaacgctttgagttagataacctccagtctaaggctatcgttgatatgcgtctgagtcaattaaccggactgcgtattgatgagttgaagaacgaatatgctgagttagagaaacagattgctcaccttaacgagttattggctgacgaggtattgcgttatggcgttgtaacggacgaactgaacgaagtgaaggataaatacgctgacgaacgtcgcactaagatcgttaagatggctactgagttcaatcctgaagatatgtacgctgatgacgatatggtcatcacaatctctcaccttggctatatcaaacgtactccgctggctgaattcaaggagcagggtagaggtggcgtaggtatgaaggctaccggttcgcgtgatgaggactttaccgagtatgtacatcaggcaagtatgcactctaccatgatgttcttcactaccaatggtcgtctgtactggcagaaagtatatgacctgcccgaaggcaaccgtcaaagcaagggacgtgctatccaaaatatcatcaatctggaaaagggtgataaggtttgtgccttcatcaacgtcaagggccttaatgatccggaatatgtcaataaccactacttgatctttgctaccaagaatggtttgatgaagaagactaccttagagtcttatagccgtcctcgcgctaatggtatcaatgccgttggattacgtgaaggagatgctttgattggcgttacgctcaccgatggcgagagccaaatgttaatcgcttcctacaatggtaaagtggttcgtttccctgagaataccgttcgtccaatgggccgtaccgcaacgggtgtgaaggctattacattagaaaatgatggtcaggatcgtgcaattggcatgatttgtgtagaacctaattcagataagactgttcttgttatttcggagaagggctgtggtaagcgtactcgtctggatgacgaagatggcgaacccgtttatcgtattaccaaccgtggcggtaagggcgttaagaccatgcaactcaccgacaagaccggtaacttgattggtctgcatgcagtagatgatgacgaggacctgatgctcatcactaagtccggcaccgctatccgcatggcaatcgatacgattcgcgtcatgggacgtgctacacaaggcgttaaactgattgagttgcaaaaacgcaacgatacactcatgtttggctgcactgttcctaagagcgaagagaacgataacgcaaacgataacgtaaacgtaaacgcaaacgagaacgcaaacgagaacgcaaacgagaacgaaaacgcaaactaatattcattattcattattaactattcattatgaaaaagttatttttgatggccggagtggctctgataagtgctgccggtatgggtcaaatcaaagacgttaagaaagttcaaggtatgattaatggcgaaggagccaactatgctgctgctcgcgaactcatccaaggtgcattgaccaatgacgagaccaaggacttggctaatacatggtatgtagccggtttgattgggtatcaggaggctaatgctgaactcaataaggtctatatgggactgcccgttgattataacgtagtgggtgctgctcagcaggagagttataaatactggctcaaggctgacgaactggcgcaagtgcttgttatggataagaagggcaatatggtgatggataagaagaacgtatcgctccgcaagaacattgccgataagatgctgcaatactaccagaaccaaggtctgctggggtatgccggctctttctatgagcaacaggactatgcttctacgtatgagttgtataaactgtattccgatatacctaacctgccgatgatgcaggatgagaagatgcagagcaagatggtgcgtgataccgtgtatcaggatatccgcttcagcgcaggtcaattggcttattctgccgagaaatacaacgaggctattgctattttccaagacttggttcatggtgattataaagctgttgctgccggtgagtacctctatagttgctatctcaatttgaaggacagtgctaaggcgtatgccgttatggatgagtgcattcaactcttcccgcaagaggagcgtttcatccaaacacgcatcaatgcttatgtaggtgctaacgactacgacaatgcagttgctctgctggataaggctattgcacaaaatcctcaagctcagtattacaactccaaaggttcgatcctgagtctgcagtataagtttgatgaggctattgaggtcttcaaacaaggtttggctattgagcccaacaatgctaacttatatactaactatggttatgtatttgttgagaaggctaaaaaactcaacgacgaagccggttacttggatgatgctgcttaccagaaagtgaaagatcagattgatgctgcttataaagaggctctgcctttgtttgagaaagcacatagcattgatcccgagaactacgattgcgagcgtgctcttaagagcatctactatcgtctgggaatgatggataagtacgaggcactgtaattgtggcacgtattttagcaatagattacggtaagaaacgaactggattagccataaccgatgctcttcggattacggctaatcctctttgtactgtactaacaaaggatctgccaacctggctaactgccgaactggcaaaaggagagatagatgaggtggtgattggtaaacctactcagatgaatggggaggatagtgaatcggttcagtatatcgtgccgttcatgggatggtttaacaaccatttccctcatatcaaactgattcagtatgatgaacgattcacttccgtcttggcttatcgggctatgattgatggcggaatgaaacgcaaacaacgccaagacaaagccgtcgtggataaacttgctgccactatcattttagaagattacctcaattctcaattagcaattagcaattagcaataaaaatgatactcccaatatatttatatggtcaagccgccttgcgtcgcgaaaccgaagaggtagagcagggcgaaatggatgttaaacaactcattgcggatatgcaggaaactctccttcaggcagaaggatgcggtctggctgctccacaagtgggactcagtaaacgacttttcattgtggatggcaccgaattaggtgaggactaccctgattgtgccaattttaagcaggtctttatcaaccccgagattattgaggaaagtgatgagacctctatgtatagcgaaggatgtctgtctttaccgggcattagcgagaatgtggtgcgtcccaaaacgattaccatccgttatcaggatgccgatttccagtggcatgaagatacttatacggacttcaaagcgcgtattgtcttgcatgaatacgaccaccttgagggacatgtctttacggatcgtatttcgcctatccgcaagcagtttgtgcgcactaaactaacgaatatagccaagggcaagactgtggctcgctatcgttataagcattaatggattgcttttctatcatcttaatagggattggactggcaatggactgctttgcagtcagtatctctcagggtctcgtggtggatatccacgaggtctttgctaaacgccaacatccttggttgatggctgtcctctttggactcttccagggtggaatgccgcttatcggttactatgccggtacgctttgtcgctctttctttagccgttacgccggcattatagcattggctttgttgggatggatagggggcaagatgatttacgaatcgttccgggaagaacagactaaaccagtggattggtctgcccgcaacctaatcgccttggccgttgccaccagcatagatgctttggcaacaggcgttatttttattccttgtccggaaagtctatggctgggcatcagtatcatcgcattatgctcttttatcttctccgttgccggttatctgattggtgtgtttgtgggcagtaagttccgcctcaatgtcgaaatgattggaggactgatcttaattggcatcgggctcaaaatctttattgaaggcttatgttcttgattcaaaatacattggtcagtctggatatattagagaaggacttctgctgcaacttggatgtctgccatggttgctgctgcattgaaggcgatgccggagcacccatttcggatgaggagtgccgtgaggtagagcagattctgcctattctgctgccggatatgacgcccgaggcacgtgctgtggtgcagcaacagggcatatcctaccttgatcccagtggcgagcgggtcacttccatcgtgaacgataaggactgcgtctttgcgcgaaccgaccataacggctggtgctattgcttgatagaaaaagcctttaatgccggtaagataacctttaagaaacctatctcctgccatctttatccggtgcgtctcactcaagtgggcgacaaggttggggtagagtaccatcggtgggatatatgccattgtgctcgggtgttgggcaagaagaaccatatccgattatatgaatttctaaaagaaccgctcattcgccgatttgggcaggaatggtatgatgaactatgcctgactgcttcggaatgggaaaaacaatgtaaacaatgaactgtgagattataaccatcggagatgaactgctcattggtcaggtcgtggatactaattcggcttggatggcgcagcaactgaatgaacgcggtatagcgctcaaacaaatcacgtccgtgcatgacgatgccgaacatatcacggctgccctggatgaggctttttctcgcgccgatatagtgctgactaccggaggattgggtcccactaaggatgatatcactaagaaagtgctgtgtgactatttccatacccgtttagtgccgtctaagcaggtggaagagcatgtcagggagttatataagaaccgtccggatgtcctcaatcgtcttacggctactcaatggcttgtgccggagaactgcaccatcctgcctaatcgtgtcggttccgcccccatcatggccttcacgctaaactctaatctttcatctttcaactctaaactctcaactctcaactctaaactcttaatctccctccccggagtccctcatgagatgcaaatagccatgaatgagcaggtcttgccgtggttaacggagcagttgccggatatggcacaaacgattgagcatcgcactttgttagtcagtggtattgctgagagcagtttggctattattttggataaatgggagaatgctctgccggattgtttgcatttggcttatttgcctaaggatggcactatccgtttgcggctcagtctctatgccgattccaataagggtgatgccaaggctattttagatgcccaatggaatcaactcaaggaccttgttgcggactatttgattatagatgaagatctgccgttggagttggtgttaggtcgtctgcttttggctaagggtcaaacaatcagcacggcggagagttgcacaggtggtcgtttggctgctttactcaatgcacattccggcagttcggcttggtattggggcagtgtggtggcgtatgataattccgtcaaacagaacgtcttaggcgttcctgcagaagttttagaaaagcatggtgcagttagcgaagagacggtgagatttatggcagaaggagttcgcaaattgaccaatactgattttgctattgctaccagtggggtagcaggacctaccggaggcactcctgataagccggttggcacggtttggatggcttgggctacgcctgttggcacctatgctgagtgcttccatttaggcttgaatagggaacaaatcacgacccgtgcttgcaccaaagccctcatccaaatgctccaaatcctaaggaaaattggttaattggctattgtatgctgtgctaccccgtaccattcccgtaccattcccgtagcactacctaggatgaagcaaggatgaagcaagggtacatttaggggtaggaggggcaagaggggcaagtattttccataaagtatatataattatacacccctcacgcgtgagcaggtagtatatatttataaaggtttactgattttacctgcccctcttgcccctcctgccccaaaagatttttattaaaaattgccatttttatttggaaatgttattttttttctgtaattttgcaagcagaaaaagaaataaaatagattatgaataaatctaacatactaaaaattaaagacacttcagttcgaacaataaaagttgggaaatgggactatatttgtattacagatatagcacgattaaagaaccccgcagagccaaaagatgttgttaaaaactggatgcgtgtaaaaaacacgattgaatatcttggcttgtgggagatgcttcacaatccaaatttcaaaggggtcgaattcgatccccttatgatgcaagccggcaccaatgcctttaccatgagccccactaggtggattgaactaaccaatgcgattggtattatttgtaaaacgggagcaactggtggcacatacgcacatagtgatatcgccttgaaatttgcaagttgggtatccgttgagtacgagttgtatcttgatatggattatcaacgtctaaaggcggaggagcaaaagctacttggttggtctataaaacgagaattgacgaaattaaactaccatattcatactgatgccatcaaggccaacttaattccacaatctattacggctaagcaagcggcttatgtttatgcggacgaggcagatgtattaaatgtagcaatgtttggtatgactgctaaagaatggagagaacaacatccagggcaaaaaggtaatatacgagattatgccaccattaaccaacttatttgtttgagtaatatggaaaatttgaatgctgttttcatagaagagcagatgtctcaacgtgatcggttaataaaattaaatcatatcgcgcaacagcagatgcaagtattggaagatgcaggagaacgtaaatttttgaccgaataacaaaaaaatatcccagtgtcatcaaattgtcacttttaagttgtacctttgcagacgaaacaaagaaaatactatggcaaaacaaattttaggacttgatttaggcaccaatagcattggttgggccgtggttggaacaaacgataaaaaccaaccaaatcacattgttaaagctggcagtcgcattatacccatggatgctgccattatgggtgattttgagtcgggtaatagttattctcaaacaggagaacgaacaaggtatcgtggtgtgcgtcgtatgtttgaacgccgtttattacgtcgagagcgtctttgcagaaccttaagtattttacaagcgttgccacaacattatgcgaagcacctcaatagacatggtcaactcaataagggcgtagaacctcaattagcatggtgtgatggacatttcctttttatggacgcatttaatgagatgtgtgcagagtttcgtgcagttcatccagaattatttgctaatggaaagacaatagcttatgattggacgatttattatttgagaaagaaggctttgtcatatccaatctccatgcaagaattggcttggatattgatgcaatttaaccaaaaacgaggatacaaccaagcgcgtggtgaagaggaagaagtaaaaacagctgagaaaaaagagttttattcattacgggttaaggaggttagagatactggtgaaagttctaaagggaagaattggtatgacgttgttttagagaatggatgggtttataaaagacaaagtcagtatccattggattgggttggtaaaactaaggactttatcgttactaccaaactgaacgaagatggtacagaaaagagagataaagaaggaaatattgttcgttcctttagagcaccggatgaaaatgattggacattaaggaaggttaagactgagcaagatattgaggatagtaataaaacggttggtgaatacatttacaatgctttgttgaataattcagatcaacggataattggtcaattagttcgtacaatagataggaaatactacaaagaggagttgtatcgtattattcgtaagcagatgacctattccccagaattgcaaagtccggagttgtaccaagagtgtatcaatgctttatatccaaacaatgatgcatatcgggagtctatcgcaaaacgtggatttgattacttactggtggatgatattttattttatcaacgtccgctgaaaagtaaaaagtcgcttataaatgaatgcccatacgaatattggacctataaagacaaagatggcatagagaaaaggcaatatcttaaatgtgtgcctaagtcccatcctgtatatgaagagtttcgtgtaaggcagtttgtaagcaaccttcatttatatacattggcagcaaatggcgttgataagaatgattgcacaagtcaatatataacggataaggaatctttagtagagcaattgctgatgagcaaggctattacagaaaaggctttactgaagttgttggctggtaagaatagtaaggacctatcttggaactatgtgccggagaaagaatatccaatggctcctgttacggctactttgagtcaacttcttaaagacaatgttgcacaattatcagaggaggtattggctgtttggcatattttatatagtgtgtcggataaaacggaattagagaaggcattaaaacactatgcagataaaaaaggattgtccgatgaatttgtagacaaacttaagaaacaaaagccatatgctgctgaatatggtgcttattcccttaaggcaacgaagaaattacttgccttaatgcgcagtggctgtaattggaagaaagaagatattgacaccaatacattacaaagaatagagcatgttctcacaggtgagtttgaccctcatattacagaacgggtgcgcgagaaatgtacttctatgcaagatgttcaagacttccaaggccttgaattatggcttgcagaatatgtagtatatggtgtaaaagaccattctaccaaatgggcaacgcctgatgatatagataattatattcaacacttccgtttgcattctttgaataatcctatcgtagagcaagtcgttttagaaacattgcgcacggtaagagatatttggaaacagtatggcacgttagatgaaatccatctggaaatgggacgtgatttgaagaatcctgcagacaaacgtaaacaaatgcaaaaacgcgctttggagaatgagaaaaccaatttgcgtattaaatatttattgcaggagtttatgaatccggatatggacatagatggtgctcgctcgtattctccaagtcagcaagaattattgcgcatttatgaagaaggcgttttgtcatctaacgtaataccagaggatattcaaaaaacaatagatgctttatcttctctcaagcagcctacgcatgcagaaattgtaaagtaccgcttgtggttagatcaaaaatatgtttcgccatatacaggacagattattcctcttgctaaattgtttacatctgcctatcaaatagagcatgttattccacaatcgcgttactttgatgattcgttaagtaacaaggtaatttgtgaagcagaagttaacgcactcaaagatagacaattggcgcatgagtttatctcacagcatggaggagagaaggtgacattaaccgggggaaaggttgtgaccatcttatcaactgccgaatatgagaacttgataaaaaagacatatgcctctaatagagccaagttagagaaactgatgttagatgatattcctgagtcatttattgcgcgtcagttaaatgatagccgatatattagccgattgataaaagggctattaagtaatatcgttcgtgaacaagatccccaaacgcacgaatatgagccggaagagactagtaagaatgtaatcgtatgcaatggatccgttaccgaccgtctcaaaaaggattggggcgtgaatgatgtttggaatcatattattctacctcgttttgagcgtttgaatcaattacagaatacatcggtctttacgacatataatagagaaggtcatttaattcccaatttacccattgaattaagcgttaataaaaaacgtattgaccatcgccatcatgcaatggatgctatcgtgattgcatgtactactcgtaatcatgttaatttattgagcaatttatctgctatgccggaacaacaagtcaatcgtatagccctaaataatctgttacgggaacgtatctcatttggtgatggtaagcatttggcgtttgataagttccttaaaccttgggagacttttacacaagaggtcgaggttgccctacaggagattattgttagtttcaagcagaatctgcgtgtaattaataagagcgttaatcattacaccaagatagaggatggtaagaaggttattaagaaacaaacaaatggcgacaattgggctattcgtaaatccttgcataaagaaactggctttggattggttaacttgcaaatgaagaagacagtaagtcttaaatatgcattggaacatttagatgccattgtagataaggatttacgcaagaagttgcgcgaattgctaaatgctggtaagaatgaaaaacaaataaagcaatattttgcatcagaaccggatgtttggtctgatatcaatcttcaaaagatagaagtttattactataccaacgatacggcagaccgctattatgccactcgaaccacggtggacgatacctttaatgctgatacgatagagaaggtaactgattccggcattcaaacaatcctgcgacgccatttagaagagaataataacgatcctaaattggctttctctccggatggtattgagaatatgaatcgagatattcaacggcttaataatggtgttcctcataaacctatttataaggtgcgcaaatacgagaaagcagacaaattcgcagtaggtacaatcagtgccaagagtaagaagtttgtagaggctgcaaaaggaactagtctatttacgtttgtctatcaatatattgatgcatcaaatgcgactaaacgcaaattatatcctatatctctgcaacaagttattcagtatcaaaaagaatttggaaataaattgtggatgcgaaaggcaaatgaagactttatggtgaaaggagagataccatcatgctatcaatttttattttgtctttctccgggtgatttagtttatcttccaaacaaagaggagcaacaatctcatcaatatgcatatgatcagaatcggatatacaaggtggtttcattagatggagagaatccaaattttatccctgcatcaattgcaacaatgataattgataaagttgaatttactactcataataaatcaagtagatcagttgaaggtcaattaataaaagaaacatgtattcctgttagggttgatagattaggtaatattattgcacaatgattaagcgagtgattggcttccaaaaccctgcttatctgagtttgaagttacagcagatggttattactttgccggatatagagaaacaagagaatatatccgacgaggtaaagaaagcgcatatccaaacaatcccaattgaggatattggtgtggtaatcttagataaccagcaggtgactattacgcaggcattgatggctgcattattagaaaataatgtggctgtcattacatgcaatgcccaacatttgcctattggcttgaatctatgtttagacggaaataatctacaaagcgaacgcttcagggaacaacttaatgcttctgaaccattaaagaaacaactttggcaacagacagtatcctgtaaaatagcagggcaggcatctgttctcaaatcagaaagcgttgaagcagctaatatgttggcatggagtaggcaagtgcgttctggtgatgcagataacttggagggtcgagcagctgcatactattggaagaatatctttcataatgcagggttcgtccgttgccaagatggtctccctcccaacaacttactcaattatggttatgcattagttcgggcaatgatggctcgtgctttagtggctgccggtcttctaccgactttgggcatacaccaccatagccgatatgatgcgtattgcttggcggatgatattatggaaccatatcgcccctacgtggatttagtagttttggatatatataaacgtgtatcggatatctctgaaatgactccgatgctaaaacgtgaattattggcactaactacaaatgatgtgcagatagatgggcatcgcagcccaatgatgatagctattcaaacaacggctaatagtgtacaacgttgttatagcggagaaataagaaagattatttatcctgattggtaaagcgcgtcttatgatgcgctttttttatatggatcgctttagtgaatatagaattatgtgggttctcgttttgttcgatttaccgacagagacaaagaaagaacgtaaaatctatgctcagtttcgcaagaaacttataatggatggttttactatgttccaattttcaatttatctccgtcattgcacaagtgccgaaaatgctgatgttcatattaaacgagtaaaaggaatgcttcctgaatatgggaaaattggcattttacgcatcaccgataaacagtttggagaaatggaactattcgattgccagaaaaaagccctattggaacagccaattcagcaattggaattgttttagaaaaaatatattgtatagtatacaaaaaatgcagccgaagttcgactgcattttttaatcctaaaacaacgtgtaatgttgtgattctcactgacatactataattaagttgttataggatatgtcaaagaccaaatttgaaggatatacacaactcgctgcctatggacttcaacagtccttgtgttgttataggatatgtcaaagaccaaatttgaaggatatacacaacgcaattctgcgctttaattcggt

SEQ ID NO: 1368 - DNA, 15973 bp, synthetic construct
  source 1..15973: mol_type = other DNA
  misc_feature 1..15973: note = Synthetic
tgaggtattccgggagctgaaggggtttgtgacggaagcacttccgggaatgatactgggtgtagggtcggtcatagatgcgggaactaccgcgctttaccttcagttaggggccgattttatcgtctctcccctggtcaatgccgaaatggcgcgctgctgcaaccgccgcaaggtggcctggatgccgggctgcggttcggtaaccgagatcagctacgcggaggaactgggagcggaagtggtcaagatattcccgggagcccaggtgggaggcccctcttttgttaaggccgttaaggggcccatgccctggagcagtatcatgcccacgggaggggtggcccctgaaaaagaggccctgaaggcgtggtttgatgccggggtacactgtgtgggcatgggaggaaaactcttccccgcaggtccggggggagattacgattacgaggcggtgaccggaagggtgcgcgaggtgatggatatcattgcagacctgagaaaataacgcatcatgagataccctgtagtatggatactgatcctgttgctggcctgctcctgcaaatccgaaaccggtcataaggtgataaagctggcacacggcctggacatgtcgcatcccgtgcataaggccatgcagtttatggccgacaggctccgggaaaaatccggcggtatgctcacggtagatatctatcccagccagcaactggggtcggagcgggagtgcctggaattgttgcagatagggagtgtcgggatgaccaaggtctctgccggcgccctggaaaattttgtgcccagcatgaaggttttcggcctgcccttcctgttccgggacgaggcgcaccgctttgaggtactcgaaggcagcataggcggggaactgctggatgccagtgtgcccaaacgcctgaagggacttgtcttttacgatgccggaagccggaatttctatacgcagaaacccatacgtactcctgatgatctcaagggactgaaagtccgcgtcatggaaagccagaccgcggtaaacatggtaaaaaacctcggaggttctcccacacccatcgcctggggcgagctttataccgccctgcagcagggaatagtggatggcgctgaaaacaatctgcccagcttttacctgtcttatcattacgaggtgtgtaaatactttatcatggatgagcataccgcgcttcccgacgtactgatgatcagtaccatagtctgggacaagctcagtgaacaggagaaaaagtggcttgaagaagccgcccgggaatcggctgcatatgagaaaaaaatatggaaggaagccgaagaacatgccctggaaaaaataaaggaagaaggggtagaggtcatttacccggaaaaggaggccttccgggaaagggtacagcccatgtacgatgcctttatgcaggaccccgaaatggaaaggatcataaagggtattcaggatacccgttgaagcgcggtgcacggagccggtatagcaaaccagcaaccggcacacaataaataatttactcgtatgaaacgaatacttaacaggctattgggaggatttctcgtaatactgatgggcattatggtgtgctccgtattatggcaggtcgtttcccgctatatcatgggctctccgagttcctttaccgaggagttgtcccgctatctgctgatatggctcggtattcttggagctgcttatgcttcaggacagcagcagcacctcgccatcgaccttctcggaccgaagctgagcgaacagggacgtatccggctcaggatagggatcaatatccttattgctctttttgccttttttgtccttgtcgtcgggggggcaaacctcgtgtatatcaattatgaactggaacagtattccgcagcgctacatgtaccgctttacctggtgtacacggtaatcccgctgagtggcctgttgataatggcctataagatcaacgaattgttcaatgcaaaaaaatacctgtcatgatatctgagatcctggtcctggtcattacttttaccgtacttctcggcatcggcgttcccgtagcctggtctatagggatctcgtgtatatgtaccatgatactgaccatagactcccttcccgcccttaccacggtggcacagcgtatggctaccgggctggacagcttttcactgctggcgatcccgttttttattctcgcggggcagatcatgaatcaggggggcatagccaaccggctgatcaattttgccaaatccctgatcggggcgcttccgggcggacttatttacgtcaatgtcatagctgccatgctgttcggggccatctccggatcggcagtagccgcagcctctgccatagggggcattatggcgccgagaatggaaaaggaaggatattcgagggaattcggggccgccataaatgtcacctcttccactacgggactggtcataccgccttccaatgtctttattgtctattccctggccagcggcggggtttccatagccgcgctcttcctggcaggataccttccgggcatccttatggggcttgccctgatgcttgcggcgacctactggatacgcaaaaagaaataccccgcaggagaacggagcagtatccgtacgatagccggtacctttctggatgcttttcccagcctgctcctgctcgtggtggtcataggaggtattgtttccgggatattcacggctacggaagcatcggggatcgcggtattctataccctgatcctgtcgctgatctaccgggaaatggacctgaaacggttgtatgaagtgttcctgagttccataaacaccacggcggtggtggccctgcttatcgctacctccatgagtatgtcgtgggtactgtcgtatgaagatatcccgcagtcggtaagtgaggtgctgctgagtatcagcgataacaaatatgtcattttactgatcataaacctcttgctgctggtggtgggtacctttatggacatgaccccggccgtactgatctttacgcccattttccttccggtactgaaagacctcggggtagaccccgttcacttcggtgtcgttatggtgatgaacctctgtgtggggctgtgtactccccctgtagggtcggtactgtttataggggtaggcgtggcgcggaccaccatacaaaaagtaatgaaaccgctgttgccgctttacctggtcatggccgtggtactgttgctggtgacgtttatcccccttatcagcctgtggctgccgggattttttgattgatgccggggaaagggtaacaggcggttatgcctgtagtaataaattgtaatttctgggaaatattcccatgccggatatggaaaaaaacagggttaccatctatgagatagcgaaagcgctgggcattgacagctctacggtatcccgtgccctgaacgatagcagccgggtaagccagaagaccaagaacaaggtgcttaagaaagccggggagctcggttatcagcgcaatatgctggcttccaacctgagaaagagccgggggaataccataggagtagtggtaccccgtattgcccgccacttcttttcggaatccatttcgggcattgaggatgctgccttttccgccggttataatgtactgatatgccagtcgctggagcagctggagcgggaacagcgcattaccgccaacctgatcgccaaccaggtagacggcatcctgatctccatatcgatggagagcaatgactgcgaacacctggattattttgaaaagcaccatatccccctggtctttttcgaccggtattgcaagagcatgccatccagcagcaaggtactgggagatgatttccgggcttcccgcgatgcggtggaacatctggtgcggaacggatgtacccggatagcccatctttccggtccgcagaaccttgagatttacaggaaccgcttcctcgggtacaaggcggccctggaacaccatatgctgccgtatgacgaacaactggtggtggtcagcaggctgatggaagaggacggatacggggtcatgaaagacttttacgaaaggaagacggctatcgacggggtgttttcggccaatgataccgcagccataggagcgatgaaatacctgaaggaacaccatatcggcattccggacgaaatagccctggtcggcttcagtaatgagccggtctcggaagtcatagaaccggccctgagtaccattgaccagtccggttttgcaatgggaaaaatagcctgtgaactgttgatcgaaaagatcgaaaaaagggaggaggtagagaaccgtaccataacgctggaggccagctttgtggaaagggcctcatcgcttcgcaaaaggaaggggtgagatgttttatacggattaaaagagagacaaaagatccatcggatcaccatcagatacaaacggagaataacctgaaaaacaaactgaagatgaacaagatcaagactactggagtaagcggtgtgcttaaaagatatggcgcacctatggtcatttcgggggcattgctttcctgtaatggcccgaaggaggctcccggactttccgtggaagtgtccaatgacctgggttttaaacgaacggaggtggtcgccatcccggtatcggaactgaatgtcccggaaggaacagacaggaaaaacctgcgtttgcgaaaagacggggaagaaacgaatctccgcacgcagtggatcgattacgaccaggacggcactgcggacgaatggttgttccaggccgatgtgccggccaacggaacggcgagatataccgtggtgaccgatagtgtaaacccggaacccgaaagcgatgtgatcgcctattcccggtttgtccccgagcgtaccgacgactatacctgggaaaatgacaaggtggccttcagggtttacgggcccacggggcagaaagaagccctggagggagtggttggaagtaccctgtccagcggcgtggacctgtggctgaagcgaacagacaggtcggtgatcgacagatggtatgccgaacatgtcaaagccccgggatattaccatatagaccacggtgagggctacgacccttatcatgtaggcgacagcaggggaaccgggggaaccgggttatgggagaatgacagtctttatgtgtcggaaaattatatttcacataacaccatagccgacggccctttgcgtacggtattcgaactgaaatacgccgcgtggagcgactacgatattgaagagaccaaaagggttagcctcgacctgggctccaatttttcccgcttcgacgtcagcctgtctgcggctggagatatccccaattatgccgtgggcatcactttgcacaagaacgaaggcgaacacaggatcaatgaggaagaaggctggttccgttactgggaaaccattgacgacgccaaagtgggggaggggatcgtgatggaccctgaggtaatagactccgcatttgcccgccagagcgacgtaccggaccagagcaatcttatcgtcctgacaaaacccggggataaggccaccttttatgccggttttgcctgggagaaaagcgggcaggtatctgctgtggcagactgggacgccatgctgcaacggcaggccgaaataatagcaaatcctcttgaagtgaatgttactgtaaaatagggtaataggtacagtacgacagatacgtcccggaggttcttcaactcctctgtgcttcgttcagaatgacaggtattgtcacaggcgcagtggaacttgtcattccgacgataggagaaccccgaagggctcaacgcagttaaatctattttgacctgtcatgttgttgaagctcctttaggccagggttgagattcttcacttcgctgcgctacgttctgaatgacatttaaaataccaacgagctctacttcctgattgccggcagcagtttgttggagacttccccgaaaccgatacggacgttctcattgcggcagtacccggtcagggttaccgtatcgccgtcccggaggaaggtcctttcggttccgtcgttcagtttcagcgggtttttgccgccccagctgagttccagcagcgaaccgtagctgtcgggggtagggccggagatggtgccgctgcccatcaggtcgcccgaattgacattacagccgtttatcgtatggtgggccagctgctgtgccatggtccagtacatgtatttgaaattgctccgggaaatggtctgcgcctgcccgttttcgggagtgagcgatacttcgaggtgaatatcgtagcttttatgaccttcacagcgcaggtagggaagcggttgcgggtcctgttcggggctggccacgcggaaaggttccagggcatccatggtcacgatccacggcgacatcgacgaggcgaagttcttggccaggaaaggccccaggggtacgtattcccatttctgtatgtcgcgggcactccagtcgttaaacagcaccatcccgaagatatagtcttcggcctcgtttaccggaatgggttctcccagcggattggcatcggtagtgataaagcccatttccagttcgaagtccaccctttcggacggaccgaacccgggggtatcggctcccgggggaagtgtttgccccagcggccgccgtaccgggatgcccgagggaactatggaagaactccttccgtggtagcctaccgggagatgcagccagttgggcagcagtgcatgatccgggtcgcggaacattttccccacattggtggcgtgttccttgctgctgtaaaaatcggtatagtcaccgatctgtaccgggagctgcatttcgatctcatcgagggtaaacagcactacgtgcctgtgtttttcattatctctcagcctggagttttcggtatcaaacaattctgctatgcggttgcgtaccagccgccaggtcttctttccgtcggaaataaagtcattgagactgtcctggagaaagatgtcatcggtaaggggaatgccgtcgaaatatcccagctggtgcagtgctcccaggtctatggcggtgtccccgatacgcgtaccgatggtaatcacatcgtccctggtgagaaacacaccgaacggaatgttctggatgggaaagtcggagtccggggctacctgtatccatgatgttctgttggggtcattggcagtgataggcataataaaattgttgatttatgtttgataaaattgtattcaaagatattattttcgctcaatttaccgaatgtatttgttatttttggcttttcttaacgaaagttgttaatggagcgggaatgactgcccctggtacgtgtgaacaaatggtgtaaacaccgggccggaggcgggattaaaaggcaggcggtaccgtaaacaggaacaggattattgaactttgaacttaaaataatgcaacgagacgaacagatttttgaactgattgaagccgaaaaggaacgccagttacacgggctggaactgatcgcttcggagaatttcgtaagcgggcaggtcatggaagcggccggttcggtactcaccaacaaatacgccgaagggtacccgggaaagcgctattacgggggatgcgaagtagtggatgaagtagagaatatagcgatcgaaagggcaaaggccctgtttggtgccgagtgggtcaacgtacagccgcatagcggatcgcaggccaatacggcggtatatcacgcctgcctgaacccgggagacaagatcctcggttttgacctgtctcacggcgggcaccttacccacggttcgcctgtgaatttttccggtaaactctataatcctgttttctacggggtagatgaagaaaccggtacgctcaattacgacaaaattgaggaaatagccaaaaaagagcagcctaagcttattattgccggggcttccgcatattcgagggatatagacttcaagcgcttccgggagattgccgacagcgtaggcgccattctctttgccgatatctcgcaccctgccgggcttatcgccaaaggcatactcagcgaccctgtgccgcattgccatatcgtaagcaccaccacccacaaaaccctgaggggccccaggggggggatcatcatgatgggaaaagattttgaaaacccgttcgggattaccctgaagaacggcaagccccggatgatgtcttccctgttagacagcgccgtattcccgggaaaccagggcggtccgctggagcatattatcgccgccaaggccgtagccttcggggaagcccttaccgataacttcctccactatgtactccaggtacgcaagaatgcacagaccatggccgcactgttcgtggaaaagggatataaggtgatcagtggcgggaccgataaccacatgatgctgatcgacctgagaaacaaggatatatcagggaaggaagccgaggaagccctcgtaaaggccgatattacggtaaacaagaacatggtgccgtttgacgataaatccccttttgtcacttccggtatccgtatcggcgcttcggccattacgacccgcgggcttaaggaagacgatgtaaagaccgtagtggagcttatcgacgaggtcattacccatcacaccgatgaagcagtgatcgaagacatacgcgaaaaagtaaacaaactgatgaaaaccaggccgttgttccagtggtaagcggtttttgcagtacactatttatggaagggttaccggataggtagcccttttttttaacggtatagaataaccgtgttcaacggggacaaagaccggtacgggagctctttatggaagatatggagatcagctatccgaggggaagaacagtaggaaaagggcagtatccggaataccgggcatttaagggccgatgacaccggtttgattttcagggaatgcaggaggtgtgaaaaaacgagctaaaccagaaatatgacagataaggaattggacacattgcggaaccagttgtccgtagcatcgaaaaacgggatagattttatactggcaggtatcatcatctgggcggtcatcgctttggtatggaccctggattacgatcccgggaccaaaagcatcttcgcatttattgcaggcgggccattgctccccctggcctttttattttccaggatactgggtaccaactggaagatcaggaacaaccccttacaacgcctgggattgtggcttaactttgcacagcttttttattttcccatccttttttatgttttgataaaaaccccggactatttcatcatggtctatgccattattaccggggcacacctctttccttattcctggttctataataccaaatggtatgccgtctttgccgggattattgccctgggaagcctgatcatcggtttatataccccgacaggtacattttacagcataggcatgtttaccagtacctgcctgtgcatcttgtggcttctgctttttgccgaccagaaaaggaaaagggggttgctaaaccaataatgaaacttccctgaacacatttgcctgattgttacttttccgtttcaggtgcttataacacatttacaaataaaaacgaggcaaacttgcgaatgccccgggtaaatttttagctcacaagtctttccattgttatacaatggtgttcgtgaaacatttgggcataaaaaaacctcctgattatggacaagaggtaacccaaatgttttcacaacggaataatccttattgtgaattgcttttcaaaaaatttgtgcagctaatatataaaaaaataatttatcccgcatgtggttttccgtaaacagggtgttgtttttttgcttatttttagaaaattaatttttcataccggctttttatgcgaaaaaagcagggttttaaaggatattgactatactaatcgtattaccgtttttaattatgaagagaattttaggattggatttggggaccaatagcataggatgggctttgattgaacaggattttgagaataaacaaggacaaatactcggactgggaagcaggataattccgatgagtcaagatgttttgggagatttcggtaaaggaaattctatttctcaaactgctgaaagaacaggttatcgcagtgtaagacgattgagagaaagacatttacttcgaagagaacgactgcataggattcttaatattttgggctttcttccaaaacattatgcttcacaaattgattttgaaaaacgtttggggcaattttttaaagaaaccgaacctaaattggcatggaagcagaacgataaagataaatttgaatttttattccaaaggtcttttaacgaaatggttgccaacttcaaggcaaacgggcaagagataaaaatcccttatgattggactatttattatttgcgtaaaaaggcattaactcaaaaaatagaaaaagaagaattggtttggataatcctgaatttcaatcaaaaacggggctattatcagttaagaggcgaagaggaggaggaaaaccccaataagctggtggagttctattctttaaaagttactgatgtaaaagctgatgaggagcctaacaaaaaaggagaaatatggtattcattaatccttgaaaatggttgggtttacagacgctcaagcaaaacagatttatctgattggaaagataaagttaaagattttattgtaacaaccgatattaacgatgacggttctgtaaaaacgaataaagatggagaagaaaagagaagttttcgtgcccctaaagaagatgactggactttaatcaaaaagaaaaccgaacaagaaattaaccaatcccgtcaaaccgtaggaacatatatttacgaaaacctgcttcaaaaccccaatcagaaaataaggggaaaattggtaagaaccattgaacgtaagttttacaaagatgaactaaggcaaattctgcaaaggcaaattgaactgcaacccgaattatttaccgatgatttatacaatgactgtgttcgcgaattgtataggaataatgaggctcaccaattgcagttaagcaaacgcgattttgtccacttatttttaaacgatattatcttttatcaacgtccactaaaaagccaaaaatcgtccattgggaattgtccattggaatttagaacattcaaggatgaagatggaaatgagcagatagtatacctgaaagccattccaaaatccaatccctattatcaggaatttcgagtttggcaatggttgtataacctaaaaatttacactaaagaggatgatactgatataacggttcaatttatcaatggaattgaaagtttggaaaatctttttgaatttttaatgagtcgaaaagaggtcaatcataaagatattttaagctattttattgtaccaataataaaagaaaagtttccagacgcaaaaggtaaagttttaaaaaatgaaatttccaaagaaataggaaaatatcgttggaattacgtctatgatacggataaagatgaatccaagaattatccgatgaatgagaccggatacgaaattagaagacggttagggaaagttgaaggtgttcctgaagatttcctgtcaagagaaatagagcaacatttatggcatatcatttattccgttaccgataaaattgaatatgaaaaggctctacggtcttttgctaataaatatgcattaaatgaggaatcttttattgaaaactttaaaaagtttaaacctttcgatagtggttatggcaggtattctgaaaaggccattaaaaagctgctgccctttttacgcattgggaaatattggagttgggatgctattgatgagaaaaccaaagctcgtatcggtaaaattatcaccggagaatacgatgaagaaataaaggatagagttcgtgaaaaagccatccgcttaaccgaagaaaatcattttcagggattgcaattatggttggctcaatacatcgtttatgatcgtcattccgaagccaatgttgcaggccaatggaattctgtaaccgatttggagcaatatctgaaagatttcaaacagcattctttgcgcaaccctattgtggaacaagttgtaacggaaacactacgagtggtaaaagatatttggaaacaatatggaaaaggtgcaaaaaattattttgatgaaattcatatcgaattaggtcgggacatgaaaaatccggcagatgaacgtaaatatttgtcgagcattatttccgaaaacgaaaataccaatttacgtataaaagcgatactttctgaattgataaatgataactcggtagaaaatgtgagaccatattccccgatgcaacaggaagcgttaaaaatatacgaagacggtgtgcttaattctggtattgccattcctgatgagatcgaaaaaatcagtaagaaatcagaaccgacaaggtcggaaatccaacgctataaactttggttggaacaaaaataccggtcaccatatacgggcaaacctatcccgttgagtaaactatttacttctgcttatgaaatagaacatgttattccgcaaagtcgttattttgacgacagttttagtaacaaagtaatttgtgaagccgaggtgaacagcctgaaagataaacaacttggactggagtttattaaaaatcattacggacaaaaggtaacaacaagttcgggggaggtagaaattttttcggaagaagcatatacaacttttgtaaaagagcattacgacaaaaacagaggcaagaaaaacaaattgttgttggacgaaatacctgagaaaatgattgaacgccaactcaacgatacccgatatattagcaaatatgtgtctaatctgttatccaatatcgttcggacagaaaagggtgatgaagggataaattccaaaaatataatcccgggcaatggaaaaataacggggagactaaaacaggattggggattaaatgatatttggaatgatttgattttacctcgttttgagcgaatgaatgaactgacaaaaagcaataattttacctcctggaatgaaaaatatcagaaacatttacccactgttccgttagagctttcgagaggctttcaaaagaagcgaattgaccatcgtcaccatgctttggatgctttggttattgcctgtgccactcgtaaccacgttaacttgctgaataacaaacacgcaaaatcaaaaaatgaacggtacgatttgcaacatacattgcgtaacaaagaaaaatggcaggataaaaatggaaatgaaagagacaaattcactgaatttaaaaagccgtggaacaattttactgtcgatgccaaaaatgaattggaaaaaattgtggtgagttttaagcaaaatttaagagttatcaataaggcaaccaattattacgaaaagatcataaacggtaaaaagacaaaaattgaacaaaaaggtctgaattgggcaatcagaaaaccaatgcataaagaaacggtttcaggattagttgatttaccaagaataaaaatgcctaaaggaaaaatcctgacagccactcgtaagagtttagatatgtcgtttaattcaaaaaatattgaaagcataacggatacgggtattcaaaaaatattgataaatcatttggaaaagtatgatgaacccaaaattgaagttgaagagaatgatgtttccggaaaaattttaaaaagaaaagaactgatcaaaaagaagaaattgattgaacaccctgaattggcattttcgccggaaggtattgaagatatgaataaaagaattacccaatacaatgatggaaaaccacatcaccccatactaaaagtccgggtttttgaagtaggtagtaaatttcaagttggttacaaagggaataaaaaagataaatatgttgaagcggcaaaaggaacaaacttgttttttgctgtctattgggatgaaaaaaaacaaaagcggagctacgaaactattccgttgaatattgtcattgaaagacaaaaacaaggactgacttctgtacccgaaactgatgaaaaaggaaatagactattgttttatatttctccaaatgatttggtgtatataccaacggaagaagaacaggaaaatataggtcaaattgattttaataatttcagtaaagaacaggttaggaatatctataagatggtaagtagtaccggtgcggaatgccactttgttcaatcccatattgcttctcttattaaaaactatgatgcaaaaactaaaataggagaatttgggagtttaaataaatcagaagtgaatatagagaatactacacgaataaaggaacattgcatcaaactcaaagtagatcgattaggaaatatatcaagagcataaaacaattttttaaacaatgacccatacactcccaatatccatcaccgcagaagtatatgcctgcaaggctatgattatgcacagccgggattgtattttataaccctatgtgttcggagccgggaacatatattcggagagatagaaaacagaagaatgatcttaaacccctaagggcagatcgtacatgaggaatggctgaatacagcgaatataagagataacatggccttacatgaatttaccgtaatgccagatcagttttcatgccatcattgaaattcgccccaaccgccccaacggaaataatcaaaaaaatcagattttaagatctggcaacgcaattattacgaacacattatccgcaaccctcaggcatatcaccgtatatcgcaatacattaaaaataacccattaaatggcaggaggaagataaataccgtaaaaaatgattaaccaacctaataacctttaattatgatcaagcgaaccatttatatcggtaatccggcatatctgaaattcaaggaccggcagttaaaggttatcgaccctgaaaacaaggaagaaaaaggatctgttccggtagaggatatggctgttctgatgctggataattaccaggtaaccatcagccaccagcttattgtggccctccaggggaacaatgtggccgtgatcagttgcgatgcccagcatttgccgtttgccatgatgctgcccatgagcgggcatgtggaacattccgaaaggcttaaacagcagatcaatatttcggaacccttgcgtaaacaattgtggaaacaaaccgtggaagccaagataagccagcagatgttattgttgaaaaagctccggaagcctcacgaaccgctggtggattatatgagccaggtacggtcgggcgacagtaccaatatggagggcattgccgcacagtattactggaaacagttatttgaaaattttacccgggaaagagaaggggatatgcccaacaatttcctgaatttcggatatgccgtattgcggagtatcgtggcgagggccctggtaagttccgggttgaatcccaccctcggaatttttcaccgcaacaagtataatgcgtattgcctggcagatgatattatggaaccctaccgcccttatgtagatctggcggtataccggtggatggaagaacacccgggagaaggaaaactgaccagggaagtcaaggctgatctgcttcaactggcgacctgtgatgtgatgatcatgcaaaaactgcgtccgctgatggtggccgtaagcagtactacttcttcgctgtataaatgtattaccggcgaattgagaagcattcgctacccggtgatatactaaaattaacgggaggatggaccaacatcgttttaacgcttaccggattatgtgggtactcgtattttttgacttgtagccttccctcttttaggacaccgctaaattcgataaataattattatttagttcagatttgatgaagaattt

SEQ ID NO: 1369 - DNA, 15972 bp, synthetic construct
  source 1..15972: mol_type = other DNA
  misc_feature 1..15972: note = Synthetic
atattcaggtcgaagaagcccgaataggtcagcacctcgggacgggcaccgcttgccggcatagggaacagttgcaatgcattcctgtaatgcactgcggcacgacgtgcctcctcggcattgtcgccatcggctttgtttatcacaataccgtcggccatctccattattccacgttttataccctgcagttcatcaccggcaccggcaatctgtataagaaggaagaagtccaccattgaatacacggcagtctcgctctgtcccacgcccacagtctccacgaatatattgtcatacccggccgcctcgcacagaacaatcgtctcgcgcgttttgcgcgccacgccacccaaagagccggccgaagcactgggacgtatgaaagcacgtggatgtgccgacagacgctccatccttgtcttgtcgcccagtatactacccttgctgcgctcactgctggggtcaacggcaagcacagccaatttccccccggtatttgagagcagatgcataccaaaggcatcgatggaagtacttttaccggcaccgggaacacctgttatgcctaccctgagcgaattccccgagtatggcaagcacctctccaccacctcctgtgccatagcctgatgctcgggcaacaaactctcaagcaatgtcacggcacggctcagtactgtcacatcaccacgcaaaatgccctcgacatactcatctaccgacaactgtgcagcccttttccgtctcattgtcgacagataggggttcaccgccccaagcatctccacgccgtcattgaccttaaggcccttgtattgctcattgttttcgggatgttccataacaaaagaatttcttcacatgcgaagataggaataaacaagcgaaagtatatacaaagagataaaaaaatacacattgcctgttaccatataattataataggttaggcaaaaaacataaaaattggacggctgattgataagctgtccaatttttataaaagtctcttaattctatggaattagaaattgtaagtcactgtaagacctgcattacaaaaaccataactatttaaggtcaaagtattgccactgatatttggaccaatacaaggtgaatagtctataccaagagttacaggtgctttagcgaatgtaaaactgagacgtgccaaaccctgaacaccgcagtaaatccatgatgggccaaaaccggcattggcaccgacaccggcatcaaaattccaaataccggcactaggagtccagttcatctctgcaattttccagttgtttattacagaaacatctgcaaccaaaccatttatataacccaaaccgacacgtccctcaagatagcacttactgctgtaatcatacatggcaagagcttgaactgatgaacccacacgtgcaccgactttccaattctgagcaaaggctcctgttgtaaacaaagtaaccgccgcaatgagcaagaactttttcataatgcttttcataatactttatttttttaattttacagctacaaagataacaatattatcttaaaataattatcttaacaaaaaaaaagtaaaataacacaaaaaaggttcccaaaatcaatcgggaaccttatttaatatataaatggtatgtattaaagcacaccgttcacaacaagcgcctttacaagagagtagaatttctcgactgtcggaatctcaacacgctctgtcggagagtgaggagacatcaatgttggaccgaacgataccatatccatctttggatagttggtagagatgataccgcactccaaacctgcgtggataacacgcacgtcgggcatcttgccgaacatgtcattgtacgcattcttcaatgccgccaacaatggagagtttacatttggctgccagccgctgtaaccgccgctgagttcaaccttcatgcccgccattgcaaaacagcttgagagctgcagtgcaaggaactccttcattgtgtcgcaagaactgcgcgcaaggatattgatttcggccttaccctcaccaatcttcacgatagagaggttgcttgatgtctcaacagtgtcggggattgttgggatgaaacgcagtacgccatcgtgacaagcaaggatagcgtcgagcaaattgtcctgtatctcctgtggcacaacagtctcgggcatctcggcctcgctcactgtaatggtgataccctcctctattgtagcatactcgctgttgtagagagcctcgtactttgcagcaatctccttgagctcgtcgatagcctcctcgggcaatgtgagcacaacctcgcagcttgcagggatggcgttgcgcatgttgccaccgttccagcttgcaagcaccactgcaagttcgtccatagcctcacgcacaaagcgtgccataagtttgttggcgttaccacggcctgcgttgatttcaagacctgagtgaccgccacgcaagcccttgagctgaacgcgcacagcaacatcggcatcgtcgctctcctcgtccatgaactccattgaagccgagatgtcgagaccaccggcacaaccgatgtagagaacaccctcctcctccgagtcaaggttcaggagaagttcgccctcgagctcgccgcccttgagaccgaaagcaccatacatgccggtctcctcatcagcagtgatgagagcctcaagaggaccatgctgcagcgaagcatcctccatgattgccatgatggcagcaacgccaagaccgttgtcggcaccgagtgttgtgttgtcggcatagagccagtcaccctttacgacagttgtaatagggtcgttctcaaagtcgtgcttgctgtcgggagtcttctgtggcaccatgtccatgtgtgcctgcaggataatacccttgcgattctcaaggccgggagtagcaggtttgcgcatgatgatgttgcctgcctcgtcctgccatgtctctacattgatgctcttaccgaagtcgagcagatatttctgaattttctcaaggtgacccgatgggcgtggcacctgtgtcaacgcctcaaagtgcttccacacctcgcgtggctgaagatccttaattgttattgccataattgaaaaatgttaattgttaatatttatacctttaattatttatctttttgtttgccctcatagccctgaactgcaatgcagcaatgccatacaggccaagaaccgcaacgagcaatgtctgggtactgtgtactatcaacgcaaaaacctgcgcatcggttggcagtacgccatataacagcatcatatttatcaccacatagtgccatggaccggctccgttcggggtgggcacaaccaccgcgatgctgccgcctacaaaaagcaacaggccggccgcaagcgaaaggtcgctgctgaagtcaaaacagaagaaacagagatagaactgcatgaaatagcagaaccatatacccacggtttcaagcacaaaaagccatccgttcttcatccttttcaacgaaagcattccctccataaaacgcgaaatgaacgacttgaactttttccatattgccagtttgcgcaacacaaaatagcacaacgccacaacggcaagcaacgacatcagcattatcatccatccacgtggtgaggatagcatcgcacctcccggcatctgaacgcctgtttcgcccaggaactcacagaacacaggccactgcagagcaacggccacagcagtaataagcaacaccataagagtgtcaagcattctctccatcacaagtgttcccaatgaatgggcaaaaggaatatgctcatgcctttcgagcaccacacagcgcgacacctcgcccacacggggcagcaccaggttcgccgcataggccacgtagaccgagtccacacatgtggcagccgaagggttgtaccccagcggagccaatgaaagcctccatcgccagccccttataacgtggctcatgatgccaaagaacacagtgacggcgaaccagtaaaggttcatagtcctgagttcgctccaaagctgcgaaaaatcaaaatcatcgtacaccatatacagtatgagcacgcccaacagtattggcaacacggtttttaatgtagaattgattaactttttcacaactttaggaacatttttaatagttttggttaactttgcaacattgcgatagtacaatcgtgcgcaagcaccatcgcaaagataaaataattattgaagaaaaactgcttttttaagcattattaaataaaaaagcgaatggcgatgaaggaagtaacggcaaaaaaaagattaggacaacatttcctcacagacttgtccattgcaaagaggattgcagacactgttgatgtatgtcccggcatccccatccttgaagtcggacccggaatgggcgtactcacccgtttcctgctcgacaagccacacctcctgaaggtcgtcgagattgacgaggagtccgttacctatctgtgcaacaacttgccacagctgcaggaggagaacatcatccccgacgattttctgaagatgcacctcgaccgcctgttcagcggcgaacaattcatgctcaccggcaattatccctataacatatcgagccagatattcttcaagatgctcgactacaaggagttcattccctactgcagcggaatgatacagaaggaggtgggcgagcgccttgccgccaagcccggcaccaaggcatacggcatactcagcatcttcatacagctgtggtacgatgttgaataccttttcaccgtcgacgagaatgttttctcgccacctcccaaggtaaagagtgccgtagtgctcatgaaacgcaacgagcgcacaagcctcgagtgtgacgaggagctgttccgcaagattgtaaaggcgacattcaaccaaagacgcaagaaactgcgcaactcgatacagcagattgtgggcaaggaatcgccgttgctcagcgaccccatcctcgacaagcgccccgaacagctgtcgatagacgattttattgaattaacgaacaaggtagaacgcaacttggcataaaagcagagatttatgacacaggaattcatcaatcacataaaagagctgatagagaaaaaggactccgtgctgctgcaggaggcagtgtcaaagctgcaccctgccgacattgccgagatttgccttgagctcaccaccgagcaggcgcgtttcctctaccgccagattgacaacgagaccgcagccgacgccctcattgagatggacgaggacctgcgtaacgaactgctcgaggaactcccgtccgaggccatcgccaagcgcttcgtcaactacatggataccgacgacgccgtcgagattatccgtgacatggacgaggagaagcaggaggaggttctctcgaacctccaggacattgagcttgccggcgacattgtagaccttttgcagtacgacgaggacaccgccggtggtctcatgagtaccgagatggttgtcgttaacggcaattggagtatgcccgagtgcctcaaggagatgcgtcagcaggccgaggaactcgatgacatctactacatctacgttgtcgacgacgacgagcgcctttgcggcctcttcccgttaaagaagatgattaccagcccatcggtgtcaaaggtaaagcacgtgatggacacacaaatcatcagcgtcgacgttgacacccccatcgacgaggtcacaatgctcattgagaagtataaccttgtggcaatacccgttgtcgacaaaatcaaccgccttgtgggacagattaccgtcgacgatatcatggacgaggttcgtgagcagaccgagcacgaccagcagctcaccgccggtcttacccaggatgtggaaaccggtgacagcgtcttcctgcaaaccaaggcacgcctgccatggctcatcataggcatgcttggaggtatctgctcttcaatgctgctcaactgcttcacctccacactcggcagccaccccgagatggcactcttcatccccctgcttgccggcatgggaggtaatgtgggcacacagtcatcggccattgccgtgcagggattggccaacaactcgctcaactccagccacatgttcaggcacattctgaaggagatggttgtggcaataatcaatgcaaccatactgtcgctcatggtatatgtatacaacttctttgtatatggccccacagacatagtaagccttgccgtaccgttaagtctctttgtcgtagtgctttttgcatcaagtttcggcacactcatccccatggtactcgagaggataaacataaaccctgccgttgccacgggaccgttcatacagattatcaatgacctcagcggtatgaccttctacatgataatatcaatggcactgagcaaaataatgttataacaccaatgaaaaagagaaacctcataacaacatttgccgccatcgcggcattgttgttctttacaccttgcgtttcaaacgcacagatacaggaattcaacaagtggctcaaagccccgcagggcgagcttgccgaccagcattttgcaaccaagaagctcaccaaggccgactgtgacgaggctgcaatcattgtcgactcgctgtggctcaggaagagtgccaaggagcttggcccacagtggcaacgcatgaccatcacccacgactccatcaagctcgcctgtgcaacccgcgtgttcggcctcactcccaaggacggccgcagcctctacatctccatgcatggcggcggcaactgccccaaggaggtcaacgacgagcagtggtataaccagatttacctttacgagccgctcgaaggagtatatgtcgcaccacgcgcaccatggaacacatctgatttatggcaccgcgagggactcgacgaactgctcgaggatgtcatcagagcctgcgtagtattcgagggcgtcaaccccaacaaagtctaccttcttggctactcggccggtggcgatggtgtgtggcgccttgccccacgcatggccgacaagtgggcagccgcctcaatgatggcaggccaccccggcgaagcatcgcaggtaaacctcatcaacaccccgttcatgatttggatgggcgagaacgaccactactacgaccgcaacatccttgcaaaggaaaaggcacaggtcatggactcgctcagcgccgcacaccccggcaaatacccccacagcaacaacatcatcaaggataaaggacactggatggaccgtgtagacaccgttgctttgggctggatggcacagtaccgccgcgtcccctaccccaagcagattgtatggcgtcaggagtttgtcacacgcgaacatttctactggctcagcgcccctgccgatgaggtggagcagggaaagaccgtcattgcaaacatcgacggcaacaccatcaacatcgagcagtgcgactacagcagactcaccatctatctcaacgaccaccttgccgaccttgacaagaaggtcaccatccgctacaagggcaagaagattgcacgcgtgaagccacgccgcacaatcgccaacctgcaccgcagcctcaacctgcgcaacgaccgcagctacgccttcccatgcataattgatgtggaatttaaataacgacaaaaaagcaaaaagggctaaaaagcctacaaaagcctttttttcttgaaaaattaaaccaaatcttaaaatatacattatatttgcagaaatagcaaagccgcattgcggcaatgtgtcatcctgaacatacgtgaaggatctcctttttttgactttaagagatttttcgcgatgctcaaaatgacactttttgcgttgtattttttataaaccccaaaaaattaaagaatgagcgaaagtattaaatcgaatgtacaacccgaagagttgaacattacgagtactcctgatgaggctgtcaacgccgctacgactgagtttacagagcagaacagcatcaacgaggagactccacaagtatcagtagaggatgcagcaaatgaaaccgaagtagcaagaccggcaagccgtcaggaaatcatcgagcgtctccaggcgattgccgagagcgacgatgcgctcaacagcaaggccgaggtcgaggcactcaaggtacagttctaccgcatgcgcacagctgagattgaagcagccatcaaggagcacattgcccagggcggcgaggaagcactctttgttccacagcccgacgagcttgaagagacattcaaacagcaccttggccagataaaggcaaagcgcaacgcatggttggctgcacaggaaaaagagatgcaggataaccttgagaagaaactgcagctcctcaaccagttgcaggaacttgtagacaaggcagcgcaaggcacccccgaggtaaacgagttccgcgcagtgcaggcagcatggaaagaaatcaagaacatcccacagagccaggtagcaccactgtggaaacagtaccagttgcttggcgagcagttctatgacgtgctgaagattaaccacgagttccgcgaatacgatttcaagaagaaccttgagaccaagacaatgctctgcgcacaggccgaggcactcacccaggagaccgacgtcattgcagccttccgccagttgcagcaactgcacaacgaattccgcgagataggccctgtagcccccgacttgcgcgaagaggtttggaaccgcttcaaggctgcatcaacaatcatcaaccgccgccaccaggagcacttcgaggccaaaaaagagaaggagcaggagaacctggacaaaaagacagccatctgcgagcagattgagcagatggacttctcaactctcaccacctaccaggcatggaacaccgccacacagcaagttctcgacctgcaggcagcatggaaagagataggctttgcaccacagaagatgaacctcaagattttcgagcgtttccgcgcagcatgcgaccacttctttgttgagaagagcgagttcttcaaggaagcaaagagcacccttgccaagaacctcgaacgcaagaaagagctttgcgaacaggccgaggcactcaaggagagcgaggactggaaagcaacagccgacaaactcaccaagctgcagaaagagtggaaagagattggcgcagtggcacagaagcactccgaggcattgtggaagcgctttgtcagcgcatgcgactacttcttcgagcgccgcaacgcagccacatcgtcacagcgcaacgttgagcaggagaacctcaagctcaagcgcgccgtaatcgagaaaatcaaggctatcgacaccaccctgcccgccggcgagcagaccaagcagttgcaggcactcacacaggagtggaacagcataggctttgtccccttcaaggagaaggacaagctctacaaggagtaccgcgaggcaaccaatgcactctatgacaagctccacaccagtgccaacgagcgcaagcttgccaacttccgcaacaacatgggcaagggcggtaacagcctgcagcgcgagcgcgaccacctcatccgccagtacgaggccatgaagagcgagattgcaacctacgagaacaacatcggtttccttagcgtatccaacaagaaaggcgccagccttgtcgacgtaatgcgccagaaggtcgagaaactcaagcaggacgcgcagataatcctcgagaaaatccacctcgtcgaagacgaaatagaaaaagaggcaaagtaaataactgtctcacaagcagacaaatcaatccttccacttgtagaaggattgattttttatatctattactgcacaaaaaaaaggcgaagcttgcgctccaccttgaatgttttcacaacggaataatccttattgtgatttgcttcatttagttcagcaaatatagcacatttatttggaattacaataatcattggctatttttgtgatatgacataaaaaaatcacgatgaaaaggatattaggtttagacttaggaactaacagtattggttgggctgtattattggcagaaaagaataatgacagttttcttttgaagagaattgaggcggccggtagccgcatcattccaatggacgctgctattctcggcgatttcgaccgtggaaatactatctcgcagactgcagaaaggacacggctacgaggagttcgacacctgatagaacgatgcatacaacgtagagaacgcctacatagggttcttgacactattggtttcctacctgttcactattcacaggcactaacccgttatggcaagataaaagatggagaagagcccaaattggcttgggtaaaaaacgaaacaggcaaataccatttcctgttccagagttctttcgatgagatgttgcaagactttaaatcgcaacatccagactttagagacaagaaaataccatacgattggacaatttattatttacgcaagaaagctctgactcaaaagatatcaaaagaggagttggcttggattttattaaatttcaaccaaaaacgcggatattaccagctaagaggagaagaaaaagagactgacaagaataaaagaattgaatatactgccttaaaagtagtatctgttgaatattcaggagagaagaaaggaaaagatgtatgttacaatgtccatttggaggacggagggatatacaggcgtacgagcagcgtctttttagattgggaaggcaaaaccaaagaatttattgtcacaacagatttgaatgatgacggcacgccaaaaatggacaaagagggcaatgtcaaacgctcataccgctctcccaatgaggatgattggacacttgtcaaagaaaggacgcaatcagacatcgagcgttccggcaagactgtcggcgcatacatatacgatacgattctccaaaccccaaatcagaaagtacgaggcaaattagtacgtacaatagaaaggaatttctacaaggacgaacttgtccggattttagaaaaacagacagagtttcacaaagaactacaagacagagaattataccgggactctatagaagaactgtatccaagcaacgaagcctacaggcagaacattgcaaacagagatttcacttacttgttcgttgaagacattttattctatcagcgccctttaaagacaaaaaaatcgttgatagacaattgccaatacgaaggatataccgttattgacaaggaaacaggcgagaaaaagagctacggtataaaatgcattgcaaaatcccatccgctgtatcaagaattccggctttggcaattcatatgcaatttacgtatctacaagaaaggcttgagcaaagacgaggatgttacaagagaattcttgaggaacgaagatgattatgtagctttattcgattggctgaatgacaaaaaggagctaaaccagaaagaatttttgaaatgccccacattcgggataaagaaaaacgctgaaagctatcgttggaattatgtagaagatgacaaaaagaaatatccctgcaacgaaacccacgcacagatactatcatatctatccaaagccaatgtagaacccgatttcctgacagcggaaacagaagaatggttatggcatatattatattctgtagaagacaaacaggaactgacaaaagcattgcaaaaatttgcagatacatatagtttgggggattctttcaccactacattccagaaatttccacctttccagaaagaatatggtgcatattctgccaaagccattaaaaagttgctaccattaatgagaatgggcaagtattggtcacagacaaacatagacaagaagacgcttgaaagaattgacaggattatcaccggagaatatgatgagaatataaagaaccgcgttagggaaaaggcatttaaccttacaaatatatcggatttcaaggcactaccgctttggcttgcctgctacattgtatacaaccgccattccgaagctaaggatgttacaaaatggcatactcctgaagacttgcaaaggtttttggactcattcaaacaacactccttgcgcaaccctattgtagaacaagtcataacagagacccttcgcaccgtacgggatatttggaagaagtacagcaatattgacgaaatacatattgagcttgggcgtgaaatgaaaaatcctgcggacaagcgtaaaaagatgacgcaacaaatcttagagaacgagaatgccaacctgcgcatcaagacattattgatggaatttgcaaacccggaatttgagattgataatgtacgcccctactctccaagccaacaagaaatactccgcatatatgaggatggagtcctgaactcaacaaacaacctcccagaagatattgaaacaattctaaaaaagttcaaggagagcgacacaaaaaaacaacctactagaagcgaagtcttaagatacaagctatggttggaacagaaataccgttcaccatacacaggtcaaccaataccattggcaaaactattcacacccgcttatgagattgaacacattattccacaatccctttatttcgacgactcgctttcaaacaaagttatttgcgaatcagttgtaaacaaacgaccatacaaagactatcaactaggatttcaatttataaaaaataatcaaggtcgtattgtacaagaattatcaacaagcaataagactgttaaaatctttacgattgatgaatacgaacaattcataaaagacaattacagcaataatcgctctaaaatgcgtaaactcatgatggaaacaattcccgatgagtttattgcaagacaacttaatgacagccgatacataagcaaggttattaaaggactattgtcaaacattgtgcgcgaagataatgaagaagaggctatatcaaagaatgttattgtttgtacaggaggagttaccgataggttgaaaaaagattggggaatgaacgatgtttggaacagaataatattaccacgtttcttgcgccttaatgaaattacaggcaccaatcagtttacaacaacatctaccaacggacacgaaattccgtcaatgcctttagaactgcaaaaaggattcaacaaaaagcgtatagatcaccgccaccatgctatggatgctattattattgcatgtgcaaatagaaatattgtaaactatttgaacaacgaatcggcaagcaaaaactccaagatttcgcgcgatgacttaaaggcattactatgcgagaaaagcaagactgatgaaaatggcaactataaatggattataaaaaagccttgggagaatttcactaaggatgtatataatatattaaacgaaatcattgttagttttaaaaagaacctacgcatcatcaataaagcaacaaattattacactcattttaaagacggaaaaaaggaacaggttgaacagacgggtaccaattgggctatacgcaagccaatgcacaaagacaccgtctttggcgaagtaagtttgcgcaaagtaaaaactgtttcattaaacgaagccattaagaatccaacaagaattgtagaaaaggagttcaaaatcaaactacaatctttgttgaaacaaggttgcgatgcaaagaaaataaaaaaattctttgaggaagaaaaagatgtttggcaagatataaacctttccaagatcaaagtatactactttaccaaagagaccaaagacagatactttgctacaaggaaaacattaacagatttatttacgtcggccattaatgaaaagaaagaagacaaaaaaattaaaaaggcaaaagagctaatagaaaagataaccgacgaaggaatccaaacaatattatttcgccatttagaacaaaaaaacaataaccctgaacttgcattttcaccagacggtatagatgaaatgaacagaaatatcgtacaattgaataatgggaaatatcaccaaccaatattcaaagtacgcgtatatgagaaaggtgacaaattcgctataggtaaaaaaggcaacaaggcatctaaatttgtagaagcagcaaaaggcactaacctgtattttgctatttatgaaaccgaaaaatgggatgattcagttggtacatataagaaagagagaaaatatgagaccattccattgaacattgttatagaaagattaaaacagggattatctccggcaccagctgacgaaaaaggcaacgagcctaaatttgtattatcgcccaacgatttggtatatgtaccgacagaagaaaacgaaataaatatcaacaatgctaaaatctataaattcgttagttgcacaagtaacgaagcacattttgtgccaatatctatcgcaagtcccataatagagacaatagaattaggtagcaataataaagcacaaagagcatggagtggtgaaatgataaaagaagtttgcattccaatcaaagttgacagattaggtaatattactaaaatcggttaaaagatgacataatacgctatatattaacctctaaaacttcagcctatgataaagaaaacactgtattttggaaatccagcgtatttatcattgcgcgatgcacagttagttataaaactacccgagattgtaaagaacaaaactttacccgagagtttcaagcaagaaaatgaagttacaaaacctattgaagatattggtgttgtagttttagacaataaacagattactataacatcgggattattggaatatttacttgagaacaactgtgcagtcattacctgcgacagtaaaagcatgcccacagggttgatgttgccactatatggcaacacaacccaaaacgagcgtttccgccaccagatagaagcatctttaccattaaagaaacaactatggcaacaaaccataaaagcaaaaatagaaaatcaggctgcgatactaaagaaatataccaatactgaagttaggtgcatgaacgtttgggctgccgatgtaaagagtggagacacagaaaatatggaagcccgcgctgctgcatactattggaaaaatctatttccaatagataatttcacaagagaccgtgaaggcactccacccaacaatttgcttaactatggctatgcaattctgcgtgcagtagtagctcgttcgctggtcgcaagcggattattgccaacattaggcattcatcatcataaccgctacaatgcctattgccttgctgatgatattatggaaccctaccgaccttatgtagatgaacttgtatataaaataatagtcaggggcattgattataacacacttaatcgagaacttaaagccgaattattgacaatcccgacattagatgttgtaatcaatggcaaacggagtccgctaatggtcgccgtgggacaaacaaccgcatcactctataaatgctttagcggagagttaagaaaaatttcttatcccgaaatataagaatgaaacgtttaagtgaatatcgtattatgtgggtacttgtcttgtttgatttaccgactgaaacaaagaaggacaagaaagcgtatgccgatttcagaaagaacctgcaacgcgacggtttcacgatgtttcagttttcaatttatgctcgccactgcgcaagcagtgagaacgccgaggtgcatataaagagagtaaaatcctttctacccgagtttggcaaagttggcataatgtgcataaccgataaacaattcgggaatattgaacttttctatggaaaaaaagttgttgagcccaacacacccggacaacaacttgaacttttttaaatgcaaaaatccagtcactcacaatgactggattttttaatcggaaaactttttattttctaaattgctttgtaaatctttacaacacaaacacttatacaggttgagttgtttccgatatgtcaaatatactaa

SEQ ID NO: 1370 - DNA, 15916 bp, synthetic construct
  source 1..15916: mol_type = other DNA
  misc_feature 1..15916: note = Synthetic
ataacattcatcggctacttccccgaagaaaatcccgaatatacgtgtatctgcatgattaaccatcctcataactataaggcatacgatgccggatgggactgcggaagggtagtgagagaaatagccgaaaagacaatggcttacgccggtgtctatgtgcttcagaacggacagaaagtatggactaaaacaagataaagactatgaaactgagcgaattgatacaagacatccgtcccttgcaggtaacgggggatgctgataaggagataacaggcatcgcgtttgactcgcggaaagtggaagcggggtatctgtttgtggcgcaatgcggtacgacagtggacggacaccaattcatccagtcgtgtatagacaagggtgcagcagccgtagtctgcgaacgaaccgaaggtttcaacgccggtaatgccaccgtcatccaagtgcagagttccgaccgtgcgttaggtctgttggcatcccgctggtacggctgtccgagcaggcatttgactctggtaggcgtgacaggcaccaatggcaaaacaacaatcgccaccctcttgtaccagttagtgcgccagatgggcaagaaagccggactgctctccaccgtggtcaattacgttgacgaagaggccgttcccgccacccatacgacacctgatgcactcgagctgaaccggctcttggcacagatggtggagaaaggatgcgagtatgcctttatggaagtgagcagccattccatcgcgcaagagcgtatagcaggattggattttgacggtgcactcttcactaatctcacccgcgaccacctcgactaccacaagaccttcgacaactaccgcgacaccaagaaacgtctgttcgactcgctcaagaaaaacgcctttgcacttaccaacaaggacgacaagaacggaatggtaatggtacagaactgcaaagcacacgtgttcacctattccacacgtgccttggcggactacaaaggtatcatattggaagaaggattggacggtatgctgctccttatcaacaataaagaagtgatggtgcgtctggtaggccggttcaatctgcagaacctgctctgtatctacggcgcggctctttgtttaggatttgacaaggacgagacgttacgtgttctttcgcttttacagcccgtcaacggacgcttcgaggctatccatagcagcaaaggctggacggcagtagtcgattatgcccatacgcccgacgcagtggacaacgtgatacgcaccatcaacgagatacgcaaaggcagactcattaccgtagtcggctgcggcggcaaccgggacaagggcaaacgtccgcagatggcacagatagccaaacaaggcagcgaccaacttatcctcacttccgacaacccgcgtgacgagaacccgttggacatactaaaagatatggcggctggacttacagaagacgaactgcggcagacacttataatcgaagaccgcgcttctgccatacagaccgcctgcacgcttgcgcaagacaaagacgtcatcctcattgcgggcaaagggcacgaggactaccagattgtcaagggcgtaaagcaccacttcgacgaccacgaggaagtaaagaagtatatataaactatgataccggctgacagacaaatcaaatacccaatatagtatgttatacgaactttttaataatcttagcgggatacccggggcacgactgatgacctatatctccttccgcgccataatggcgggagtcatcggactggtgaccagtctgtggttgggcaggtacttcatagacctgatgcgccgcaaacatatcagcgaaacgcagcgcgacgagaaacttgacccgtttaacgtgggcaagaaaggcgttccgacaatgggcggactggtcatcattgcaggcatattagtggcggtactgctgttcggcaggctgcacaatatctatctgctgctgatgattatcaccactcttcttcttggcgcattgggtttcgccgacgactatatcaagacgttccgccacaacaaggacggtctgaacggctggataaagatagcgggacaagtgacgcttggtctgatagtcggcttgacgttgcgctacagcccagccgccgtgatgaacgaaacagtcaccacccgcgtggaaaacaacatcacatacgtcgagaaaacacccgatgtcaagtccacccgtaccactatcccgttcgtcaaggcacacaacctcaactacgcggatatgttcacgtggctcggcgaagagaacaagtaccgcgctggctggatattctttgtgctgctaaccgtcttagtagtagcggcagtgagcaatggcgccaacctcaacgacggcatggacggtatgtgcgcaggcaattcggcattgataggtgtggcacttatcgtgctggcctacgtgagcggcaactacgtctgggcggactattttgacgtgatgtatatccccggcagcgaagagttggtagtgttcctcggtgctttcgtaggagcgttggtcggattcctttggtggaacggcttccccgcgcagatattcatgggcgatacgggcagtcttaccataggcggaataataggcgtgagcgcagtgattatgcacaaagagttgctgctgcccattatctgcggcgtattccttatggagagcgccagcgttatcgtgcagacgcaggtgtataagttctacaagaaacgcgggcagcacgtgcgtgtatggaaacgtacaccgctgcacgaccatttccgcacctctatcgaacaagtcatacgaatagaccccacctgccagatacggctgcgcgggtcgaaagagttgcatcacgagacaaagattgtgcttcgtttctgtatcgtgacattactattggcggcatttgccatcttaaccctaaagataagataaacgatgaagaccgaattgatagttgtattgggagccggagaaagcggaacaggtgccgctatactggctcaggcgaaagggaaggatgtatttgtgtccgactcgggtgccatcaagcccgcctacaaggctctgttagatgccaatcatatcgcttgggaggagaacggccatacgcccgagaagattctctgcgccgacgaggtcatcaagagtccgggaatccctgagacggcaccgctgattgtgcaactgcgcgaaaagggcataccggtcatctccgagattgagtttgccgcccgttatacaaaagcgaagatgatttgcatcaccggctctaacggcaagaccaccaccaccagccttatctacgacatgctgtgtcgtgcagggttggatgtcggcttggcaggcaatataggcaactcgttggctctgcaagtggctcggcaagaccgcgcttactacgtcatcgaactgtcctctttccagttggacaatatgtacgacttccgtgccgacatagccatccttctcaatatcacgccggaccacctcgaccgatacaacttcgagttccagaactatgtgaacgccaagttccgcataacccgcaatcagaccgggcgcgacgcgttcatctattggagcgaagaccccgtgattgaccgcgagatagcccgcatacagccctgtgccaccctctatccctttggtagcacagagaaacataatgtggcttacaccgatggcgcgcacctcgtggtggcagcacacaaagaggtggaacccttggagatacctttggagcaacttgccctgcaaggcaaacataaccaactcaattcgatggcagcctccatagccgcccaattgctcaatataaagaacgacaccatccgcgagtccctacgctgtttcgcgggtgtgccgcatcgcctgcaatatgtggctacggtcaaaggcgtgcgctatatcaacgacagcaaggcaaccaacgtcaattcctgctggtacgcccttgaggctatgaccacgcctaccgtacttatcctcggcggcaaagacaaaggcaatgactacagtgagattgaccggttagtgctcgacaaatgccacacgctcgtctttatgggactccacaacgagaaactcatagagcatttcgccgctctcggctacgcagacgggaatacagccccgcaagcggaacggaagtacttcagcacccacaacctccacgatgccgtgatggcttgtgccgactcggcaagggatggagatacggtactcctttcgccctgttgtgccagtttcgacctcttcaactcctacgaggacaggggcgaccggtttatgaacgcagtaagacacctttaattgacagaaaccatgacgtttgaattgaagaaacatccttacgtggaccgcacattctgggtactttatttcatgctgcttgcggtggcagtcgtggctctcttttctgccaccagttcgcttgtctttgacgatggcaacaccattctcggtcccgtagggcgtcagatgatatttcttacattgggctgtgtcctggcgtatgcggtgcaattcgctcccacgcgtttagtgacgttattaggctatcctctctttgctgtcgcgctgatattggtctattcgcttctgtggaagggcaatccttttgccgtgtccatcaacggagcggcacgttggattagattaggcatcactttccagcctgccgaacttgccaaactgggtctgctcatcgtggtagccgacctgctcaccaaagggcagaccgaagaggaaaagcaccgttatttcctatggacaatcgggttgacggtggctacttgcttcccgattatggtcagcaacctgtccactgctgttctgctggcgggcatcgtcttcctgatgtggatattggctcgtgtgccgtggaagaagatactgattgtggctgctgtggcacttgctgccggtgcgggtgtctatttgataggtgaactcttctatgtgcgcccgggtagaaaagcgacgggtatgtttgcgcgtgtcaccgtttgggcgaaacgtgtggacgactttatcagcgagaagaaacagccggacgatgccgagttcaaactcactgacgacaaccgccaacgctccatcgccaaagtggcagtcatgcgcgggggcaagacaccgttaggagtagggcctggcaatagtcaggagcgtgactatctgccacttgcctacgaggactatatctttgccattattgtcgaagagtccggcatcataggggctgtcttcctcatattcatttaccttgctattcttttccgtgcctgttttgcttccacgaagttctatggtgaccagcgggctatgcttactgtgatgggattggcgttgatgattacctgtcaggcgtttgtctctatggcggtctcggttggtctgggacctgtaacgggacaaccactgcctatgatttcgcacggaggtaccagtgctattgtcaccagtctctatttcggtatcattatgggcgtcagctatgagcaggaatctatgcgcgagcggcagcacctctcggcggtggaaagcgagaatgatgctcccgtcatcaacctctcacccgatcccgtctaataaactcctaaactcctaaacacctaaactaataaaccaataaactaataaacaactcctaaactcctaaacacctaaacacctaaacacctaaaccaataaactaataaacaactcttaaacacctaaacacctaaacacctaaaccaataaactaataaacaactcctaaacacctaaacacctaaacacctaaacccaatataaaccatgaagtaccttatttcaggcggaggaacgggcggacatatcttccccgcagtcagtatagccaatgcgttgcgcgaagcagatcccaacgcggatattctctttgtcggtgctctcggacgaatggagatggagcgtgttcccgaggcgggttataagattgtaggtctgcccatacgcggcttcaaccgttctcagccttggaagaacgtgtccgtgctcatcgaccttgcccgctcgctgcggcaggcgaagcgtattgtacgcgatttccgacccgatgtggctgtcggagtagggggatatgccagcggagccgcaatgaaagcggcagcgtgggcgcatgtgcctgtcttgttgcaggagcagaacggctttgcgggtgtcaccaataaactgctgcggaacgatgctgccaagatttgcgttgcctatgacaatatggagcgtttcttcccggcagacaagattctgctgacaggcaaccctgtccgtgccaatctcacgcaaggctcacccgacaaggcgtgcgcgtacttcaatgaacagttcggggtgcagttcaggcaggaacgtcccacgctcctcatcatcggaggaagtctcggcgcacgaaccatcaacgagagcattctccaagggcttgaccaactgcttgctgcggacatacaggtggtttggcagaccggcaaggtctattatgacaaatgtgcgcaggaagcggcaaagattctgcccgaagagcataacaggttggtcataacgcctttcctgaacaatatgcccgatgcttatgcactggctactgtggttatttcgcgtgccggagcatcgtccatatccgagttgtgcttgcttggcaaagcgtctatacttgtgccgtcacccaatgtggctgaagaccatcagactcacaatgcaatggcgcttgtcaggcaggacgctgccgtattggtcaaggatgccgatgcatcgctcagactggtgccgactacgctgcggctgatggagaaccctgaacaatgtgccgcactgcgtacccatatcctcaagcttgcccagcccgattcggctcgccgtatcgccgaagaagttatcaaacttgtccccaagcactaattatggcatattatttgcatgatttgcaaataaccggtacttttgtgcggttgaattagtaacaaacctaaaacaaacaattatgatttccaaacgtttagaggacgctattaacgcccaaatcaatgccgagatgtggtcggcatatctctatctcagtatgtctgcttattgtcaggacaaaggttatgccggtatggctaactggttcgctatccagttcaaagaggagcaggaccacgcgcagattttctacaattatctcatcagcaggggcggacgtgttctgctcaaggctattgacgcagtggaaaccgaatgggcttcaccgttagcggctttcgagcatacctatgagcacgaacagcatgttacgtcgcttatcaacaaccttatgcacattgctgttgaggagaaggattatgcagctcagagccgtctgcagtggttcattgacgagcaggtggaagaagaggagaatgctgtagagattatcaacaaactcaagatgttggacggtaatggctacggtctctatatcttggaccaggagcttgcagcccgtgtctataccacgccgtcacctctcgctgcaaaagcataaggcagcataaggcagcatcagtagcagcgtaagtagcggcataaggcggcataaggcagcataaggcagcgtaagtagcagcatgaggcagcataagtagcagcgttaggcagcatcagtagctgcgtaagaataacgcatctttcaatagcaattagagcgcaaagggtcaatcccttgcgctcttttgtatgtaggcagcaacaagcaagagagattatgaaattattatgtgattattatgttattattatgttattattatgttttcactaagtttttatacagactttatacagcttttattatgttcgtaagcaaaccacacaatacccacacaacaataccctcactgttattacacgtgcagcgaatgtgaccgtttctcggcatcccccatacggaagagcagtggcagaagatggaggatgccggcgcggtgttcttgcccgctgctggctatcggacgggcgatgatggttcgtacggcacatactggtcttccacgcaggacggctcagaccgaacgtacaaactctattttcacacgtcacgcctcggtccgcagtacggtagttaccgctacctcggtcgtagtgtgcgcctcgtgcgggttgtgcagaatagacgggtctcctatacaacctgcaagacacaataaatcaccccccgcatagcaataccacacacagaacgggctgacttgcattcaagggaaaatcttaataatcggcaataattttacgcatataaaccaacaacgcactctcattcgggagtgcgttgttggtatggttacaatgtggattttattatctccataaaatgaagaatctgttcgcttttgcgtggttcaaagagcagatgctcaaaatcacgctgcttggttttgaggtctgtatgagtgacggtctcttgtagttgctccaataattgtgcctcgttttctatgccgtggctgtgcttcaggaattcataatccggtttcgtgcgttgccataagaaaagcgcatcgtagaaatcacgacccttctggcgggtcaacagagccgatagtttcattgaaagaagaatgctgacaggaggaacgggaacggggaaataaaaacctaagcggctgattgtcgccatttctcgcggataactgataccttggtcttgtgcttcaatcttcattaagaaccgttcttcccgatgacctgttagttggagcgagaagagcagttctgggaaatagacattccgacggaaagcagtcaagtttgaattctctttgtcgcgcggttctaccgtcaagccttgaagcgtcagatagcgaatcaagccgtctgtcatttggatgaaatcttctttgctaaggttcttgcaatcgaaatccaaatcctcggagaaacgatcaataccatgaataagtcgcaaattcgtgccgccgataaaagtcaacttgtccgaccatgccgactgagaaatccattccattgctaaacactcaatatactctttgagcaaatgcttctgaatgttggcattattggctatctgcggcggataaaaaccgcgtatgtatgttaaatcaatcatatcccgtatgtctttaatatgatttttattctcttggtgagtatcggacttccgatgcggttggagtattcaagcaatcgttccttgtctaactcattttgcataaagtcttcgtccaagcgcaattcacgcatttcttcttccgttgaatactgcggatagagatagagcaaatcaattagcgccttttcaggcgtggctaacatataggtctttccgtcagacatctgcttcggctcatagccccaaaacagagaaggcttgattgtttggtagctatagcacgcaaagatattctcaaactgtgtcgttttgcacgtggtaatactcgtaatggtcaccaccgcttcgggtatcatcccgtagaaggacaaagcggtatgcaggctgatgtaggaaggggcatagatttttgatgcaaaatagcgtgcataatccggcttgttcatatagtccgcaaacgcgtaccagccctgccgcaacggaacaatatagcctgctttctgccattcagaataattccggcggttaaacatcgggtgtattgctctcacttgtgatgtagaaaaacaagccaaatgatgccactgaatgtaaaacgattgataggtcatatatgttcgttttatttctgtaatgtgataaaattatcacacaatagaaacaaatccgcagcaaaagtactgctaatagttgaagtgaacaatagaaattcagacattatatatgttgatatgccaccaaacaaacaaattttgcatttttcttctcagttatttgtataaatgcaaaaaaagcagtatctttgtagccgtcttttcgggtcgaaaataaagtgtgtaattagaaaaataaagagatagtgtcatgaaaaagaaaattctcggtttggatttgggtaccaatagtattggttgggctgtagtgaataacgaaaacaatcgaaaaaacatttcacatgcaggtagtcgcattatccctatggacgcaaagttgatgggagattttgaaagcggtaattccatctctcaaacggcaactcgtactgctgctcgaggtgcaagacgtttgtatgaacgtcatgcactgagaagagaacgcttaaaccgagttttgtctattcttggttttcttccaattcattacgtgtcagaattaaaccgatacggacaattgaataagggagcagagcctaaactggcatggaaaattgatgggggaaagtatgtgttcttgtttttcaaggcattttcagaaatggtaactgattttaatgctattcatccggaattgttagaaaacggaaagaggattgcatacgattggactatttattatttacgtaaaaaagcgttgacacaacctattgataaacaggagttagcttggatacttcatcaattcaatcaaaagcgcggctacaatcaagctcgtggagaggaagaagaaagcaaggttaacgaacgaaaagaactaatcactcaaaaagtaatttctgtgcgtaatacaggtgaagtctccaaaggaagaacttggtatgagattttacttgagaatggattaatatatcgcagacaaagcgcatatcctctggattgggaaggaaaaacaagagattttatcattaccactaagttgaatgatgatggaactgaatcaaaagataaagaaggtaatattaagcggtcaattagtgctcctcaagaggacgattggggacttcgcaagattaagacccaacacgatattgatgcaagccataaaaccgtcggagagtttatctacgatgctttgctacataatccggatcaaaagattattggtcagttagtacgtgtagttgatcgtaaatactataaagacgaactaaaacgcattcttgatactcaaaagcagtttattccggaattgcagaacgaagatttgtataacgagtgtattcatgcgctttatccgcaaaatgaagcttataggaatagtattgcaggcaaggattttacgtatttgctgctaaatgatattatcttctaccaacgcccgcttaaaagtaaaaagtcattaattaacgaatgtccatacgagtatcatgtatataaggatgaagatggtaaatggcaaagacaatacttgaaatgtatctcaaaatctcatcctatttatgaagagttccgtttatggcagtttgttgaaaacttacatatctatagagaggctgccaacggaataggcaaagaagattgtaccgcagaacttattgctaacaaagtggatttaatctcttggctgctaacacaaaaagaggtttcagaaaaatctctattaacgcaattagttggtaaaaataagattaaaggcttgtcatggaattatgtatctgaaaatgataagaaatatccggcagcccctgtaacatccactataacagccgttctaaaagaggcaggtggagaagtctcaacttccgaaatagaacatatatggcatatattgtactctgtttctgacaagtctcaactgcttgcggctctcaaacattatgcagagacaaaccttctgtctgatgtgattgtagagaaattgggcaaacagaaaccttttgccgccgactacggagcctatagcgaaaaggctacgcgcaaactgctgaacttaatgcgttgcggagagtattggagcgaagaagcgatagatgctcaaacaaaatctcgtattgagcatattttaacgggagaagtggatgattcggttagtgagcgcgttcgcgagaaattggacacaatgaatgatgtaaaagattttcagggacttccattgtggcttgcggagtatgtggtttacgatgtgcgcaagaacgataccaaatgggagaagccggaagatatagacaagtatcttcaatcattccgtttacactcgctcaataaccccattgtggagcaagtcgtcatggaaagcctaagaacggttcgtgatatttggaaacaagaaggtcaaattgatgaaatacatatcgaattaggtcgtgatctcaagcaaaatgctgagcaacgcaggaaaaccatgctacgccagcaggagaacgagaaagcaaatttgcgtgctaaattacttttgcaggaatttatgaatccagagatggatgtggaaggagttcatgcctattcgccgagccagcaagaactattccgcatctatgaagatggtgttttgtctgctaataaaccggatgatgatacacagcgtattatcaatgagttatcgtctctcaaacagccatcgttacaggatattaagaaataccgtttgtggcttgatcagaagtatgtttcaccatacacaggtgaaattattccattagctaaactctttactccggcataccagattgagcatgtcattcctcaatcgcgcttctttgacgattcgatgtccaacaaagttatttgtgaggcagaagtaaatgcacgtaaagatcgcatgttgggacatgagtttattactcaatgtggtggagagacgattacgctttcaggaggaaaagtggtacaaatattgtctctacgagcgtatgaagatactataaaaaagaattttgctggagatcctcgcaagcaagaaaaactgatgttggatgagattcctgagaagtttgtcgctcgacaaatgaatgatagccgctacattagccgactgatgatgcagttactcagcaatattgttcgcgagaaaattagcaatacggaatatgagccggaagcagttagcaaaaatctgattgtttgcaacggaacgacaactacgcgtctgaagaaagactggggtataaatgatgtgtggaataagattattcttccgcgttttgagagactgaatcagatacaaaacactacggtttttactgccaaaacggcaaacggccatattatcccgaatgtacctttagaactcaaacaaggatttgagaaaaaacgtattgatcatcgccaccatgctatggatgcgatagttattgcatttactacgcgcaatcatgttgcattattgagtaacgaatccgccttagataaagatgaaaaagcacgttatgacctgcaaacattgctgcgcaaacgtgaagtatggagaagcgcagatggtaaagagcattataaatttacagattttatcgctccttatgacggtttccagaaggatgtgcaagaaacgctggaaaatatagtggtaagcttcaaacagaacttgcgtgttatcaataagagcaataaccatttcgttcattttgtaaaagatgaagaaaccggcaaacttaaaaagaaaagagatccacaaaagaaaggcgaaaactggtcaattcgtaaatctcttcacaaagcaactgtttttggagaggtcaatctgcgcaagcagaaatatgtaaatctaacatacgcgctccagcacgtagaagatattgtagagaaagatttgcgtgcaaaactgaaggaattgttgcaggaaggcaaaaacgaaaagcaaatcaaacaatactttgcctctgagccggatgtttgggcagatgtgaatctaaaacgtattgaagtttactattataccaaggatacaaacgaccattactatgcggtaagaacggccttggatgattcctttacagaagattacatccgtaataaagtaacttcggaagctatccagaagattctcttggcacatttagagcgttgcaataacgactcgaaattagcgttctctccggatggtattgagaaaatgaatgcagacattcaggctctcaataacggtgtaccccataaacccatatttaaggtgcgcacgtacgagaaagcagagaaatttgctgttggtcaaataggtgcaaagagcaaaaagttcgttgaggcagataagggaaccaacctgttcttcgctgtttattctacaaagatggaagatggttcagaaaaacgctcttttgttactataccgttcaaagctgctgtggattgtcagaaacaagggaagaaagaatggcgcacatggttagacaaatggatacatgacgaaaatcttgtagccgaggatgcaaaattaaatttcatcctttctccgggagacttggtttatgtgcccaaagcagataatacatctgaaatggagagatcaaggatatataagtttgtttcgtcaagtgatacggatgcatattttattcctgttgcagttgcatctcctattatcaataaagtagaatacactcaattgaataagatatcccgtatttgtgcggaagaatcacttataaaagaaatttgtattcctattaaagttgatcgtttgggaaatatcgttgcacaatgataaaacgcgtcttatgtattgagaatcctgcgcggttgagtctcaagttagcgcagatggtggtcgagttgcaagatgtaacccgcactgtgcctattgaagatataggcgtagtcattcttgacaataagcaaatcacgattactcatgcgctcattgatgcgctgcttgctaataatgtggctatcattaccagcaacgacaaacatcttcctgtcggtttggtgcttcctttagacggacacaacttgcagagcgagcgtttccgtgaacaaatagatgcctctgagccgctcaaaaaacagatgtggcaacaaacggttgttgccaagatacttggtcaggcacatgtattaggtatccagcatattgagcatagcaatatgctgaaatgggcgaaagaagttcgttcgggggatacggataatttggaggcacgcgctgctgcatactattggcgcaacgtgttcgagaacgaagagtttgtccgtgattcggaaggtttgccgccaaacagtttgctcaattatggttatagtatagtgcgtgccatgatggcgagagcattggtaggagctggtttattgcccacgttgggaattcatcatcatagcaggtatgatgcttactgtctggcagatgatattatggagccttatcgcccgtttgtggatataaaagtacaggaaatgtggaagaaaggaggtttaacgaacgacatttcttctgaacacaaacgcgaactattaggtgtaactactatggatgtaaacatttccggtcatcgcagccctatgatgttggctatccatactaccgcacaaagtgtacaaaaatgttattcgggagaagcaagaaaaatcatataccctgattggtaattttgttattttattttgtatgtcattcatggctgtggtgtaattcattcaagttgtgtatgtcattcaaaaaaagtaaacgataaggtctaaaacaataaaagtacaatgactgatctgtataatatcagttgtgtatgtcattcaaaaaaagaaaacgataaggtctaaaacaatcggacaataagtctgttgtatttacgttctgttgtgtatgtcattcaaaaaaagaaaacgataaggtctaaaacaatcttttagtaaacttaactatttactattagttgtgtatgtcattcaaaaaaagaaaacgataaggtctaaaacaatcctttgcgccgtaattcaagaacaaacaatgttgtgtatgtcattcaaaaaaagaaaacgataaggtctaaaacaatctcatacgtcattatgtctatgagtgcgacgttgtgtatgtcattcaaaaaaagaaaacgataaggtctaaaacaatctttttgcgcgctaattgtttatttaggctgttgtgtatgtcattcaaaaaaagaaaacgata

SEQ ID NO: 1371 - DNA, 15915 bp, synthetic construct
  misc_feature 1..15915: note = Synthetic
  source 1..15915: mol_type = other DNA
acaggatgtcgtgaaatcgtagtcccatattctttttataaagtgatatcagactatctatttttctttacctctgttgttcttctcttgcaatatgtcaatgaactctcccattctctcgaacggggttgcaaaggtaagaacatttttatcaataccaaattattttgtgaaaaatatttcgactatatttataatcgtcccaaaagtactctgccacagcctgtttgcatttttattgcgcagagagtatctttgggtgattaatagacaaatacaaaaccaaatcatatatggaaagcgaaatcaagcagggcctgccggagaacgcaggcagagagctgaaaccgggagaaaagtacacccctattcttgaacccggcaaaaaacctacggaggtaactgtatattcagttgctatgggaattcttatggtaatcatcttctcggcagcggcagcctacctgggcctcaaaataggtcaggtatttgaagctgcaataccaatagcaataatagccgtaggtctcaccagtgcgctcaaaaagagtggaggcctcggccagaatgtgattatccaatctattggaggcgcatcaggcgctgtagttgcaggtgccatattcaccctgccagccatatatatattggggcttgaggtcagtttcatgcagatgttcctatcgtccctgttgggaggagtgctgggcatcctcttcctgattccgttcagaaaatactttgtaaaggagatgcacggcaaataccctttcccagaagcaacagcaaccacacaggtgctcataagcggagagaatggaggtgccagtgcaagaacacttgtcatcagcggtataataggaggtctgtacgatttcataatatcaacattcggagcatggagcgaaaccctcaccacaacggtgacatcgtggggcgcaacagttgccaccaaggcaaaactcctcctcaaggtgaataccggagcagcagttctggggctgggatacataataggtcttaaatatgctttcataatatgctgcggctcgttcctggtatggctggtcataattcctctcatgaacataatatggggcggtgacatcattgaccttatgaacacaggcaccattacccagacaattggagagatgtctccagagatgatattcaagacatacgcaaggcatataggaattggaggcatagccaccgcaggcataataggaatcataaggtcgttcggagtcataaaatcggcagtatcccttgcagttggtgaattctcaaagaagagcggcaagagcaatgaagcggttgagcgcaccgatgaggacattcctatgaagagcatcgtctttggaataatcatagcactcctctgcatctttgcattctttgcattcggaggcgttgttgaaaatgtttggcaggcccttgtagggctcctcatagttgcaattatctcattcctcttcaccaccgttgccgcaaatgcaattgccattgttggaagcaaccccgtaagcggaatgacccttatgacacttataatagcctctctgattcttgtagcagttggtctgaaaggaaattcaggaatggcagccgccctcataataggtggtgttgtatgtacagccctctctgttgccggcagcttcatcaccgacctgaagataggttactggataggctcaacgcctaaagttcagcagaaatggaaattcgttggaacagttgtggctgccgcaaccgtatgcggagtgatgcttctgctcaacaagacatacggttttaccggtgacaatgcgctggtggcacctcaggcaaatgcaatggccgcagtaattgaacctatgatgaatggtggaggagccccttggcttctctacggcataggagctgcaatagccattgtactcaccctcttcaaagtacccgcacttgcctttgcgctcggaatgttcattcctattgacctcaatcttccactggtgataggtggtgcaatatcgtggtttgtgggttcaagaagcaaggatgagaagacaaacagcgcacgcgttgaaaaaggcactctcattgcttccggattcattgccggcggagcgcttatgggtgtggtcagtgccattttgaaatttgctcaggttgacctcttcatggcagagtggaatgccgcatacggcgaggcaattgcaattcttccatttgcagccctcatcatctacactgcaatggcttcaatgagagcaaagaaataagtaatcaatcatctatagcagtataaaatggaaacagtaattgacaaattcatacgatatataagtgttgacacgcagtcaaacgaggaatcagagtcgcaaccaagtacttcaaagcagtttgacctgctcaaaatgctgtgcggcgaactcaaggcgcttggaatagaggccgacctggaccagtgggggtatgtaatggcaaccattccggcaaacatcaataaaaaagttccggcagtgggcttcattgcacacgttgacacagctcctgatgcaagcggcaaggaggtgaagccacaattcattgaaaattacaatggtgaggatatagcactgaagggcgttccaggtcttttcctgaaacctagcgagttccccgaacttcttgaccacaaaggagagaccattattacaacagatggaacaactcttcttggcgcagatgacaaggcaggagtagccgaaatcatggctgctgcggagtggattatgaaccatccggagttcaagcatggtgaaataaaaatagccttcactccagacgaggagataggccgcggagttgcaaaattcgacgtcaagaagttcggtgccgagtacgcatacacaatggatggtggagaggttggagaacttgaattcgagaacttcaacgcagctgccgccacagtaaagattcaagggtgcaacgtgcacccgggctatgcaaagggaaagatgaaaaacgccattcgcattggtatggaattgaattcgcttcttccttcagggcagaagccggaatacacacaggggtacgatggcttcttccacataatagggttcaatggcactgttgaacaggcggagttctcatacatcataagggatcacagtatagaactctacgagcacaagaaagaggtaatgaagcagtgcgttgactttataaacacaaaatatggtgaaggaacagcaaccgtagagatccgccaccagtactacaatatgcgcaagcaggtggagcctcactactttattattgagaaggcaattgcggcaatggaaatggcaggaatcaagcctaagattcagccaataagaggtggtaccgacggtgccaacctctcattcatggggttgccttgccctaatatttttgccggagggctgaacttccacggcaagtttgagtttgctcccgttcctaacattgaaaaagcaacacaggttattctcaacatagtgaagctctttgcagagtaagaatctattttttggagttgagagcacctatgatttgctgagccagaacaggttggttggtggtgatgaaatccacaccattcttcaccataatctctatgcggtctgcaggatctacagtccatacgttaaccaccattcccaaatcgtgagcctcctgtatccagttgatatgggaagagagcgtggagtactcataatctattcccattatgccatctgcgtatatctccgccggagtcttgtctcctagaaggtattgtaccatactgccgggcatctgtttgtgcagttccttgcatatttcataattgaaggcaatgaattcagtgagattctccatttcatatctcttaatgagttcaacaacctttgtaacaacctcaaccctcttctctgcaggatgcgtcttcacctcaagaatgagcctgtgtccaagttcctttgcgcattttacaaattcgtcaagggttggaacgccatcgccattcttgaatcttacctgctgcattcttgcgaatgttgtatcctgaacatcggcaacatcaccaaccttagggccatggcatacgacaagtacgccatcggttgtcatattaacatcaagttcacagccgtaagcattgatttcggcagattttttgagggcagtaattgtattctgaaaactgccttccgtgttccaataacctctgtgggcaacaacctgagccttgtatgtattctgtgcaaaaagcgatagtggggcagcaaccagaatgagtgccataaaggcaattgcctttttcaaattcagttgaatcatcatgttaacaatgttaattatattactgatgcaaacttacaaaaaatggattcgcaaactccataaaaacaggtaaaaaacactatttttgtgaataagaacagagaataaacatttccgttatgaccaaaggtgttaaagttctaaaatattcaggcatcactcttctatgtattgttggcctgattattatctcgctgatgcttctgaaccttgcaataaggcctcagaatgtcaaaaatcttgttgaacgctacagcaaggagtatattaatgctgaagtgaaagcggatacaattgaaattcacctgctgaggaatttcccatttgcatccatttccataatgaactgcagcatccgctctcttgcatttgattcgctcaacagtaccagcagggcgcttgtgccgccaagggcagactcccttgcaagagtgggcaggctggatatatcggtttcgctggttgacctgctgttcaatcgtgtgaagattaaaggcattgaacttgactctccaatgatatacgcatacatatcccagtttggcataaacaactgggatattctcaagactcagacggattcaacatcggaagatacccagcttgatgtcaatatcaataaaatatccattaaaaacggtgcacagatatcactctgcagtgctgtagattcaattgaggtagatgtctctctcagggaactttttctgcgcggcgtaatttcaacatcgcttgatgacaactacattacaaggtcaagaatctcaagaatggttcttcaaggcaatcatttccacaaagtcattcttgactccactaaggataactcaataaaactctcaattgactcccttgacataagcaaaaagcataacagcaacaaggctcaggttgacatacgtatgcgtaccgatatgaagtttcacggagtgacacttgccagcggcataccatttgacctgactggtggaattgagctcaaggatcgcgacaacaataaattggaagtggatcttgagaatcttacggtatatgcagccaccctccctgttacccttgacggcaatatgcttattacagactccggtattgaaatacctgacgtaaaaggatatatagataattacagcatcaagaacctgcttgaatatattccggaaaaattcctgaaatcaaataaaattgagactgatgcagcaataaccttgagaacacgcataaaaggaaaatatgcatttgcaacgggagagatgcctgttgttgacctctcctttgctattccagcaagtacccttacagttaaggggcaggaatcgggccacgaagggggtctcaagagaattgaagcggcaatgaatctccactttgaccagaacgatactacaagcaacaccctcagcatttcaaagttctcagttgaaggtcgaggaatatcgctcgacctgaagggaaagattgatgagtacaccgccgaccctcattttgatataagtgcaaaaagcaacattaacctcgacacgctcattgccataattccaatgaaagagaaggtggttgcaagcggttcaatcaatggcagctttgccctgaaaggaagaatgagtgaactcaacctcttctccctcaacaagaatgagataagcggagaactgctgtcggatgcgcttgtattcaatatgcctgaccagggtctggccttcaactgcggcaacacgaaattcacggcaggcgtactgaaaaacagcaaggattctctcctgaccaaagggagcagaatattcaatttgagtgtaagccttgacacactatacttgaactacaaggacagcatgctggtaagcggatcaaaggtctccttctcggccaaccaggaaccacctaaaaaggttggagttcctagaagaggtttgattccaacatcgttgaaagttgacggtcatcttcacgccgacggaattcaaatcaaggatgcggactcaaccagaatcagattgcgcggaactgaaggttcattcagcatcaccccttggacagacggcagaactcctgttattgcgttcaacactggattcagaggtataagcgtagtacagaaaggctccagattctttgcacgcaactccaattttgcagtcaaggccattacacatgctcctcaaagaaagatgcgtgactctacaggccgcgcaaggagattgcaaaatccagcaagcaacaacaatgctcaggattcaacctccaaacgatcattcgatacaaagcgctttgcaggtgctgtcttgaaatattgggacatcaccggtaagatacaatctgcaagcggaagggtcattaccccaaccttcccactgcgtacaaggttctccaattttgacctcactctcagcaatgacggaatgcatttccaagatacaaaattggaaataggtaactcgagcataacactatcgggcaggttgcagggattcgcaaaagcggttacagagcaccaaaagctgcattttaccggaagcatcacggcagactcgctggatgttgaccaaatgatgcaggctatggccagcgcatctgatgtaaaactccaggaaaacaaaagcgatgaggccattgaaaaggagatgcagaaagccgtttcggcagataccgctgtaataaagtcacctgtgataccggaattcctcgaggccgacatcaatctggacctccgcaagatgacattcaaccagagcaggctgaaatcggtaaacggcaaacttatagccaaaaatggaatattccagctcaacagattcaagatacacaccaaatccggagaggttgacctcaatgcattctacgcggcgaagaagatagatgatgtctctgttggctttgacataaggatgaacaagtttgaggtggcagacttcatagagttcattccgcagattgattcgctccttcctatgatgcgttcattccagggcaagataacctgcaccatatcggcaatgaccaaagttgattctctcctcaacctgaagatggagacgctgaacggcctggcaacaattgagggtgaaaatgtagttcttctggatggtgaaacctttgctgaaatagcaaagaaactcaagttcaagaacagggagaagaacctcattgagaatatctcagtacaatgcgttgctgccgacaacaagattgaaatatttccgtttgttctccagatggaccgctacaaggctgcaataagcggaacacagaatatgaatatgtcattcaactaccatatttcggttctgaaatctcctattcctttcagaataggtttgaacatcaagggaacagtggaggatatgaagttcggaattggcaaatgccgttacaagagcgagaatgttccggtttacactgaagtgctggactcagcaagagtaaacttgaacaaacagatacgttcaatattcctcaatggtgtggaaaagaccataaatcagggaagcacaagaaatcttgcgaaggttgtgcaggcagagcaagagaagacaaatggaatggaagagctctcccagagcgaacagaggcaactggattctactaaggttgaaaagccattggaggataagccagttgacaaaccgcaggaggataaaccatctgaaagcgcccctacagaccaaacaaaataaacatgaatctcagataaggacacaatggcaaaactctacctggtgcctactccaataggcaatcttgaagacataaccctcagagcactccgcgttctcaaggaggtggatctcatactcgccgaagacacccgcacaagcagcgtgcttctcaagcattacgacattgcaacccacatggagagccaccacaaattcaacgagcacaagacttccgataccgtttgcgcaaagattttgggaggaatgaatgtggcgctgatttcagatgctggatcaccgggtatatcagaccccggcttctatttggtgcgcacctgtattgcagcaggcgtggaggtggaatcgctgcctggcgcaacggcatttgttccggctcttgtaaacagcggctaccctactacaacatttaccttcgacggcttccttccagtaaagaaggggcgccagacaaaaatgcttgaaattgccgcaagggagcacacatcaatagtgtatgaatctcctttccgccttgtgaagacactgcagcagatatgtgatctcatggggtccgagaggcaggttgccgtttgccgtgaaataaccaagaagtttgaggagtgccgccgcggtagcgcacaggaacttttcaactggtacaaatcaaaccaacccaaaggtgaaatagttgtcatcattgcgggaaaggattacaagtggggagaagaagatgagcagcaggaagaggagtaactcccaggaatcagaacgcggagagcagagcaatagaaacagcatcagtcgcaggggaggatacggagcgagtattgccgcactcatcctggtggctgcgcttctgatattccagacggtcacatttatatgttcaaagtactccacgcaagagcctgtctcaaaagagaaagccatctcacataaaagtcaaaaatccaccaggcgtactcctggcaatgtcagagaaaaccatgactggagcaaccgcaatgaattggcgaaaacaacaccattcgaaccattccccttcaaccccaacaccgtaaccatagaaagcctccagttgcttggctttaccccacgccaggctcagacaattatcaactggcgcagcaaaggaggagtatttcgcaaaaaggaggactttaagcgcatctactccgtctcccccgaaaaatatgagcagctgaaggagttcattgttatcgcccacccggccgatagtgattctgcctatcgcccaggtaggcgcaccaacaataccgcctccacattagcagcatcaaccgattccaacagcagattcaagccttacgcaggacggagcgacaccattgacctcaactttgccgacagtgccgacctcacctccctgcgcggaataggcggctactatgcaaatcagataatggcctacaggcagaggctgggctacttctactgcccggagcagttgctggagattccgggaatagactcaagcagatttgcccagttgcgctcaagaataacggtatcactacctcatgcacacgaaaataattcagtaacatatcctgcagcatcaacagcaccggactctatgcagggcgcggaatcctcccttagcatctccgatttcaggcagccgctctgcgagatggaaccaaaacagatggcctcccacccctacattggcgcctatctggcccgcagcttcatcgtcataaagaaaaaatatggtgcagcggccctcactctggagaacctgctgcaccaaggtgtcatctcacttgaactggcccgcaaactgagccactacttcaggtaggaatctgaacttgcaattacattattgtataaaaaaagccaccgttgaaggacgatggcaacctagtgtattcacaacggaataatccttattgtgatttgctttcaagtgatacaaagatacacacattcactataatgtacaacaggttaatcatctttttttgtatatttgaagaaataactgttacgaacttatgaaaaagattctgggattagatttaggaaccaatagcatcggttgggcagtcatcaatgctaccacgaatgataacggaaatgaaatgcttactggcatatcgcacgctggaagcagaataattccaatggatacggcacaactcggagattttgccaaaggtaacacagtgtccgctactaaagaaagaacagcattcagaggtacgcgcagacttagagaaaggcacttgctccgaagagaaaggctacatcgtgtacttgatgtgttggggttccttcctcctcactattccaatagcctttctcgatatggaaaatttttaaatgacatagaggtaaaactagcttggaataagaatcaagagggaaactatgaattcttatttggggattcatacaacgaaatgcttgaagatttcaaaaaagcacatccaaccttgcttgaaaatgggaaaaagatcccttatgattggaccatatattatttgagaaaaaaagggctgtcacaattgttaaccaaatgcgaacttgcatggttacttctgaacttcaaccagaaacgcggttattatcagttgagaggagaggaagaggaagaaaaacaaaatgaaaaagttgaatatcttgcactcaaggttgttaaggttgaggctaccgaagataaaaagggtgaagatgtctggtacaatgttttccttgagaatggaatggtttatcgccgcaccagcaaagtgtttttagattgggagggcaaaacaaaggagtttatcgtgaccaccaaactttcttctgacggaatgcctctagttgacaaagagggagaaatacgccgcagtttccgagccccacaaccagatgattggaccttgcaaaaaaagaaagcggaggctgatattgataattgtgggaaaactgttggcgcatatatctacgatgcactacttgccaatcccaaccaaaaaatcaaagggaaacttgttagagtaatagagcgcaaatactataaggacgaactcctacagattcttgctaagcaaatagaactgaatcctgtcctacaagataaagggatatatcataaatgcatcgaggaattgtattcgagcaacgattcctacagaaaaaacatagagaacaaagatttctcctacctgtttgtcaatgatatcattttctaccaaaggcctcttaaaagtaaaaaatcattggttgatacctgcccatacgaagaacatataggaattgacacattaaccggaaaatcaagaaaatacggtgtgaaatgcatagcaaaatcacatccgttattccaggaattcagactatggcagtttgttcaaaacttgagattctttgaggcagaaacagaccaagatgtgacatcctccttcataaaggatgaaaatgacatggtcagtctgttcaattggctgaacgacaagtcatcgattactcaaaaagtcatcctttcatatactggtttcaacctcaaaaagaacgaacagcaactctaccgatggaattatgtagaagataaagagtatccttgcaatgaaacccgtggagcaatgctctcacttctgaagaaagcagaaattgacccttcattccttacaaaaaaaattgaacagcaattgtggcacattctgtactctgtggaagacaagagagaactggaaaaagcattgtcatcgtttgccacaaagcacaatctcaacacctccttcgttgatacattcaagaagtcaaaaccatatagtaaagattatggttcatactcattaaaagcaatcaataaactactgcctctgatgagaacgggagaatattggtctgaaaaatcaatagatcctgacactgcaaggcgaatcgaacatttgattacaggtgaaatggatgattccatatgcaacaaagtcaggcaaaaggctatctcgctcaacgacatatcatctttcaagggactaccattgtggcttgcatgctatattgtttacaacaggcattccgaggcaaaagatataacaaaatggcaatctccagccgacattgatcagttcctgaagaatttcaagcaacactctctcagaaatcctattgtagaacaggttattaccgaaacactccgtgtagtccgtgacatttggaaacaagagggcagaattgatgaaattcacgttgaacttggacgcgaaatgaaaaaccctgcagacaaacgcaggaagatgaccgaccagattacacagaacgaagagacaaatcagcgaatcaggacattgttgactgagtttatgaacccagatatgcatattgaaaatgtcagaccatactcttcaagtcaacatgaactgttaaagatatacgaggatggtgtaataaactcatactcaaaacttcctgaagacattgccaatatccagaaaaaattcaaggaatccgagacaagcaaacggcctactcaatctgacataatcagatacaaaatatggttggaacaaggataccgttctccatacaccaatcaagccattcctttgtcaaaattatttacagcagagtatgagattgaacatattattccacaatcgaggtactttgatgattctctaagcaataaagttatatgcgaagcggctgtaaacaagttgaaagacaatatgctcggaatggaattcatcaaaaaacatcccggagaaaaaattcaaattggaacaaaaactgtaacaatactttctacagccgaatatgaacaacttgtaaaagatcggtttacacagcactcgctaaaaagaaaaaaacttttaatggaagagattcctgaggacttcatccaaaggcaactcaatgacagccggtacattagcaaatttgttacatcactcctttccaacatagttcgtgaagatggagaagatgcaacagtttcgaaaaatgttattgtatgttctggtggtataacagaccgtttaaagcaagactggggaataggtgatgtttggaattctactattcttcagcgattccaaaggttgaacaaccttaccaacagcaatgaattcatttcaatcaacagtagcggccatgagattcctacagtcccattcagtttaaaaaaagggttcagcaagaagcgcatagaccataggcatcacgcaatggatgctatggtaatagcatgtgcaagccgcaacattgtaaactacctaaacaacagttcatcactttcaaccgcaacaacctcaagatatgatcttcaaagattgttgtgcacaaagaattttgaaggtaattctcacaactaccaatggctaatcaataaaccatgggatacattcaccaacgatgtcaaagagcaactccaaaatatcattgtaagttataagcagaatattcgaatcataaacaagagcccaaacaagtatcagcacataaattccaatggaaaaaaggagatggtcttacaaaccaagggagaaaaatggtccattaggaaatcaatgcataaggatactgtttttggagatgtaaatctacgtctgataaaagcagtaggtctgaaagaagccatctccaaacatgataatattgtgaacagagacttgcgaataaagcttaaggaattgatatcaaatggttatgatgaaaagaaaataaagcaatactttgccgatgaaagcgacacttggcaagatgtaaacttcaaaaaaattgaagtatactatttcgcccacgatactcaaaacgagcggtactacgcaacccgcaaaccaattgatacatcattttcagaagaacgcataaaaggctctgtaacagatactggaattcaaaagattatgctcaagcatctggaggaaaaaggaaacgaccccaacattgcattctctccagatggaattgatgagatgaatgccaacatcacacacctgaacaacggcacaacgcacaaacctatctacaaggttagagcatacgaaaaagccaacaaatttgccgttggtcaaaaggggaacaaatacaagaaattcgttgaatctgcaaagggaacggtattgttctatgccatttatgaaagtgaagtgcttgacaaagaaaatggtgaaataaagattaaacgttcattcgattccatttctctgaataccgcaatagagaggcttaaaaaaggactatcgccagtgccgcctaatgaagatggaataaatccaaaatatgtcttgtctccaaacgatatggtatatcttccaacacaggaggaaattaatgctgggaagttcaatattagaacagacagattatacaagtttataaattctagtggtccacagagcttctttagattagcacccgttgcactacctattgtagataaagttgaatattctaaactcaataaagaagaacgctcaattacaggtgaaatgattaaagagacatgtattccaattaaacttgaccgcctaggcaacattataaaaattggataggaatgataaagaagactctctgcttcagcaaccccgcatatctttcaatgcgcaaccaacaaattgtcatcaaaattccacaggttgagaagagtaacctaccaagtggaatcaaacaagagttggagaccacacgccccattgaggatattggcgtaattattttagacaacaaacagattaccattaccacagcactaattgcagcactacttgacaataattgtgctattgtctcttgtgatgagcgaagtatgccggttgggctatttctgcctcttgaaggcaacacaatacaatcagaacgattcaaagaccagattgaagcctcattgcctctgaaaaaacagatgtggcaacagacgattcaggcaaaagttaccaatcaggctgccatactggagatatgcagagaggagaaattcccttgtatgcatatttggtcaaaagatgtctcaagcggagaccaaatgaatattgaagccagagctgccgcctattattggaagaatctatttcaacacattccagggctggaatcattcacaagagagcgtgagggaaaattccctaaccaactgctcaactatggatatgccattcttcgtgcggtaattgccagatctttggtgggaagtggcttacttcccacacttggcattcatcatcacaacagatacaatgcttattgcctggctgatgatataatggagccttaccgcccgttcgttgatgaattggtatacaagataatagtgaagcagggtattccagaagatggtatttccacagagataaaacgcgaactacttaccattcccactcttgatgtcgttattaatgagaagagaagtcctctgttggtagcagcaggatatacaactgcttctgtagcaaggtgcttctctggagaatccaggaaaatagattacccaaaacgataataatactatatgattgatcgtttcagtgaatatcgcgttatgtggatacttgtattcttcgatctgcctactgaaactaaaaaagacaagaaaagttatatcaactttcgcaatgctctcataagagacggcttcacaatgttccaattttccatttatgtcaggcattgtgccagccaggaaaatgcagatgtacacctcaagcgcattaggaacctactaccagattttggtaaagttggactaatgtgtattactgacaaacaattcagcaatattgaactgttttattgcaagaaacctgcaagatctcagtcacaaggcattcaactggaattattttaaaaaccaaaattggtgaaatgaacttttttggttcattccaccaattttttctaccattttttattcctactcgccttagtatcacattgagaatcaatacattccattaattctactgtgttgtgtcccacaaag

SEQ ID NO: 1372 - DNA, 15794 bp, synthetic construct
  source 1..15794: mol_type = other DNA
  misc_feature 1..15794: note = Synthetic
gaagaagaattgcgtaaagctgctaagtctgctgtttgcaaaatcaacatcgactcagactctcgtctggctatgactgctgctatccgtaagactttcgctgaaaaaccggctgaattcgacccacgtaaatatctgggcccggctcgcgataacatggaaaaactgtacaagcacaaaattcttaatgtacttggttcagacaacaaactttaatcaaatagttgattagaaaataggaagccacttcgcatttgcggggtggctttttttataataacggtgtgttttctgtgtgtagaaaaagaagatacgtttttagctagtcgtcccttaaaaagtatattccagcgaaacattttcatcaaaaagtatttcgctgatttttttaacaagtaaccaaagaactctcatggctcttttgaagttatatgcagcagccgctaacatgacgttgatagcatcgcctactaatcctttgtaaaagtttcgtcctaaacgataatcacttttcagatgtcctatggtcggttctattcccgcacgcttgcaaaagagtttatgtttcttcttacgttggtagtatgtatctttggctttgggtgtatctggaatcagtatttgtgtcccgtcaatcgctttctttccacgatatcctctatctccggccaatcgcttgacgctttttccggtcagtcgccgcacctgttccagactcttctgtatggtatgcccatcgtattcgttgcggaaagagccggcaccaagaatgacacctgtagcagaacgtatgatagagactttgtttccgaattcatatttcttgtgctccttacctttgctgatgcactgaacatcaggttcatgaatggaataaatcttatgaacagaattgcgacgttgtaaaagtatctttttaaagatggatagtaatccatcatagtgtcgattcacacctaagttacgttccagttctctgaccagacgaccggcaatcgtgcgtaaacgctgattacccggcatactaattcaaattagtcggcatactttttccggttatatcggtatgaaattttcttctggtagctgctgatccaatttttttacaacaaaaaagggcgagtttccccgccctgaatgttttcacaacggaataatccttattgtgatttgcttcaaacttatttacaaacgtatatataatagttgaaataaaaaagtataattccgaattaatttataattttggagaaaacataaatatgataccatgaaaaagatattaggattagatttaggaactaacagtatagggtgggctttattaaatgcgcaagaattagaaaatggaaatgggtttgtatttgaccatattgaaagagcaggtagtcgaataataccgatggatgctgctatattaggcgattttgataaaggaaattctaagtcgcaaacatcagagcgaacccgatttcggggagtacggcgtttacgtgaacgtcatttgctacgtcgtgaacgtttacatagagtccttaatctattgggatttcttccgggacattatttacgggaaattgattttgaaaatcatccaggtaagtttattgccagtgtagagcctaaattaccctgggttaaaaatatttcgggacagtttgagtttctttttaattcttcttttgaggaaatgctgaatgatttcaaaaatagtcaacctcaattagtggcagatggccgtaaaattccttatgactggacaatctattatcttcgtaaaaaagcactgcatgagaaaataagtaaagaagaactggtctggctattattaaacttcaatcaaaaaagaggatattatcaattaagaggtgaagatgaagaggaggatcgtagtaaacgagtcgaatttcatgcgcttaaggttttatcggtaaaagctacagatcagaaaaaggggaaagacgtttggtatgaagtaacgttggaaaatggatggatttatcgtcgtgccagcagtttgcctcttgattgggaaggaaaagtcaaagaatttattgttacgactgatatagcagaaggcggtactcctaaaatggataaggacggtaatgttaaacgctcattccgtgcaccgaaagaagatgactggactttattgaaaaagaaaacagaggctgatatagagcaaagtaataaaacaatcggaacttatatttatgacactcttctacaggacccgtttcaaaaaatacgcggtaaattgattcgtactattgaacgaaagtactataaagcagagttggaagctattctcagaaaacagaaagaatatcatcaggaattaaatagtccggatgtttataagaaatgtatcgaacatttatatccgaataatgaacctcatcgtgaaaatatagctaataaagattttgtttatttatttttggatgatatcattttctatcaacgtccgttgaaaactaaaaaatcgttgatcagtgactgtccttttgaatatcgaagatataaagacccaaaaaccggtgaagaaaagatatctactattaaatgtattgcaaagtcaaatcccctttatcaggaattccgattgtggcaatttatcagtaatcttcgtatttaccaacgagaaaaggaaataaacggacagttgaaaatcgatgtggatattacaagtgaatggctaaaaagcgaagaggattatgcagctttatttgaatggttgaatgacagaaaggaaataaagcaggatactttgattcagtcttatttcaaacagaaaaaaataaaaggacagaccactttcccttttcgctggaattatgtagaggaaaagatatatccgtgtaatgaaactagagcctctatattgagtcgtttggaaaatgcaaatatatcaagtggctttctgactaaagagagagaggttgccttgtggcacattttatactctgttgaagataaatatgaaattatcaaggctttgaggacttttaaagaaaagaatcaattggatgatacgtttgttgatgctttttgtaagttccctccttttaagaaagaatatggtgcttattcggagaaagcaataaaaaaattattacctctgatgagaagaggcaagttttggagtgaatccagtatagattcttatacacaaacacgtattgaaaaaataataacgggagaggttgatgccactattcttgagcgtgttcgtgataaagcaatccatttgtcgaatgtaactcattttcagggattacctgtttggttggcttcttatgtggtgtataatcgtcatgcagaagcacaggaagtaattaaatggcaaacagcagaagagatggatgtttacataaatgcttttaaacaacactctttgcgtaatcctattgtggaacaggttattctggaaacattaagaactgtacgtgatatttggaaagaagccggacaaatagatgaaatccatgttgagttagggcgtcaaatgaaaaatccgaaggataaaagagcacagatgacggaacaggcattagagaatgaaaacacaaacttaagaattaagcaactgttgacggaatttctcaatcctgaatatgaaatagaaaatgtacgcccttattctccgatgcaacaggagatattcaggatttatgaagactgtgcattgaataatagtatggaggtgccggatgaaatattagatgtcgtcaaaaagtttaaggaggccgatgtgaaaaaacgtccgggtaaatcggaaataatgaaatataagttgtggttggagcaaaagtatcgttctccttatacaggtgaaataatacctttgggaaaattgtttactccggcttatgaaatagagcatgtgatacctcaatctcgttattttgatgattcgtttagcaataaagtgatttgtgaggccgaagttaataagttgaaaagcaatcagctgggttatgagtttataaaaaatcatcatggtgaaaaagtaacacttgggtttggtaaatctgttgaaatattttctgtttcagcttatgaagagttcataaagcaaaattataacggtttgaagaaccggggtaaaatgaaaaaaatgttgatggaagacatcccggaagcatttatagaaaggcaattaaatgatagtcgttatatcagtaaagtaataaagggtttactttcaaatgtggtacgtgaaaaagacgagcaggatgctatttctaaaaatgtaataacttgtacaggtggagtaacggatcggcttaaaaaagattggggaataaatgatgtgtggaatgatattgttttgcctcgtttcgaacgtttgaatcgactgacagattcgaagcaatttacaagatataatgaaaggatacaaaaatatattccggatatgcctcttgatttacaaaaaggatttaataagaaacgtatcgatcatcggcatcatgcaatggatgctatcgtcatagcttgtgcaacacgtaatatcgtgaattatttgaataatgaatcagccagtaagcgatctaaattttcacgatatgatttgcagcatttattatgtgaaaaacgccatacagatgataaaggaaattatacctggcttgtaaagaaaccctgggagtcatttacacaagatacccggttggcgttggaaaatattgttgtcagtttcaaacagaatttgcgtgtaatcaataaagcgactaattcttatcagcattatgatgaatcagggaagaagatctttaaaaaacaaataaaaggtaataattgggcaatacgaaaaccgatgcataaagaaacggttttcgggaatgtaaatcttcggaaggtaaaatatgttcgcttgtccgttgcattagatacgccggctatgattgttgataaattactgaagagtaaagtaaaggaacttttatctctgaaatatgaaaagaaaaagattgagaaatactttaaagagaacgtagatgactggaaggaatatgattttacgaaagttgctttttactattatactaatgatacgaaagatcggcttgttgctgtgagaaaacctttagatgcttcttttaatataaagaaaatagaggagtcggttacagatactggcattcgaaagattttattgaaacatcttgcgaacaatgaagagaaagcagatttggctttttcttcggacggaatagatgatttgaatcggaatataaggatgctgaatgatggaaaggaacatcaacctatttataaagtacgtgtttatgaattacaaggaaacaaatttaatgttggggtgacaggtaataagtcttcgaaatatgtagaagcagccaaaggaacaaatctcttttttgtaatttatgaaacagaggaggggaaacgttcttatgaatcgatacctctaaatatagtcatagaacgccagaagcaaggtctgctttcagttccggagattgatgagaatggtaataaactgttgttttggttatctccgaatgatttggtttatgtaccgagtgaagatgaggttgtgaatgggagaattgctgattgtttggataaaaatagaatatataaaattgtaagttttacaggtaaacgtttatatggtattccttattcagtagcaaacgtcattgttgataagtttgaattctcattgttgaataaaattgaatttattggagaaaaggaaatctgtattcctgttaaaattagtcgattaggtcgtgttttatctgttggcaaaagactttagtctgaatattggagagtattattgtagtctttgatttaataaatagagtgtattatgataaagagcacattatattttggtagtccggcatatttatctattcgtaatgatcagcttataattaaattaccggaggtagaaaagaatgatactataccggatagttttaaaaagaaggccgtcgtcagtaggcctatcgaagatattggcgtagttgttttagataataagcaaataacgatcacgacaggaactatagaagctcttctggataataattgtgccgttatttcttgtgatagcaaagggatgcctgtaggactgatgttgcctttatatgggaatacaactcagaatgagcgttttcgagatcaactggatgtgtctgttcctctgaaaaaacagttatggcaacaaacaataaaaatgaaaatagagaatcaggcttctgtattgtttgattgtactggagcggaagtccggaatatgcgtgtatgggctaatagtgttaaaagtggtgatccggataatttggaagctcgtgcagcggcatattattggaagtccttatttcctgaaataaaagattttacgagggaaagagaaggaatcccgcctaataatttattgaattatggatatgccgtattacgtgctgtggttgcccgaggtttggtttccagtggaatgttaccaactttgggtattcatcatcataatcgttataatgcttattgtctggcggatgatattatggagccttatcggccttatgtggatgaattggtagtagacataataaagagcggagtgggtattaccgaattgacgaaggatttgaaagctagattacttagtattccaacgttggaagttaagatcaatgggagacgtagtccgttaatgattgctgtaggacagacaacggcttctttatataaatgttttagtggtgagttacgccgcattgcatatccggaaagataatatggaccgatttagtgaatatcgtattatgtggatacttgtatttttcgatctaccaactgatacaaagaaaaataagaaagcctatacagattttagaaaaaatttgcagaaggatggttttacgatgtttcagttttctatttatgtgcgtcattgtgcgagtagtgaaaatgcggaggttcatataaaacgggtgaagtcttttttgcctgaatatggtcaggtaggaatactttgtataacggataaacaatttgctaatatagaactgttttatgggaagaaaattcaaggtgtaagtgctcctggtcaacaattggagcttttctaaaataaaaaatctcgtctatatggcgagattttttatttgaatacagtaattttttatattctaaatttgtttgtattttattgaattatagcttaatactggtattgtgctgtattcaatatgacaaagatataagtttgaaagcaaatcacaacccgctcatttgtagattatgaacgcttcctgctgtattcaatatgacaaagatataagtttgaaagcaaatcacaaccagtatgtgcaggtgggcttgctctttcttgctgtattcaatatgacaaagatataagtttgaaagcaaatcacaacaagatgtggcgtgaaacgtcacatcgcacggctgtattcaatatgacaaagatataagtttgaaagcaaatcacaactggagtccagcgataacacgttcaattccagctgtattcaatatgacaaagatataagtttgaaagcaaatcacaacgggtatgggtgaccaaaggcggatacaacggctgtattcaatatgacaaagatataagtttgaaagcaaatcacaacgatttccgaggatattgtcaacccagaagcgctgtattcaatatgacaaagatataagtttgaaagcaaatcacaactactatttaatatcgttgctgccataaaatgctgtattcaatatgacaaagatataagtttgaaagcaaatcacaactaatgatcatcctgatgcaactccagaagagctgtattcaatatgacaaagatataagtttgaaagcaaatcacaactgcaagataaaatattgattgccttctctagctgtattcaatatgacaaagatataagtttgaaagcaaatcacaacaatccaaggagagaggtcgtatttgctcaagctgtattcaatatgacaaagatataagtttgaaagcaaatcacaactagcaggcataacggatgaagttaaaataagctgtattcaatatgacaaagatataagtttgaaagcaaatcacaacgattttaactaacgttggaagctgtcacttgctgtattcaatatgacaaagatataagtttgaaagcaaatcacaacacgtaatgctcgtggtggttctcgttacatgctgtattcaatatgacaaagatataagtttgaaagcaaatcacaacccgtgcgcatttttctgctaaagaaatagagctgtattcaatatgacaaagatataagtttgaaagcaaatcacaactacttctgctacgttagcgttctgcaattcgctgtattcaatatgacaaagatataagtttgaaagcaaatcacaacataacaagcggctatattcttttaaatccagctgtattcaatatgacaaagatataagtttgaaagcaaatcacaacacattttaccaggttgtacttaggatttgcgctgtattcaatatgacaaagatataagtttgaaagcaaatcacaaccctttttacattctcctttgaatgggaaaagctgtattcaatatgacaaagatataagtttgaaagcaaatcacaacgacatagttcgtataatcattccatgtcccgctgtattcaatatgacaaagatataagtttgaaagcaaatcacaacaagataacgtagccatgattaattgtatttgctgtattcaatatgacaaagatataaatttaaaactacacaatgtcacagcttatttaaaccctttcagcggcctcggctgtgagatcctcaaacaactaacaattgcagcaactacggcgaaaccggttgccagatagaggcaagcctgtgtgctgttattcggaaccagattgaatatcatcgcaaccaatgtagcccctaatgtctgtcccagtaaccgtgctgttcccagcataccgcttgcgcctccgcttcggttggaaggggcagaggagatgatcgtgctgttattgggtgtctggaataaaccgaagccggctccgcagataaacaggcgccatataatatccgtatttgtcgggttatcgggtaatatggccagtaggaaaagaccggtagcaaatatcgtcataccgatacctcccagtataccggcatgaatccgttcgactaaccgtccggcaagcggggccatgatcatcgtagccaacggccagggagtaagaagcaggccggtcgttacgtcgcttcgtcccaatgttccctgaaggaaaaaggggagggaaatcattgccagcatttgtccggtgaaagaacatatcgacgtgccgatcgacatggagaagatcgggatgcgcatcaggtcgaccggaagtaacggaaactgttggtgtagctgatggcgtacaaagaaataaccgatcataaacaatgtggctatacctgctatgatcaaagttgtgttctctttatgggcaataccttccagcgagaaaatcagtaatccgaatgtaagagcgttcatcaggcaactgagcttgtcgaaacggcggccggtgactttaaccggattggctggcaaatgcatcagaccgatcaccaaggctgcaatgccgatcgggatattgatggcaaacagccagtgccacgaacctaaagacaggatgacggatgcaatggtcggtccggcggcaatcgagacggcgacgaccagggcattgatccccatgccgcgccccaggaaacgtttgggataaatgattcggagcaatgccgtgttaacacttgtgatggcggcagctccgaatccttgtaagatacgtgcggttgtcaacatccagaacgaatcggcaagggcgcagatggctgacgtgatgctgaatagtaaaattcctgataagtaaatcctccggtaaccgtaaatgtctcccaatgaagcgaaggaaagaagcgaaatggtgattgccagctggtaagcgttgacaacccagatcgtgacagacggtgaagtacccaggtcgcgggctattgtcggcaaagcgacatttgcaattgttccgtctatgacggacattccgacacctaaagctgtggccagtatagcccagtaacgtttaggtaacggtagtccgtcgttctcacttacagttatggcgcgattttgtaatatcatttatgtcttgtttacttaataacttgtcttacagcttccagcataggttcgacggtcagcggacttcctgtagccagtatcatccattggttaggggttaaacgtccctgacggaaaatccgttctacttcgttcgcgaagttcttgccttccagatactggtcaagctggaattctatgatttgtccgaaagcataagccgacaaatacaatggatagctgatcatgtgcgaataaacagccagtaccgtctcgtcctttactccgaaaacaggcgcataatatttgttccatatctctttcgataatgcgatcgtcgcttctttcagctgttcggccgttgcgtccggatgggcatacatccatttccatacggaaatatccaacatggaaacaccgcaaatttcatacatgctccatactttatccaatatttccatcgcctgtttttccggattcggatcggtgatatccaatatttcgagatcacgtttctggaaaacaaaagccagcgcttcggtaaaagcagtgttgggtacgccgctcaacatataatagtctacatcataaagcgataaagtctgctctacattgtgaccgaattcatggatagctatgttgtatcccttataattcattcctgctgccggaatacgtgtgcggagacgtgactgctgtcctttcatggatgctccccaggcatgccctgaaccacgggcggcatcgactgtgatcttgtcggccagatagttggcccgttcggcactgaatcccagcttcataagaatgtccggtaacttcttgtccaaagctgccgcatccgggtaaagggcttgcgtttgtgcatccagcttggtctcgtcgagattactgcgggctttgaaaccgtcgtaccagatatcgtaggcttccagtttgcgtcccagacgtttggagatcgttttgccgatttctttcaattcggtagcggacagaaattcatcgaacagtttttcaacatcctgcaaggcgacttccatatcgtcgttgaatttacggtcgatataggtattacctgtgtatttgtcaatgccttgcatggccttaaaattgttcagcatcttctgataacggacagtcgattcgggagtcgtttttacttccttgttctcctgttgtaccatgtttgtatatggattccattcatacgtccctgagttgattacttcgacaggaatatcctgtgaaatgatccgtttcatcacttcgtaaacggtgcgttgcttgtcgagtccctctttccccttgttgtagtttgccttgatttcatcacgcaggttccagtgtgacagcaggatcatctctttagggaacagatgctgaccttttttgttcattacatgacccatgtaaatgttgtactgggagatataaatgtcggcatcgctttctgcgttggaagctgcctgcaacaatgcggcagggatccgttctgtgaacatgtcgcccagacgtgcataggcccaggctttgcggtcggtgcccagtgcttctttttcttccagggtaaggtgggggaagtttagcgcgatgataaaagctattttattattgtataagtcatcgcttaaatggcttgaaggactgtatgaaccgaacttctcatcgatggggtgcaacggaccgttatccagctgcaaatttttctgtaagcgcagcgacatctcattgaaatgaccgctgataccttcgaggtagtcgctgatcttgaggaatacctgatacttttcgtccggatcggcaatataattgtcttcacaaaaagagcggaaggctttttcgtcgccgtctgtttccagccaaagacgtgcaacctggctgactcctttttctatactctgtttgttactgttgtccctggaggttaacgtgctgatggtcgattgtatgacggacggatcgatggatgcttgtccgttcagatacgctaatgagcaaataagcataatacaaatgcgtttagttagatttctcataagacttatgttgttaagttcaagatcttttgctgtgtaaataaaagcgtgaagcaaatgtagggataatatttgtatctttgtatgttttttaaaaagagtaaaacaagagatatgaaaaaagtgtggggattaatggctgctatatgcatcctgctgtccgtatccggccaggcttacggacaatcgttgaaagacttattgaattcatctacagtaaaggatgcggttacttctgtaactggcggaaagaaactgacagtagagaacttgcagggaacgtggacgtataccaatcctgccgttcagctggaaggcgataatgcattgaagaatgtagccgggagcgtggctgctggtgaattggagaaaaagctgaaaacgtattgtgccaaggtcggtattgtggaaggcatgttcaactatgtgttcaatagtgacagtacgtttaccaatgcattaaagaaaaagacattgaaaggtactttctctgttaatccggatgaaaaaacggttgaactgaaatatgcgttgggcggaaaactgaaagtgacaactttaacagcccacgtcgtgatttccggagatgagttgtctttgctgttcaatgcggataagttactggattttctgaccaaattatcatcgatatctgacaattccacgttgaaactggtcaataaactggccagcgagtatgacgggatgatgctagggtttgaattgaagaaatagaagaaagtagtatattttgaaagtgggtggtcttttcggactatccatttttatttcagtcccggcaatattttgtagagtgtttttctggtcatgatcttctggttcaggaaacttacaatatagcctgttatacaggcggcaataagtgaaccttcgcgtatcccttcaatgccttgggtgaacatgagggagatgagtacggctaaagtgaccagggtaacatcgaaatacaccttgaactttccgaattccttattataacatcgggatgcatattttacaaatgcttctgcactcatcatagctaccttcggtttgatttcgagcactacgccgatggattgtatgaggcatcctgtgagcagtaaggccatcgacatgccgtaaccggacggatgcagattgcttgttaaagccatgttgaaatcaatgaaagcggagaatatgcaggaaaaaggtatctgaagaagtatttctatcgtgtcctgacgacttctgtctttccggatcaaccagaactgtcccaggatcagcagtacgtttacaatgaatgtccatgttcctaatgataaaggagtattaaggcttaatacgtaatttatactggagataggagtggttcctaatgcagagcgaacgatcaatacaatgcctacagctaaaaaatataatcctaaaataaataccgaatacttttttaatagttcttttatatccatatcaaatctctatttgtctgatctctttctttttgatagttagaaaaagatatgcaaatatccgatttatttttcaaaaccggatgttatggtgaataaattattatcaaaatgataatttaacaggggaatggaagcactatttgaatactgggtcagcctgacctttgtgtagacgattcctggatgggttaggttgggaaaatagctattataagtcgaggttttgtgttaaacagatgttgaaacctcgcggttgtaaatatttgtctttttattttctgttatgctgatgtttttgataattttattttgttcgtatgacgttgtcttttagagtgtaaaatatgctgtttagcataaaaaggtattgtttctgaactgtttttcagtgtgtttttgtgctttattaacagaaaaactcatcttaaataaaccagggatctgtttaaaacgagaaaaaactcgttttaaacgagattgaaatttgttttagatgaagttatcaaaatgataaacctttactttgtgttaaaaaatgtaatatcgatctatctggaagctctttcctgtgagatgtgtctgtttctattttgagcttatttgtatctaaagtgataaaataagctcaaaaaatagccattatgatagtcggtgcaaaatagtgattctgttctattgcttcttatattcttcaacaagttccagcagtacgctaccatagttttcgattacttttttccctattccggggattgcaagcaattcgcgtgaattggaaggtagtgtattgacaatacccagcaatgctttctgttgaaggatcgtataaggaggcaatcctttttctgttgccagctcatagcgccaccgcttaatgctgttatagagttcgggatggagaacgtcgctcgaaacagtcactttggccggctgcgaagaacgttcagaacgttttttagcggatgcgggcggttcgatggacgcttttgctttggcggatagatagcggacgacagaaaaaccgtctacgcatgctttcagcgtctcctgctttaaatggagttcttccgtaaatttgctgatcgcattgttcaccgctttccggctttccttgttatctatttcgacagcggaattttcctcgagagatgtacacaggctgtcgatacgctcgatgaaataggctactcctttccgcacacgttcctggatggtttcgtcctgttggtaattggggtttccggagatcatgcgcgtcagttgctgttggaagcgtccgcctacttctgttattacggaacggaaggcatcacgggtgttggcatattgcgtgttgagttccggatataatttctgtaaatgagcatataccgtataagcggcatattgcaggcgttgctggatggaggtgaaattgaaaagttcgataaccagttccaggtaatattgctgttgcgcctgttccaactgttcttttcctggttgtttgtcggtgacggaactggtaaattcctgtatcctcatatccttgatcatcgcgttgcgggtgatcggactgcttaaaaccaatccctccagggttttgcagcgactgagtgccacatagacctgaccgtgtgaaaaggctgccgaggcatcgatgatggcatgttcgaaagtcaggccctggcttttatggatcgtgatcgcccaggctgttttcaacggatactgactgaaagttccggcaaccgtctctgttatttctttggtgtccggattgatcgtgtatttgacattcgtccaggtttctctttctacctgtatttcattgccgtcttctccgacaaccgttattttgttcgggttgataaaaacgattttaccgattttaccgttgtagtaccggtgttcgccggaagagtcatttttgacgaacataacctgggctccgtttttcagttccagttgattatcggttggataagagtattcagggaagtcgttgtttatttcggcattgaaggtgtatgacttaccgggcaattcggctaacttccggttgttgagttgctgtgcctgataattatgtgttgtaagtgtgatatacccttgttggtc

SEQ ID NO: 1373 - DNA, 15769 bp, synthetic construct
  variation 7061..7131: note = n is a, c, g, or t
  variation 3350..3407: note = n is a, c, g, or t
  misc_feature 1..15769: note = Synthetic
  variation 6421..6555: note = n is a, c, g, or t
  variation 15344..15413: note = n is a, c, g, or t
  source 1..15769: mol_type = other DNA
  variation 8158..8281: note = n is a, c, g, or t
  variation 4427..4499: note = n is a, c, g, or t
catggaatttcttatttattccacccaaattcacctttcatattagcagctctgaagatgcacttatgctgctaatgtattttgtagtggcattaattaatgcggtacttacctaccagatcaggagcatggaaaaactggcaagggaaaggcaggaaaaagcgaatgcagttaaattatataacacgctactcaattcactatctcatgagttaagaacaccaatagctacagtcattgcagccacagataatttactggattcaaatgaacaactattaccacaacatcgtcatgagctactgaaggaaattgcacaagccggactgcgcctgaaccaacaagtagagaatctactcaatatgtcgagactggatgcaggtgtattacaacccaaaaaagactggtgcgacatagctgaacttttgtatcaaactgttgaaaaactcaatactacacaaacacatcaaatacatattcaggttccacaatccttgccgttttttaaaatagacaaaattttactggaacaagtgttattgaaccttttgcaaaatgccattcagtatacacccgcacattcttctattcagttcagcgcacataactatgcagatttactacatatctgcatcgaggacaatgggcccggctttcctgaacaaactatttcatatgtatttgataaattctaccgattacaaaacagtaaagctggtggtacaggacttggactttctattgtaaaaggttttaccgaagccttgggtggaactgtaacattaaccaatcaggaaaaaggcggagcctgctttactattcgcattccagcagaagcatcttacatcaagaacctgaaaaatgagtaaccagcctacgatattgattattgacgatgaaagggctatccgaaaactattggagattacgctccaaagcaatgggtatcaggttgcacaggcagaagatgcaaagactggtttgatcatggctgccaatcatccgccagatatgatcgttcttgatattggtttacctgaccaggatggacacagcgtactaacagcattacgacaatggtatacacaacccattctgatgctgtctgttattaacagtgaagaatccgttgtagaggcactagatttgggtgctaatgattatctattcaaaccattcagaacaggagaattattggcacgcgttcgctctgctttgagaaatcaactgcgtgaagcaaatattcaacctgtttctgtttgcggcgatctgcaaattgatcttaccaacagaactgtacaatacaaacagcaacctgttaagcttacggctactgagtattccttgttggcattgtttgtgaaacatgaaggaaaagtactcacccatgcatatctgctaaaagagatatggggaccaggttacatcacacaatctcaatatttacgcgtgtacatcgcacagctcaggaagaaaatagaacaagatcctaatcatccagaatacatcctcactgagtctggcataggctaccgcttcatttgtaaagactaaacgatatggaacaaaagagcaattcgctcagcaaggtaactacaggaaccttgctgatagcccttggtattatctatggtgatataggcacatcacctttatatgttttgagatcgatcattggcgaaaaaacgattgatgaaacgctggtgttgggtggggtatcactggtattctggaccctcactttccaaacaaccttgaaatatgtatggctcacactcagagcagacaaccaaggggagggtggtgtattttcactctatgccttggtgcgcaggtatagtaaagggcttgtgatctttacaattcttggtgccactacactcttagcagatggcattattacaccgccgatttctgttgcatctgccattgaaggattgagtgcagtaaaaggtctggaaacaatttttgttcccggtaatcatctgactgttggtatcatcatcgccattatttctggtttattctttttccagcgttttggcacacaggtaatcggaaaatcattcggaccaattatgctcatttggttttctatgttactggtacttgggttgaatgaattgagacactaccccgaagtattgaaagcagttaatccatattatggttatcaattattggttcactatccacaaggcttttggattttaggtgctgtgtttctttgtactactggagctgaggccttgtatagcgatcttggccactgtggcaaaaacaatatccgcatcacctggggttttgtaaaagtctgtctcattatcaattatatggggcaggctgcttgggtattacacatgggtaaggatcaattgaacggtgtaaatccattttttgaaatgatgcctaattggtggctaattccaggaatcatcgttgcgactgctgcaacaattattgcttcacaggcattgattagtggttcttatacattaatcagtgaagccatgaacctgaatttctggccaagggtgggcgtaagacaaccaagcaacgtgaagggtcaaatttatattcccagcgtcaatatcattttgtgggccggctgtatcctgatggtcctctattttaaaaattctgcacatatggaagcagcatatggtttttctattactgttgccatgatgatgacaactatactgttgaatttttatttactctttaaattgaaatggaagcaatggcaggtatccatcatcatagccgttttttcagttattgaaatttcctttttcgttgcaaacaccgccaagattaaagaacgttggatgtttctgttttttgaattattcatatttctagtgatgtatatctggtactatgcaagaaaaaaaattaacaagtttgtcaagtttgcagaaataggcaaatacacaccattattgaaggaattaagtgaagacgagagcattcccaagtttgccacacatcttatctatctcaccaaagcagatacccgaactcaaattgaagagaaaatagtccgctccattcttgccaaaaaacccaaaagatcagacgtatactggttcttacacattgatcgtaccgaagaaccttataccatggagtacaatgtttctgaactcgtagatgataaagtaattaaggtgaatatccggctgggatttcgaatacagccaaagacagagctctattttaaaaagattgttcaggaactggtacgtaatcaggaactcaaacttcatattacaccagatggttctaccagatacaataatgaaccggatttcaaatttgtagtaattgaaagattcctttctgtnnnnnnnnnnnnnnnnnnnnnnnnnnnnnnnnnnnnnnnnnnnnnnnnnnnnnnnnnnctcaagcatctgggcaccaaagatgaaaaagcatttggcttagacaaaagtgatgttattacagaatatgtaccactagtatatcaaccggcaaattcttttgaactgacaagaaaataactgcatgaaaaaaatcatagtaacaacagcatggctgctaggcgcagcatgcgcttacgcacaggattccactactgccaagcaaccttttgagggcatggacctttcttggataaatggtcaaaacagacagcaagattttccattggtgttaactaaaaacaaaacagttgtcttaaccggtgttgcctacttagatacttatttcaactataacttcaataatccggccgacaatacacaaaccatttcatcaacagttggcaggcacaaggagtttacattaaaccttgccagtattggtattgaaaccaattacaaaaacatgattggcaggctttggttgcagaccggacaaatgggttctattattcaggatctagacggctcagtactcagaggcagaaataccgcaatcaataatctaaaatatgtgcgagaagctgcagccggctaccattttaacaaatggtacggtatcaatattgagatgggtattttcatgagttacattggtctggagagttatgttacacaagagaactggaactatcagcgcagcatggtctgtgattttaccccattttatttctcaggtgcacgcatacaggctttcccatccagaaaattcaaaacagaattatggctcttaaacggatggcaaacctataacagttggagtaaatcgccgggtattggcagctctaattattatcgtccgaatgaaaacctgcagcttgttgctaatttttattacggcaaggatagcaggaacagctataccgttcgctttcatcatgacaatagcatagtagccagatattttcgatctgcaaaaaataaaggtatttcgcaggccgcatttagcttgaatacgcattatggttttcagcagggagnnnnnnnnnnnnnnnnnnnnnnnnnnnnnnnnnnnnnnnnnnnnnnnnnnnnnnnnnnnnnnnnnnnnnnnnntggtttcatcaaaacaaactcgcgctcactacacgggcagattatgttaccaatcctggattgtatctcacttttacccctagtaacgttacgccaaacgcatttacagatgccattgcaactgatcctacaaaagccatcagcatccagcaattaacgggcacattggatattatgccgaatgatcatgtcacatttcgctttgaattattgcatagaaaaagcaatcatccctatttccccggcaaaggaggaaccacttctccagatggttgggctgatacacccgcaggtacttggcaaccagatttacgcaaaacagaaaccagattatgtctggcgatgaatttcagattgtagtcccgacaggaatcgaacctgtatctggagtttaggaaactcttattctatccattgaactacgggaccagccgctttgcagctagggcaacaaaaatacaggtctttcacttgctgaaacaaggctttcacaagaaaatcaaccaagcgctcatttgctttcatagctttaaaccacaatttgcttgctatgcctaaaacagcactcatcaccggcagtaccagcggtattggtctgggtattgcccgtcagtttgccaaagctggatacaatctcgtcttaaatggtctggaacccgatggcccggctattgctgcagacatagccagcacttatcaaattcaaacacatttctctcctgccaatatgctggatgccgctgcacttcgtaccatggtaactgaagctgtagacaaattcggcactattgatgtactcatctgcaatgcaggcattcaacatgtgagccccatcgcagatttccctgaagacaaatgggatgccatcctctccatcaacctcagcgccgccttccacctcaccaaagcggtttggccgcacatgcgcgaaaagagtttcggacgcatcatccatattgcatcggcccatggcctcatggcttctgaattcaaatcggcctatgtagctgccaaacatggccttgtaggttttaccaaagtggcagcgctcgaaggcgcaccgtataatattacctgcaatgcgatttgtcccggctatgtaaaaaccccactggtagaaaaacaaattgccgatcaggcccgggtacataacctgagcgaggaagaagtggtgagcaaagtaatgctgctgaaacaggctgtaaaagagttcattccggtagaaacccttggtgatctagcccttttcctggcctccgatggagccaaaacccttaccggaactgcccttccggtagatggtggctggtacgcccagtaacgctatctttgccgctctcaaaagcgcaagtatgcaattctataatttattgattcgttaccgtctctggattggctgtgtgatcttgattggtgccgtagtgctgaaccttaccggaaccggcttctggcccagcttcccgctctatttcatcgctgttattgccatattcacccatttcttcatcggccctttacgactgattcaggagcccatggaaaaaggtgaagtagataaggtagagaagatcctgaactcggtttggtttcccaatctcctctatacacccattcgctctacttattataccatcaagggtaatctggcgatgatgcagcaagattttgatgcagccgaaaaacacctgaagaaaagctcttcattgggcgcgcccatgccagaagcagaaggtgccaacaaactgcaattgggcatgatggccatgcagaagggcgatatcaaacaagctgaaggttatatccgtgctgctatccgcgccggcattcccgataaagaaagtgaagcggttgcttatttaagcatgtgtcagatcttcatgaataaagcagatcgcaattcacttcgcgcagcaaaagatttnnnnnnnnnnnnnnnnnnnnnnnnnnnnnnnnnnnnnnnnnnnnnnnnnnnnnnnnnnnnnnnnnnnnnnnnnnnnnnnnnnnnnnnnnnnnnnnnnnnnnnnnnnnnnnnnnnnnnnnnnnnnnnnnnnnnnnngaacatattactgaagccaatgccggactcgaaacagttcggcagctttttatagactatcaacaagaattgaatgctgacctctgtttccaaagttttgaagcagagctgaaaaatccactgaaaaaatatggaccgcccaccggaagtttactattggcttattatcaagatcaaccagcaggttgtattgcactacagcccttacccgaagcaggtgtttgtgagatgaaacgactttatgtagtgcccatctttcgcaaatttggtatcggcagaaaactagtacaagccattctggatgatgcaaaaaccttgggttatcacaccatgaaactggatacgctggatcgattgcagcctgctatccaactgtacaaagactttggctttaccgatgcatccgcttattacgccaacccactggaaggtgtggtgtatatgcagaagcagcttggctaaactcccaaaatgctgtaccttttatctgatgaaaatcatgttcnnnnnnnnnnnnnnnnnnnnnnnnnnnnnnnnnnnnnnnnnnnnnnnnnnnnnnnnnnnnnnnnnnnnnnncgtatgggccaatggaaaaaactgatcgtggtatgtgtgctttgtattgcattggtatatggcggaataacacttatacaaaacatccttaaacactaaatcaacaacacatgaaaaagaacatgggcggcgcagaccgcattatccgcgtaattctggcaattgtttttgccgcgttatattttacaggtactgtagccggtacatggggcctggtattggttgtattaggcggtgtatttcttgctacaagtgtggttagtttttgtccgctctacctcccctttggtatcaatacttgtaagaaggattaagacgacctcatcatactgcgctaaagcttcgtatgataaaactcccctctcctttggagaggggagttttatcattgtataattctgcttgcgtttatttttcaaactcaatgatatgcgctgaagcataaatgcttctatcaggcttaatgtatttcacatacaagcgcgctttcttacccaagcgcatacaagtatgtttttgtgcaatatcttcttccgtatctaatggttgtaaagaaggataccagagaaaatagcccggcctgtctaacaacaattgcggcttgctccattgctgggctgcatcacccttactcaactctttttgttgattgaaagaaatataaatactactacctgcccaagatggacccgttactttacccatcagcattacccaagattctaagtattcattccagctaaccgatgggccccaatgaaaaccgccttcaggtgaagaagccgcactaccgccttctttgcgcggaatttgcaatgaagcaatgggcttacccgcatcgttccatgcagcttcgaaagcaacaccattccaacgttgggccttgccttgcggattgtccagatctttcaacgcaatacgcgctacactaatgcattgtccactccactctttgtctttatgatagcttgcagaatcataagcttgcggataactatactcaccataaaacaaatagagataatcnnnnnnnnnnnnnnnnnnnnnnnnnnnnnnnnnnnnnnnnnnnnnnnnnnnnnnnnnnnnnnnnnnnnnnnnnnnnnnnnnnnnnnnnnnnnnnnnnnnnnnnnnnnnnnnnnnnnnnnnnnnnaacaaacctttgttctcccagctatgtccaccattcacagatttcatgataccaattctgcaaacagcagcgggtgatgttggcccctgcaaaccttgtggccataaatgattgatataaccttgtccggttgcagcatcataaggtaaattctgcggatagttttcattatgatataccgcatacaaagttttgccggaaggatcatcactgctttgatacactgtttcaaaccatacagctccatgcaggccgggtgcgcctatcagcgcgatgggtggcaattgcggctgacgaaacgcagatgaatcagcgctaaaagcagcaggcgcatgcttgccatctgcaaagcgtaaatcgcgcgcagcaccccagacggtatcttctccatacttacccggaaagatgcggaatgtatcaccaatccaagcttcagccatattgcagtctacaaaagaatgaaagagtaccgtatctgtattggtgatggtaaagcgtggattactagatggtgggttacaagcaaaggcagtaaccaatgcaatcgtagcgagtaggatgcgcatgggaaaactttaccttaaaatactgatagtcttccgcattcatgatttttaaaaaagcaaaagaaaaatttggataaaaagtaactaatttgttacctttgaaaaaactaaacacaaccatgcgtatgcaaaaacaaaacaaaagctttattaaattgatcgtttatgaatcgttcaagtgcccgcattattaaaatgcttttagaagatggttgggaagaaatgaaacagaagtcgacaagtcacagacagtttaagcacaaaatcaaacccggaaaagtcactgtaccgcatccgagaaaagatcttccccctggtacctataactctatattaaaacaagcgcagctcaaataagataatcaatagactttgctgcttttaaaaacgaattaataaagttatttgtaagttttcagcatgcttcacaaaggacacgttatatgtctgtaaaaattaaaaatattatcccactcatcatcgaacgagatcgcaatcatcatttttggggaagaattactgtaaatgataacctcattattgaaagtgcagcaagcaagcaggctttgatagataaacttaaaaggctggcattagattttgaggatgtcaaaatcacagaatttgatattgcttatgacttaagtgctttttttgaagaatacgcatttctgaatatttcagacattgctaaaaagtcaggtattaatcaatccctaatgcggcaatatgcaaccggtattaagtttccctcggaagaaagggtaaaacaaatacaagaagccattagaactattggtaaggagttggcgaagattaaaattgtaaaaccgaatattcatctcgaagaggcgtagaccacctgataactgccgctgtataattgcttataaaagtcatatttttcaaaacacactgttgtattttaatttcatattttttcaacaaacagaaatttgacaaatggcttgctcattaaagagcaatttcctacattcatatcctacccctaatagtgaacagccgttcgctgtataacccttattcaataaaaaagccccgtattgtaagacgaggcgacttgaatgttttcacaacggaataatccttattgtgatttgctttcaggtatgaaattaaaaattatcgctgtatgaccaaaaaaattttagggcttgatcttggcaccaacagtattggatgggcgctaataagtcaagatgtagaaaacaaaactggagaaataattaagctaggaaccagaataattcctatgagtgaagacattcttggggatttcgataaaggtgtaactacatctagtactgcaaagcgaacagaacaaagaggaaaaagaagactaagagaaaggcatcttttaagaagagaaagacttcacagagtactcaatatacttgacttcttacccgaacactataagagtgaaatagacttcgaaaaaagacttggacaatttagaaaggaaaaggagccaaaaatagcgtaccgattaaatgaagatacaagagcgttcgagtttatttataaaaaagctttccttgaaatgctagaggatttcaaagaaaagcaacctgagattctatctgaaggaaaactgattccatatgactggacaatatactatttgcgtaaaaaagcattaacacataaaattgaaaaagaagagctagcatggcttttgctaaacttcaatcaaaagagagggtattatcaattgcggggtgaggacgaggaagagaataatacagataagctagttgagtttcatcctttacaagtaattgatgttatagatacaaaagagcttaatgcacgaaagcagatgctctacaaaatagttttagaaaatggctgggaatttattaaaccaagctttacaccagttctgtggaaaggaaaagtcaaagaatttgtagtaacaacaactattgacaaagctggcaaggaaaaaagaacttttagagcaccagaggaaaatgactggacactagttaaaaaaagaacagaatattcaatagaaaatagtaaaaaaaccgttggtgaatacatttatgatgccttattaaaaaatcctaagcaaaaaatcaaagggagtttggttagagttgttgagcgtaaatattataaatccgaactaatcaaaatcttatctactcaacaagcataccatgaagaactaaaaagtaaatctctttacaaaaaagcgctaaatgaactatatcaatacaatgaagatcataaaaaatctattgctagtaaagaccttgttcatcttctcttaaacgacattattttttatcaaagaccactaaaaagtaaaaaatctttgatcagtgactgtaagtttgaaacgagatcttttactaaagatggtataatagagcgtaggcctttaaaatgcattccaaaatcacacccattatttcaagaatttaggctttggcaatggctacaaaatttacgtatttatgaaatagccactgaccatgatgcaacgaatgaaatattaaaatcagaagacaactggacagaactatttgattggttaaataatagaaaagaaattaaacaaaaagagttgtttaactatcttctaaagccgctaaaactaaagccagcaaattacagatggaattatgtttatgatgccacaaaagatgattctaaagcttatccatgtaatgaaacaagggctaccatcctaaatcaaattggcaaaattgatggtcttgataaaagcttcttgaataaacaaagggaagaagagttatggcatattttctattcaataaacgataaagaggaaattgaaaaagggttaaaaagctttgcaattaagcacaacctaccggatgattttgtaaatgaatttaaaaaactccctccttaccaaaatgagtatggagcttactcggcaaaagctattaaaaaattattgccgttgatgcgtatgggcaaatactggactgcatctaatattcatccacaaacattagatagaattgataaaattatcacaggagaatttgatgaaaacataaaagaaagggtgagagtaaaggcattgcatctaaacaaaattgaagatttcaaaggtttgcccttatggctcactagttatattgtttacgatattcatagcgaagaaggtgaaatcaaacattggagaacaattcaggatttggaaaactatttaattgagttcaagcaacattctcttcgtaatcctattgtagaacaagtagtaactgaaacccttagagtagtaagggatatttggcaacatttcggtaagggcaaagaaaatttctttgatgaaatacacatagagcttggtagagaaatgaggaatccggctgataaaagaaaggcaatcacagagcaagttgcaaataacgaaaatacgaaccttcgtattaaagcactcttagccgaaatgcttaatgataataatatagaaaatgtaaggcctcattctccaagtcaacaagaaatattaaaaatttacgaggatggcgctttaaatgcatcaaccgatatcccagatgacattctgaaaattagcaaaacagctcagccttctaaaaatgacttagtaaaatataaactttggctcgaacagaaatatagaagtccgtacacgggagaaattataccattgaacaagctttttacacctgcttatgaaatcgaacatattattccccagtccagattttttgatgattcatttagcaataaagtcatttgtgaaagcgaggtgaataagctaaagggtaaccagcttggtatggaattcatcagtaatcacaaaggagaaagagtcacaatcaattttggtaaaacagttgaaatattaagtaaagaagcttacgaggatttagtaagaaaacagtacgcaaagagtagaagtaaattgaaaaaacttttactagaagacattccagaggaatttgcacaaagacaaatgaatgatactcgctatataagtaagcttgttaaaaacttgctttcaaatattgttagaaaagaggacaaagatgatggcaccacctcgatcaatttactgtcaagcaatggacaaataacttcgattttaaagcaggattggggattgaatgatgtatggaatgaaattattgcacctcgattcgaaagattaaatcaattatacggaactagagattttggagatataaatccgtcaacaaataagttcctaccaaccgtgcccttagagtattcaaaaggatttagtaagaaaagaattgatcatagacatcatgctttagatgccttggtaatagcctgtgctactagaaaccatattaattatttgaataatcaaaacgctttagacaaatcaaaaactaaagagcaaaaacagcaagcaagggaggatttaagagctattctgtgttataaaaagtttaatgacggcagtgagaaaaactataagtggctttttaataagccatggaaaagctttacggagcaagcaaaagaccaattgagtactattgttatcagtttcaaacaaaatttgagagttattaataaaacagtaaataaatacgagcgttgggaaacagaaaatggtattacaaaaaaaataattacaactcagaccaaaggtgatagctgggcaataagaaagcctatgcaccaagcttttgtatttgggaaagtaaaattaccaagagttaaaaaatcaaatgaaaaatctatagttgcaattagaagacatattaacccaacaatagacataaataaaataacagatactggcattcaggaaatcctaaatagatttcttatttctaaaaataatgaccccgaaattgcattctcagctgatggtttggatgagttaaactctaatatactggaattcaacaaaggcaagtggcatcaaccaatatacaaagcaaggtttttcgaagttgcttccaggtttcaattaggagaaactggaaataaaaaaaagaagtacgttcaaactgcagatggtacaaatcttttttatgctatttattgggatgaagaaaagcaaaaaagagtatttgaaactattcctttaaatgaagttattgaacatcaaaagtggagagcctctcttagtaaatcagagcaagcaaaaacacatactattcctataaaaagtgaacgaggtaaattccttttttacctgtccccttatgatctagtatatattccatctgaagaagaaagggataatatcaaacaaattgattttactaatcttactgaagagaaaataaagagaatttttgttgttaacgacttttcttctacatgttattttacgcctatacatattgcaaagaaaataattcctaaagaggtagatctaaatcttgataaatcaaagaataaactcacgggatcattcgatacgaaaacggcaagctttgaaggaaaacaaataaaggacttatgtattaaactaatagtaaatagaattggatcaattaaacctgttaggggatgatcaaacgcagcctttgcatagaaagcccctgccacctgcattgtgccaatgcacaattggtggtaagctatgcccatgtaaagggtatggaaaacctgccggataaaactgtgcccatagaagatattggcattttggttttagagcacaggcaaattaccatcacacattacttattggatcaattagtagccaataatacagccgttgtaacctgtaacgagcaataccaccccagcggtttattgctgccattggagggccatagtttacagagcgagcgcttccgcttccagttagcagcaacggagccgttgaaaaaacaattgtggcaacaaaccatcaaggccaaaattcataatcaggcccttgtattggaaaaatggcagataccccatcagctactcaccaacctgaaacaagccgtaaaaagcggcgatgcagataaccatgaagcacaggcttctgcccattattggaagcatattttcccggaagcctggcagttcttccggcatagagaggggccaccgcccaataacctgcttaattatggttatgccatcatcagggccactatggcaagggctttaaccggtgcggggttattaccggctttaggcatattccatagaaaccgctataatgcttattgtttggccgatgatattatggagccctatcggccttttgtagaccatctggtaaggggcattatcgccaagacttctgacattcaagtaatgaacagagatattaaaaatcaattacttaggttgccaacggtggatgtattgattgatgatgaaaccagtcccctttttgtggctacgcagaaaacggccgcttctttggccaaatgttttgcaggcagccaacggaaaatagcataccccgttctgccatgaaagcagaacgattaaacgcatacagaatcatgtgggtaatcgtctttttcgacctnnnnnnnnnnnnnnnnnnnnnnnnnnnnnnnnnnnnnnnnnnnnnnnnnnnnnnnnnnnnnnnnnnnnnncaagatggctttgccatgtttcagttctccatttacctgcgccattgccccagtatggaaaatgcccaagtacatatcaaaagggtgaagaaaagcttaccggaaaaagggcatgtagtgatgatgacgattacggataagcaatttggcctaattgagatatttcaaggcaaaaccccagccgaaccgctggaagcaccccaacaacttgaactattttaggaatagccttagaaaaaatgctcatttcgacccaaaataacagccgaagcagcgattttttcaggaatccgatctttgaaaacccttgctggataagcgttgtagctattcctgttgttatcaaagatcgttgt

SEQ ID NO: 1374 - DNA, 15692 bp, synthetic construct
  misc_feature 1..15692: note = Synthetic
  source 1..15692: mol_type = other DNA
agggcagggtggcatttgtcagtgccatggtggaggtgaagggtacggcgccggggatattggcaacggcgtagtgcacaattccatccacaatgtaggtaggatcgctgtgcgtagtgggatgggaggtctcgaaacaaccgccctggtcgatggctacgtccacgagtacggtgccgggtttcatcatcttcagcatttcgcgggtgatgagatgcggggccttgtcaccggggatgaggacggaacctactaccatgtcgatgttcggcaattccatcttgatgttatgggtggaagaatagagtgtctttacgtttttcggcatcacttcgctcaggtaacgcaggcgagggaggttgatgtctgcaatcagcacctcggcacccattccggcagctatctgtgcggcattggtgcccacgataccgcctccgaggacaagtacgcgtgcgggacgtacgcctgtcacgccacccatcagttttcccttgccgccttgtggcttttcaaggaagcgggctcctacttgggtagccatacgtcctgccacctcgctcatgggggtaagcagcggaagtgaacggtcttctttttccacggtttcgtaggcgatgcagacggcaccgctttcaatcatggcttcggtcagtaatttatcggctgcaaagtggaaataggtgaataccacttgtccctttttaatcagtttgtactccggtgtaataggttcctttaccttgacaatcatgtcggctgcggcatacgtgtcttcaatggtcggtaaagtctttgcacctacggcgatgtagtcatcgtcggagaaaccgctgtttgcgcctgccgtggcctgcacatacaccgtatgacctttttttaccaactcggctactccggcaggggtcatgcccacgcggttctcgttgttcttgatttctttaggtactccgataatcataaccttaaagttttaattggggggttaaacatggcgcaatatagcgatttcccggcttgggtgttatcggtgtatctatgttcttcaacagaatttttatgcatgttttaatcaatgataattgcacctttctgtaggtagagagaactattctttttatatttgcatgcatttaaaataatattgactgtacaaaatatgaaatatcctatatttttctctcttttgttctttattggtagtgtgcaaagcggctatgcccaagaaaccgatacagacaagacctccttcaccccgccttttgatttccccatcaccttctccggtaacttcggcgagatacgtgccaaccattttcatggcggactggatttcaagaccggtggaaccataggcaagccggtacgcgctctggccgacggatatatttcgcgtatccgcgttacccacggttcgggctatgtgctcgatgtggcttatgacaatggttattcgacgataaaccgccatttgagtgcctttgtgggcgatgtggcccgccgggttgaagacttgcagtacgagaaagaaagttgggaggtggaaattactcccgaacccgacgaatatcccgtgaaggccggtcagataatagctttgagcggaaacaccggatactctttcggtccgcacctgcatctggatatgatagagacggctacggacgaatatatagacccgctgcctttcttcatggacaaggtgaaggacaagactgccccgcgtgccgaaggtatcatgctgtttcctcagccgggaaaaggagtggtggaaggcaagcagacgcgacgggcttttccggcacatcctacgaaacccattatcgcctggggactgattggtgctggcatccgtgcctacgattatatggacggagtgcagaataaatatggcgtgaaggcggtgattctcgaagtggacggcgaggaagtcttccgcagtacggtagaccgctttgcctatgaggagaaccgctatatcaattcgtggacacacggtcagtacatgaagtctttcatagagccgggcaaccgccttcgcatgctgcaggcatccaacggcaatcgcggactggtggacatcaacgaagaacgcccttaccggtttgtctatacgctgagagatgcgctgggaaatatctccaaggtccgcttcacagtgcagggacagaagacgataattgctccggtggaacatcgtgagaaatacgccctcaaatgggacaaggtgaactatctgcaggagccggggctggagttggttatcccgaaaggaatgctctacgatgacgtcttgctgaactactccgtgcgggctgatagtggcgacatcgctttcacctatcaattgaacgatacccgtattcctatgcacggtacctgcgatttgcgtatcggcttgcgccggcgtccggtggaggatatggccaaatattatgtggcgggcgtaacggcacgcggtggaaaatatcgtattggcggtaagtatgaggatggtgtcatgaaagtgcgtatacgggatttggggacttataccgtggcggtggatacggttccgccggtgataactcccctaaaccaagcccaatggggacgtacgggaaaaatcatcttcaaggccaaggacaaggaaaccggcatcaatacctatcggggtacgattgacgggaagtatgccttgtttggaaagcccaattccatcagtggtaacctggtgtgcgagctcgacccgaaacatgtggagaaaggcggcaagcatgtggtggagatgacggtgacggatggctgtggcaaccgtaccaccggacagtttgaatttgtatggtaaagactgaaatatttagtaacattataatttagaagtatgaaaagtaaaagactgactcttttcgtcttgtttgttgtggcagccgtggcgaatgcgctggcctgcaccaatcttatcgtgggcaagaacgcttctgcggacggttctaccattgtttcctattctgccgattcttatggtttgttcggcgagttatatcattatcctgccggtatgcacaagaaaggtacgctgattgacatacacgagtgggacaccggcaaatacctcgggcagatagagcaggcccgccagacgtacaatgtcatcggcaatatgaatgagttccagctcactatcggtgagacgacattcggcggacgtcccgagctggtggataccaccggcatcatcgactatggcagcctgatttacctcggtctgcaacgctcacgcaccgcccgcgaggccattaaggtgatgacggagttggtgcaggaatacggctattacagcagtggcgagtcttttaccattgccgaccccaacgaaatatggattatggagatgattggcaagggacccggtgtgcgcggtgccgtatgggtggctgtccgcgtgcccgatgattgtatctctgctcatgccaaccagagccgcattcatcagttcaacatgaacgacaaggagaactgtatgtactccgccgacgtcatctcctttgcacgcgagaagggctattttgacggtgtgaacaaggatttcagctttgccgatgcctacgctccgctcgatttcggtgcccgtcgctattgcgaggcccgtgtatggagctatttcaatatgtttaccgaccgtggcaacgagttcctgccttatatattaggtgagacgaacactccgatgcctctgtttgtgaagcccaaccgcaaggtttccgtgcaggatgtgaagaacgccatgcgcgaccattatgaaggtactcctctcgacatcagcaaagatttcggcgcaggcccgtatcataccccgtaccgcctttccccgctttctttcaaggtgggtgaccaggaatacttcaatgaacgtcccatctccacccagcagagcggtttcgtattcgtggcacagatgcgctccgagttgcccgatcctatcggtggagtattgtggttcggcacagatgatgccaacatgacggtatttacgcccgtatactgctgtacggacaaggttcccgtatgctacacccgtgtggacggcgccgattacatcactttctcctggaactccgctttctggattttcaactgggtggccaatatggtttatccccgttatgacttgatgatgggcgacgtgcgtgccactcagacagagttggagacaaccttcaacgaagcgcaggaaggcgttgaggctgctgctgccaaactactggaaaaagaccctgccaaagcaaaggcattccttaccaactatacgaacatgactgcccaaagcactttcgatacttggaaacgtcttggcgagtttcttgtcgtaaagtataatgacggcgttgtcaaacgtatgaaaaacggtcaattcgaacgtaattccatcggccagccggcaggcgtaatccgcccgggatacccgaaggagttccttgaagagtatgttaagcagacgggagacagatataaaatgcctgaataaaattaggatatttgaacttattcttctacatttgtgtcttacaaaaaagtttatattaacccttaaaacaataacagtcttatggaaaatcaggaactgattaagcaggtgactgagaaagccgaaaaatggcttaccccggcatatgatgccgaaactcaggcagaagtgaaacgcatgttggaaaatccagataaaaccgaattgatagacagtttttacaaagacctggagtttggaacgggtggtctgcgtggcatcatgggtgccggtacaaaccgcatgaacatctacaccgtaggtgccgcaacacagggcttgtccaactatctgaacaaatgttttgccggaaagaaggatatttccgttgttgtggggcacgactgccgcaacaatagcgacaagttcgcaaagatttctgccgacatcttctctgcaaacggcatcaaggtatatctttttgatgaccttcgtcctacgcccgaagtttcatttgccattcgccacttcggctgccagagcggtatcaacattacagccagccacaaccccagagaatacaacggctacaaggcttattgggatgacggtgcgcaggtgctcgctccgcacgatacagccatcatagacgaggtgaataaggtgacggtggccgacatcaagttcaacggcaacaaggacttgattcagattatcggcaaggaagtggataaggtttatctggacatggttcactccatctccatcgaccccgaagtcatccgtcgccagaaagacctcagcattgtgtatactccgcttcatggcgcaggccgcgtgctcattccggactcattgaaggagtggggatttgagaatatcaactgcgtgcccgaacagatggtgaaggacggcaatttcccgacggtggtttctccgaaccccgaaaatgccgaagccctttccatggccattgcgctcgccaagaagattgacgccgacatcgtgatggcaagtgacccggatgccgaccgtgtcggtatggcctgcaaggacgataagggcgagtgggtgcttattaatggtaaccagacttgtctcattttcttgtactacatcatcaagaaccgtattgcaatgggcaagatgcagccgaacgacttcatcgtgaagaccatcgtgaccactgaactcatcaaggctgtggcagacaagaacaagattgaaatgcgcgactgctacaccggcttcaagtggattgctcgcgaaatccgtctgagcgaaggcaagcagcagtatatcggtggtggtgaagaaagctatggcttcctggccgaagactttgtccgtgataaagatgcggtttctgcctgctccttgctggccgaaatctgtgcttgggccaaagaccagggtaagacgctctatgacgtattgatggaaatctatgtagaatacggattctcaaaggaaaccaccgtgaacgtggtgaaacccggtaagagcggtgccgaagaaatcaaggcgatgatggataacttccgtgccaatcctccgaaggaaatcggcggttcggctgtcagcttgattaaggattacaagacattggaggctaccgatgtccggggtaatgtaagcaagctggatatgcccgagacttccaatgtacttcaatatttcactgtagacggcacgaagatttctgtccgtccttccggtacggaaccgaagattaagttctatatcgaggtgaagggcgagatgggttgtccgaaatgctatgccggcgctgatgccgaagctgaaaagaaagtggaggcagtgcgcaagtcactcggcatttgataggaaagaggaaaaaatgtgtatatagtgtttggagaggcgtaacccgtgagggctgcgccttttctttttgcttctgtgttgaaagaaaacttaaataaagacttaaacccgatggttgatgaacaaaacgtttgcagggaagtttagtatatgcagattgcggttacacaccgattggttgatgtgaatgagagtcgtttcattcgtagttgttcgtttgtgagtgtgtgttttccgcaatttgcttttttaaatttcttccccccctcttttttattctttaatttttaattgttctccatccaccagtctatcagccttcttgctatactcagctttcgtggtatttcgggcaggttgtctttggaatagaaggcggcagcggtcagctcatcttcctgcagttttatctctccgctttcgtagtcggcaatgaaacccaccatcaatccgctggggtagggccagggctggttgctgaagtaggtgatgttctttaccttcagccccgtttcctcaaaaacttcccgttccacacattcttccagtgtctcgccggcttcgaggaagcctgccaccagtccgtagaaggttcctcggaagttccgggcatgcaccagcaggatttcgtctcctttgcgtatcagtacgatgatggcggtggaaacgggagggtacatctcattgccgcagttgggacacttcttcatgatgggggtctggtgctccatggcggtaccacacacggggcagaagtggctgtgctcgtcccaatagagtatctggaaggcctttcctgcagaacggtactcgtccggcgagatgtagtcgtacgatgcgcgcaggcctatcatgacccattcgtcggtttcggccacgggctgttccaaggcgaatgcacgtacttgcttgccgttgggggggaacacttcgtgtatattacttccggcttccggtgtcagaggaggctctatactgacgggtacgctgtattttatttctcctttgtctgtatatccttttttcagcagcagttggtctttgaagaagacgaaccactgcgtgcagggttggggttctgttgatttttccattgtttgttgttttattattttgggggggatgaacacgaaaatacaaaggcacagagattcttttcaaattaatttctatgtctctgtgtctctgtgcttgcccccctaaatttcgtttgctgtgtctttttcttgtcgcacatagaccgttgaccttcccattccgcggcggcgcaggaacccttgccggatgaagttgttcagttcgtctatggcggcatgtctggttagtccgcttagctggatgtattcgttcttgttgatacatacattctgcttgaggaacagttccagttcggcttttcttgtttcttcggtggtctctactacttttttcgatttcttggtagtggagtgtacacgttccaacgtcattttcttcttgatgttgttgcggaacgtgctgctgatgcgcaggtgtacgttttggaattggacggattcggagcggattttctttttctcgtcgtcggtctcgcgcaagcatttcagtgaagtgctgaagaatccgagttctcctagctccacgatgtttccgttggccagcaaatcgcacagctcgtcaatgcaggcatccaatgctgcccctatcacattcttgggcagatgttggaaagttgcgatatgttccacaaactccttttgggtataagtccttttcgggcagatacgtgcatggagtgatttcttgtcttctttcccgtcgggcgaaggcgtttcgtaaaggtcgtaatacgcgctcataagatatttatttttgtttatagcgataaacagttctcgtcgcttcggggaattatttttgtcgctaagcagattaattttcttcttcctaaaaactaatcgtccgacaactgttgcattatcgtccaacagttgtttaattatcgtccgacagctgtcggacgaaacagaaatgggtatgggacgattatttcttagtgaacaaaggtataaaatattgtgatacgaagggtagtgtttggggaggaaagttttagtaggcaggaagttttttaaggaaagaaaaagtagtttctttgatggaaaaactcgtttattgaaataaaaaatcccccgttaaggacgagggaacctaatgttttcacaacggaataatccttattgtgatttgcttcaaattagtggggcaaatataaatagaaaagattaaaatgcaaataattgaaagaaaaatgatagatttgggaaaaatttgaataaatatggaggaaaaacacattttaggcttagatctgggtaccaatagcatcggttgggctgtgattcgtgcattaagaaatgaggatgggatagagacgttgagcaaaatattgggtgctaatagccggattatcccgatggatgctgctgtcttgggtgattttgacaaaggaaatacaaagtcgcagacggctgagcggacaagccgccggactgtgcgcacactctacgaacgcagccagttgcgtcgtgaacgtttacaccgggtattggccatcttgggctttttgcccgaacactacctggctcgattggaccgttatggcaaattcatagcccatagtgaacctaagctgccgtggaccacggacgagcagggccgttcttgttttctgtttcaagagtcgtttcatgagatgttggctgatttttgccagaatcagccggacctgcttgcgaatggtagaaaagttccctacgactggactctatattatctgcgaaagaaagccttgacgaagaaaatccggaaagaggaattggcctggatacttctgaacttcaaccaaaagcgtgggtattatcaacagcgtggagaggaagaggataagaaatcatccaagacccggcaattttttgacagccagaaagtcacagatgtcatagacaccggacgggtctataaaggcttgaaggtgattacagtggtgttggctgacggaataaaaggcaagattttcaaagcggaaaagcccgactgggtggggcagaaaaaagacatttttgcggttgtagaccttgacaaagatggcaaggacaagcttgatgaaaatggagagccgagtgtccgatttaagataccgacggaacaggaatgggaggagcaatggaaattgataaaggtaaagactgagaatgacctggatgattcgggcaagactgtcggggcttacatctacgacaccctgctgcagatgcccaggcagaagatacgtggcaagttggtccgcaccgtggaacgcaagtattataaggatgagcttgcacggattctggaaacacagagtagatttcatccggaatttcaagaccggtcgctttatgaagcatgcataaatgagttgtatccgcaaaatgacgctcaccgcaatttgataagttcgcgtgacttgtcctatttgttgtcggaggatattttgttttaccagcgtccgttgaagagcaagaagtcgttgattgcagactgtccctatgaaggctacacctgcgtagacaagcataccggtgaagtgaagtcctatcatttgaagtgcatagctaagtcgcatcccttgtttcaagagtttcgtctatggcagtttctgtccaatttgcggatataccagaaagaaaaagaaataaaagccaatacgaaatttttaagacaggaagtgcacttgcatcgagagacagatgtgagtgttgttttgatgtggatgtcaccgttgagtttttgagaaatgaagatgactatgtctgcttgttcgattggctcaataatcggaaggacatcaagcaggatgcattcttcaaatatccggcttttggattaaagaaggatgcgaaaaactatcgctggaattatgtcgaagataaagtctatccatgtaatgaaacgcgtgccgtgatgctggcgcgtttggaccaggcgaaagtgtctgaagatttcctgacgagggaaaaggaggaagccttgtggcatattctgtattccatagcagacaagggagaactgcggaaagctttgtttacatttgcggtaaaacagggtttgggcccggagtttgtcgagaaattccagaccacgcctccttttgagaaagactatggttcctattccgctaaagccatcaagaaactgttgcctttgatgcgtaggggaaagtattggagcgcagatgccattgatgcccagacgcgtgaacgcatggcaaagattctatcgaatgagtgtgacgacagcattcggtcgcgtgtgagagagaaagctatacatctgacagacatgtcttctttcagagggcttcctctttggttggcttgttatgtggtctataatcgccattcggaagccaaagatataagaaagtgggaaactccttcagacatagacgcctatctggcaggatttaaacagcattcgctgcataatccgattgtggaacaggtcatactggagacattgcgcaccgtgcgtgatatatggaagcaggtggggcatattgatgagatacatttggagttgggacgggagatgaagaatcctaaagataagcgtgccaagatgacccggcagatgcaagagaatgaaacaacgaatctccgcataaagtccatgctcctggagttcatgaatcccgagtttgaaatggagaatgtacgtccgtattctcccggccagcaagatttgttgcggatatacgaagaatctgtgttaaacagtgtggagaatgtgcccgacgacatccgtgagattatcagtaagcttggcgagagtgatttaaagaagcgtccgacgacttcggaagtgttgcggtataagttatggttggagcaaaaataccgttcaccttacacgggcgaagtcatatcattaagcaaactgtttacaccggcctatgaaatcgagcacataatcccgcaagcacgttattttgatgattcacttagtaataaggtgatatgcgaggcagaggtgaataaattgaagagcaatatgttgggacatgaattcataagcaagcattacggagagaaagtcctgttggcaggaggcaagtgcgtgaagattttttcagtcagtgactatgaaacgtttgtgaaggacaattatgccagaaatcctgtgaagttgaaaaagttgctcatggatgacattcctgaacaatttatagctcggcagttgaacgatagccgttacattagtaaattagtcaagtctttgctttctaatattgttcgaaaagagaatgagcaagaagatgtctccaagaatttgattgtctgtacgggaggagttactgaccgattgaaaaaggactggggtgtgaatgatgtctggaataaactgattttgccacgtttccttcgtttgaatgaacttacaggcaccacagattttacggcattgaatgccaatagtaaaatggtgcctactgtaccgttgggcttgcagaagggctttaacaggaagcggatagatcatcgtcatcatgcgatggatgccatcgtcatagcatgtgcaagccgtaatatcgtgaactatttgaataacgaatcggccagtaaaaatgcaaaagtgactcgcttggatttgcagcgtctgttgtgcgacaagcaaaggattgacgataagggaaattatcgttggtttattaaaaagccatggcctacgtttactcaagatgtgtctgtcgctttgcaaaacgttataatcagctttaagcagaatttgcgtgtgattaataagacaaccaattattatcagcgctatgtggatggaaagaagaaattcgtaccgcaagaaaaaggcgacaactgggcgattcgtaaatcaatgcatacggaaacgttttatggggaagtaaacctgcgtgatataaaaactgtttctttgaaggaggctttgaaaaatccaaaagctgtagtggaaagggacttaaagaaaaaattgcagggattgctttcgcagaatctgaatgaaaaacagataatagcttactttgaagccaacaaagacatctggcacgacatagacttgaagaagatacaggtttattatttcacgaaagagacaaccaaacgatattttgcatctcgtcaatcgctggatacaagctttgatgaaaagaagattcgggaaaaagtgacagataccggcattcgaaagattttattgcgccatctggaagccaatggtaatgatgcgaatttagctttctctcctgagggtatcgaacgtctgaatgaaaacatgcagacactgaatgatggaaaataccatcagccgatttacaaagtacgggtctatgaaaaggctgatagatttgctgttggtcagacagggaacaaaaagtctaaatttgtagaggctgccaaaggcactaatctcttttttgcaatttacgaaatggagaaggtggataaagagacagttgaaaagacaataaagaggatttatgagacaatcccattgaatgttgtgattgagcgtcagaaacgtggcttgtcttcagttccagaggacaaagatggtaatccattaaggtttgtgctttctcctaatgatttggtatatgttccgacacgagaagaaatagaaagtggccatatcatttatccattggatcggacgaggatttataagatggttagttgtacagggagtcaatgcttctttattcaacatagtgtggctaatgtaatagttgataaatgtgaattttattcattgaataagatggaacggtcgataatgggtgaaatgataaaagaaatatgtattcctataaaagtagatagattaggaaatctaatgcaatcattatgataaagaaaacgctttattttggaaatcctgcgtatttgtctttacgcaatgcgcaacttgtgataaagttgccggaagtggagaatagcgcttcacttccggagaggatgaagctgcagtcagaagtgacgaagcctattgaagatttaggagtcgtggtgttggataacaagcagataacaataacatctggagtgatagaggctttgttaggaaataattgtgcacttattgcatgtgacagtaaaagcatgcctgtcggattgatgcttccactctatggtaatacgacacaaaatgagcgttttcgtaaacagttggacgcatcattgcctttaagaaaacaactatggcaacagacagtccaagcaaagattcgcaatcaggcggccgtgttgtctgcatgcacgaatggggagaccaaatgtatgatagcatgggccggcgatgtacgtagtggtgatccggataatctggaagcacgtgctgccgcctattattggaaaaatctgtttgctgaggtcccgggctttgtccgggatcgtgaagggattcctcccaacaatttattgaactatggttatgccatattgcgggctgtagtagcccgtagtttggtcattagcgggttgttgccgacattgggcattcatcatcataatcgttacaatgcctattgcttagctgatgatattatggagccttatcgcccatacgtagatgaattggtctatgggctttttaagcaatatggaaatgaggttgcattgactaaagaagtaaaattctcattgctttctataccgacacttgaagtgcgtttaggaggcaggcgcagtcctcttatggtagcagtagggcagtccacagcttctttgtataagtgcttttctggtgaacttcgtcgaatcctttatcctgagtattgatggatcgtttcagtgaatatcgggttatgtggattttggttctctttgatttacctacggaaacaaagaaggataagaaagcttatgctgaatttcgtaaaaatttgcagcgtgatggctttacgatgttccagttttctatttatgtacgccattgtgcaactagtgagaatgcagcggtgcatataaaaagggtgaaatcctttttaccggaatttggccaagtcggtataatgtgcatcacggataagcaatttgctcaaatagaattattctatgggaaaaagcctcaaggggtaaaaactcctgggcagcaattagaactcttttgaaataataaatcccgttctgaagagcgggatttatttatggaaacaaccatttttttatttctgagcttatttctaatctattgatattaagagaataatatagattatgttgtttcttatagctcaaagatactaatttgaaagcaaatcacaacccgctggtgcagaatggcgcatcaactcaggttgtttcttatagctcaaagatactaatttgaaagcaaatcacaactggatgcactcagcttcaccgaagccgaaggttgtttcttatagctcaaagatactaatttgaaagcaaatcacaaccagttgtcatcttcattgccaaccaatccagttgtttcttatagctcaaagatactaatttgaaagcaaatcacaactacgaaaagttatgagtttaacatcaattgttgtttcttatagctcaaagatactaatttgaaagcaaatcacaactctatcgggggctgatgcgaatccctgtaagttgtttcttatagctcaaagatactaatttgaaagcaaatcacaacgaggtgagcaaaggcttcttgcggcgtatcgttgtttcttatagctcaaagatactaatttgaaagcaaatcacaacccattatctcattggtgacctcggatgccggttgtttcttatagctcaaagatactaatttgaaagcaaatcacaacctagcttttggggtggattggtagttgatgttgtttcttatagctcaaagatactaatttgaaagcaaatcacaaccccaggccaccggaggtgacaatgctacggttgtttcttatagctcaaagatactaatttgaaagcaaatcacaaccaggagcacaacaggaagcagcattcgcagttgtttcttatagctcaaagatactaatttgaaagcaaatcacaacaatcacacaaaatttcactttaattttttgttgtttcttatagctcaaagatactaatttgaaagcaaatcacaacgcatgattgaaatactttccgttgtaagggttgtttcttatagctcaaagatactaatttgaaagcaaatcacaacagcacaggggtgatgacctgcttgtcgaggttgtttcttaaagcccaaagatattaatataaaagctaatctcttctttctcatcgtagaataagactaggaattagcaataaaaagtaaa

SEQ ID NO: 1375 - DNA, 15680 bp, synthetic construct
  misc_feature 1..15680: note = Synthetic
  source 1..15680: mol_type = other DNA
agttcgtacaaaaaatcaaaacttcaagagaacgaagtaaagacaaaagaagaccaaataaagctattaaataggttcaaaagttgtccaaccgatattctggtggttatagcgttggggatcacctcttcccattccgaacagagaagttaagcccaaccgcgccgatggtactgcacacccgcgggagagtaggtcgccgccaatttctttacaagcctctttcagtgtaacaactgagagaggctttttgattattagtctgccaaattatttacagagtttcatacgctttaattatttcgtaatagttaaaacgttcccatttatttttgaaacaatttatacaggcaggtgtccgattgaattcaatcggacacttgcctgttaaggactgaattgtgcagtgcaatagtaaatgactgctaccttgagagtcttttgtagtcagatgtccgagagggaactctctattcacacgataggacggaatccgacaatagaatagaagtgacgtatctcgaaaggattgctgaaaacaacttgccacacaccgtgaggtgtaaaagcacgaaaatgccgtatgccgaacggaacgtacggtggtgtgagaggtcggtgaacacgaaagtaggagataaacaccaatgattagtgtttacctcctactcgaaataaatgggggcgtttctccgcaagaaaaaaatccccaccgttaaaggacgatggggatgggacctaatgttttcacaacggaataatccttattgtgatttgctagaaatatgcggcaaatataatgattactttgttaagatccaactattttgggagttatttcttatctttgtggaagtctgattgcagttcggcaaggattgtaagcaaacttgcttctctgttctcaccttgtactattttttcagaaaataagttgcagacgaagctgaggataagtcgcacatgtcactatgaaggttaactttcatagtgcttgcacttacgtcaacatgaaacacacagttataatattgtaatcctttgaaatatgagtaataagaatattcttgggctcgatttaggtactaatagtattggttgggccgtagtgaaatgtatagacaacgaggatactgaacgtaaacttataggacttgttgatgcaggaagtcgcattattccgatggatgccgcgatgcaaagtgattttgcaaaaggtaatacagtgtcgcagacaaaggaacgaacgcaatataggagtgtgcgtcgtatacgtgagcgtcatttattgcgccgagatcgattgcatagagttctttctcttatgggaatgttgccgcggcattatgcacaggcgctgactcgctatggtaagttcaaggacgatgtagagtgtcgtttaccatgggctgagggtagtgaaggaatgcctgtgtttatctttcagcagtcttatgatgagatgctacagatcttttggcaggaacatccagaactgatggctaagggaatgaaagtgccctatgattggaccttatattatctccgtcgtaaggcattgcatcaggctataagtggagaggaactttcgtggatactcctcaattttaatcagaagcgtggctattatcaagcacgtggtgaggaggatgatgttgacacttcaaaagaagagaagtattatgctcttaaggttgtcgatgtggtagatagtggtgataagagagggaaggacacgtggtacaatgtatttcttgaaaatggcttggtttatcgtcgttcggcaaaagaaaagcccgactgggtgggcaaggtgaaggatttcatagtcaccactcaactgaatgaagatggtactccaaagaaaggaaaagatggtgaagtaaaaaggtctatcagtatgcctaaagaggagaattggggacttctgaagattaagacagaagatgatattcgcagttcgggcctgtccgtaggcgaatatatttttggtgcattgcttcggaatccgaagcagaagattaaaggccagttggtgcgcaccatagagcgcactttctataaggaagagctgcgaggcatattggagaagcagcgcgagtatattcctcagttgcgtgatgccgcattgtatgaagcgtgcattaatgagctttatccgcagaatgatgcttataggcagtctatagcgtcaaaaggctttacatatcttctattggataatatcatattctatcagcgtccgctcaagagtaagaagtctatgatagacgaatgtccatatgaatatcacgagtgtcttgatgtcaatggcgagaaaatgaagaaatacataaagtgtattgccaagtctcatcctctctatcaggagtttcgtctgtggcagtttgtgagcaaccttcgcatctaccgatgtagtatcgacgacgaagatgtgacttctcaatttcttccagacgaggaaagtcgtgcttgcttgtttgattggctcaacgatcgtgattccataaaagaagaaatactattaactaaatattttggtttgaagaagccaaagggaaagaacgttgtacttccgtatcgttggaattatgtacgcgataagtcttatccatgcaacgaaacgcggggcaagattctggagcgtttgtcaaaaaatggggtagatacatccttcttagatgttgagaataaaaatgaaaagaatgtggaggaaggtctatggcacatactctatagtgtgaacgatcccgagcaacttcgtagagccttgcgcacgtttgctcagaagtgtgttgcgaagcggtgtactttgaaccaatcagctaatgacgaagcgatgcccgatggggatgcagcatggattaatgcatttgtcgacgcaatggtgaaattccctcctttcgagaatggctatggtgcttattcggcgaaggccgttaagaaattgctttctctcatgtgtatgggacatcattggagagcagacgacattgacgaaaagacgcggtcgcgcatacaaaagttgatagatggagagttcgacgaaagcatacgagagagagtgagagagaaggctatctatttagaccgtttggagaagtttcgcggattgcctctatggttggcttgttacgtggtatacgatcgtcatagtgaagcgagcgatttgagccgatggcaaacgcccgacgatattgatgcttatttgaagagtttcaagcagcattcgctccgaaatcctgtggtggaacaggtcgtcaccgaaacgttgcgcacggtaagggacatatggagaaagtatggaagcatagatgaaattcatgtggaattaggtcgtgagctaaaagctccagcagatcaacgtgcacaaatgacggaacgagctttgcaaggagaaaataccaatctgcgtatcaaggctttgcttacggagtttctcaatccagagttgggtatagaaaatgtgcgccctttttctccgagccagcaagagttgctccgcatctatgaagacacggcgctcaacagcgtcagcgagcccgacgactatgttaccgagataatcacgaagtttgctgatgctaagaagcgtcccacgctttcagaagtaaagcgttatgccctttggcttgagcagcattacgtgtcgccttatacgggcgagaccattcccttagctcgtcttttcaccaccgactatgagatagagcacgtcataccgcagtcgcgctatttcgatgattctctgtccaacaaggtcatctgtgaggcggaagtcaataagctaaaaggtaatgctctcggcttcgaatttattaagcagcatcatggcgagaaagtcattctcaatggcggtcgcgtagtgaccatcctcgagaccgatagttactcagaccttgtaaataatgtctatggtaagagcaatcgtgcaaagatgcgcaaactctttcttgaggatatccccgcggagtttattgagcgtcagatgaacgatagccgttatatcagcaagatggtcacatccttgctttcgcacatagtgcgtgaggagggagaagaagaggctaagtcgaaacacatcgtggtatgcactggtgccgtaaccgatcgcttgaaacgcgattggggagtcaacgacgtatggaatcgcattatcttgccacgctttgagcgtatgaatgagattactaatacgcagaagttcaccaccatcagtacttcgggacatcttattcccgctatgccgttggaactgcagaggggcttcagcaagaagcgcatagaccatcgtcatcatgctatggacgccatcgtgatagcttgtgccacgcgtgatcacgtcaaccttttgagcaacgaagctgctctgcccaagaatcaagccaatcgttatcagctctctcgcaagcttcgtcggtatgaagatgtgctcgtctgccgtgagggtcgctctcgcaagatctctgtagctaaggagttccttcttccctggcctacttttacgaccgatgtagagcatgcgttgagacagattcttgtcagtttcaagcaaaatttgcgtgttatcacaaaagctacgaaccatactcttcgtatcgtcaatggcaagaaaatctctgtgccgcagacgctgggcgatagttgggccattcgaaagtccatgcataaggagactgtctttggagagatcaatctgaggcggacgaaaactttcggtttaaagcaagcattgcagcttcctcgtcgcatcgtcaatcgcgatttaagaggaaaaatcatgcaactcctcgaactgaaatataccgagaagcagatcaaagcctatttctcagagaatgccgaagcgtggagtgatgtgaatctgaagcagatcgaaatgtattatttcaccaaggaaacctccgaccgcttctttgccacgcgtaagagcattgatacctcgtttaatcgcaaggcaataaacgagaaggtggcagatacggccatacagaagataatgcttcgccatctcgagcagtatgccggcgatgccacgctcgcattctcgcccgacggcattgaccagatgaatagtaatatccttgcgctcaatgacggcaaataccatcagcccatctataaagtgcgagtctatgagaaagccgaaaaatttgctatagggcagaaaggcaataagagtcggaagtttgtcgaggctgcaaagggtaccaacctcttctttgcgatatatgagcagacggctgtcgatcctgctacgggattgtccgtcaagaagcgcagttatcgcaccatcccgctcaatgaggccattctcaagatgaaacagggggttccactcgatagtaaggcctcctttatcctctcgcctggagatctcgtctacgttcctacgaaggaggaaaggcagacgggacagatggaaagtccgatagataaggagagggtgtataagatggtaagttcaggtaaagggcgagttgattttgttccatattctgcggcttccgtcatattctcagtatcaaaagaaaattcttcccattactcgggcatacaaaatgaatttggtgtgggcagctctaagtctaaaaatgagcgagctctcactggcgagatgattaaggaagtctgtcttcccataaaggtcgatcggcttggccatctcatcgaaaaataataagtataagtcataaaggcttggcagcttcgccattttcgaagcagccaagccttttgtggttcaaatcgttatattcacttcccttaaaatctaactcttatgatcaagaagaccctctacttcagttcgcctgcctacctctcgctgcgcatggggcagatggtgataaagcttcccgaggtggaaaagcagaaaaacctttcagaactcataaagcgtgaggctatggtgacgcgtcccattgaggatattggtatcgtagtgctcgatcatcggcagatcacgctcacacagggactgctcgaagcactgctcgaaaataattgtgccgttatcacctgcgatagccactgtatgcccgttggactcatgcttcccctttcgggcaataccattcagagcgaacgcttccagagccaaatcgctgcatcacttcctttgcgtaagcaactttggcagcagaccatgaaggcaaagattagcaatcaggcccgcgtactttcgctctgtgcccaagcagaggtaaggtgtatggagcgttggagtgccgatgtcaatagtggcgataacaataatcttgaagcgcgcgctgctgtatactattggagcaatctcttctcgcgtatagcgggcttgcagcagttcacgcgaagccgtgaaggccttccgcccaacaatctgctcaattatggctatgccatcctgcgagcagtggtagcccgtgctttagtgagtagcggacttttacccacgttgggcattcaccaccacaatcgctacaatgcttattgtttggccgacgacattatggagccttttcgtccatacgtcgacgaactcgtatatcatattgtggagagccaaggcgctgatcaattagagctgtctcaagaagtcaagtcgcagttgctcaccattcctacactcgatgtcgtaatcgctggcaagcgtagcccgttgatggtcggtgtggcacagaccacggcctcgcttgcgaaatgctttagtggcgaacagagacgcatagcctatcccgagagataatcttaatcagagcaatcgttatggataagttaagtgaatacagagtcatgtgggtattagtattttttgatctccctacggagacgagtaaggataagaaagcctatcagcttttccgccgacaactgcagatggatggcttcaccatgtttcagttttccatctatgtgcgccactgcgctagtatggccaatgccgacgttcacgtgaagcgcgtaaagcatttcatgcccgaacgtggcagcgtggctgtgatgtgtattactgacaaacagtttgccgacatacacatctatcatggttcgaaaatagagaaagcgagaacgcagccacaacagctggagttgttctaacattccttttcctctctctccccatgcacgatattatcataggtctcttaaaactcttcagttcttctgcattatagactcctctgtacctttttcttatttctaaatataaacgtaaacacctggttatgagcgtgttactcatatccaggtgtttgtgaccttacgaaggtacgttttttctagcaaatcacaactctattttatgacaaacgattcctttcctaggtgtttgtgaccttacgaaggtacgttttttctagcaaatcacaacagttcgtcttcgtaccagtcggaatcaatcggtgtttgtgaccttacgaaggtacgttttttctagcaaatcacaacacaacgtgcctatactgccagccgacgggcggtgtttgtgaccttacgaaggtacgttttttctagcaaatcacaaccccccgattctttataaaattcatagggtgggtgtttgtgaccttacgaaggtacgttttttctagcaaatcacaacatactgtttaatgggttattaaatgctgttggtgtttgtgaccttacgaaggtacgttttttctagcaaatcacaacagttcgtcttcgtaccagtcggaatcaatcggtgtttgtgaccttacgaaggtacgttttttctagcaaatcacaacacaacgtgcctatactgccagccgacgggcggtgtttgtgaccttacgaaggtacgttttttctagcaaatcacaacactgttggtacttttgatagtgaagaatttggtgtttgtgaccttacgaaggtacgttttttctagcaaatcacaacataccgctctcggtattcttcagttaactggtgtttgtgaccttacgaaggtacgttttttctagcaaatcacaactgtacttcgtagatgctttcaactgctttgggtgtttgtgaccttacgaaggtacgttttttctagcaaatcacaactcacttggcagatgaacgaccagagtttgcggtgtttgtgaccttacgaaggtacgttttttctagcaaatcacaacagtttgctttcgaagacaagacgcaaaaagggtgtttgtgaccttacgaaggtacgttttttctagcaaatcacaacagtaatcatccagaacaatgagactgacgggtgtttgtgaccttacaaaggtacttttttctagcaaatcacaacaacataattacacaaaagataaggagacgaaataatgatttttcgcattagaggagaatgaattattatttatgagaggcatctcttgtcattatctccttacgtaggggtagagaaagcaaggggctataacccttattctttccttttcacacctcttatcgcttcggcttctaatggattttcgggccaatagtgtttggggtaacggcggcggagttctttacgcacttcaaaataggcattttgccaaaaactgtgcaagtcttgtgtgagttgtacaggtttaaaaccaggtgaaagaagttccattaaaacggggcgtttgccatcgtctacacaaggtgtatcctccaatccgaaacattcctgtagtcttacgctaagaatgggagtagatgctccttgacgatagtctaagcggacgcggctacccgtcggaacagtgatatgagtaggtgctaagcgattgatggcttcttgctcgggataggggataaggctccacagaatttcagctaggggaagccgacgaagttcctcagtagtggttagggtacgagtgccttgcgtgaggaagaaaggaagccaatcagctgcagtagcaagaaggtgatctgtggaaatatctgtaaaggaaagttcgggatgccatgctgctacttgtgccacgcgtcgctgcaaggcttgtacctcgtcattccaggaaaacatacttaggccatatttggcagtagcgctacagatgacttgcgaaacctcttcaggtgatacctgttgcagagggtgcgcttcgatgagcagttgtccgatacgcttctcacgttgggcaaggagcatgccacgtttgttatcccacgaaagattgttgcgcttctgtatgttagaagaaggaagggaggaagggttgagaggggcggcaaggaatatgtgtcctattgagccttgagcagcatggagcgaagccacggcaagccattcgtggctagagagccaatcagaggcgtcaacttgggcattattgccgtcggctagacggaaatgacccacgccatcggtggattttgccacccgctctggataagccaaagcgatgagtaggccacaatcctctggcgagacgtcagtgttgctctgttcggtgtgtatcatgcgttgatactcgcgtgctatctgtgcgatacgactccatcgtccgatttgatgcaaactgcgtgcttgacgcagacgagtgatgcgcagagataggtcggctccagactcagtctctgctagaggatctttctcttctatcaaggccgcaatgtcgcaagctaaggcttgcatctctttggacggagcgctgagcatcatgcgagctatacgtggatgacagggaagttgagccattttcttcccaatgggagtgatgctattttcagtagtgatagcccctaagttgcgtaatcgttcggtggcaagaatgcgttcggggcgtggggggagtgtgagccaaggaagttcctccacgtgttgttcgccaaaggctaccacgtctaacaagagcggcgcgaggtcggcttcctctatctcgggcaagcgctgagacagcatacggctttccgaggccttcgaccacagtcgataacatacgccttcggccacacgtccagcacgtcccattcgctgtgtggccatatctaggctgatacgtacggtttgtaacgcactgagctgcgtgcgagcatcgaacaccaactttcggcatagtccagaatctattacggcacgcacgccttcaatggtgagcgaagtctctgcaatgggcgtggcgagcactactttgcgctcttcgggtgcagagggcgcaatggcttcgttttgtcgttcgggagaaaggttgccgtagagagggtagacgtgtatacccgtctctgccaccgaagcgagcaacttcatgcagcgctctatctcgctctgcccaggaaggaacgcgagcacatcgccttccgtctcttggagggcacggcgcacagcagaagccacggcttcgggcatttctctgggagagggatctgcggtgagatattctgtgcgaacgggaaacattcgtccttcgctctcaatgagaggagcatggagcgtatggcaaatatgagatgcgtcaatcgtggccgacatgagtactatcttcaagtcgggacgaataatctcttgcgaacggcgagttagggcaagagccaagtcggtgttaatgcttcgttcgtgaaattcatcgaagatgacgatgctcactccatcgagtgtagcatcgtcaatgagcatacgcgtgaggatgccctcggtcagtacctcgatgcgagtttgtgctgaggtgcatgattcaaatctcacgcggtagcctacggtctgtcccaccttctctcccaataggctagccatgcgcatagcaatttgcttagcagccaatcgtcgtggttcgagcatgagaatcttctcgccatctgtgggcaacgaatgtagcaaggtcagtggcaacaatgtagatttgcccgctcccggtggtgcagtcaccaccacggcctcgtgttggctgatgcaaagattcaactgctccgctatttgcgaagcaggcagatgtgagaaatgctgtagaaggtgggataggggcattttcggattcctggggatgctagaactttttgggatttctagggttgttgttgggctgaggcttctgcttggtgttggtagcagcccatatcgggggctgtggcgcgaggggtgccaaggcggtcgagtggataggtagcagctgtgacggtggcatcagcagtgcctacggctttagatttaggtgagagcgcgaatgagaattccagtgtagaggtgttgaagtcgggtgtgaaattcttatctcggctcacggcttctgtgctcgtagtggtggacttgccgtcatcccagagacagttagtgaaatgctcgtcgttagtaattggatccgtgttgattaggcaatggtcaaagtgatagttgaatgcgtcttcttcgaagcgcttgttgaagtttcccatcatctcatcgctctgatagcctgtgatgatgctattggtaatatccatgcgttgcaagggaaggcgcacgtcgccatcgtagttggcaaagtctatggctgccccgccgcttccgccagtgaataggtagaatctgcccaaggtgcaatgtaccatctgtatgtcgcctccgcgcacgtgtacgcagtcgcctccagcattggtcagttggctattgcccacatagacgttggccatgcgcaggttgagcccgtggtgtgtagtattgtggataatagaattttctagcgtgagtgtgcgtcgggaaaggtcggaagagtcaacgcgtagtccgtcagtgctgctatggatatcggcatagttaatatggttgtcgtatgattcttcttttagtacgattcccccccaaaggccaggtgtacggtcgtagggttgattcgtaaacatatcatccagtcgatctccgcgcaacgtgacaggctctgtcgcagatccatttattattagtcggccatgcacaatgagttgagccttggagtgaaacatcaggcaggtaccagcttcgagcgtgagtgttgctccgcgatctaccacgagactgtccatgatgcggtaggggcgccgggcgctccacgtctcgtcagcctggatgtggtgctccttgagcgttatcacgtcttgtccggaagccgtaagcaccacttcttgcgacgtgccagcttcggtggtaaagacgagtttgtcttcatacttcacgggctggtcggtgtcgttctcgggtacattggccatgagatataccaccatgctgtctttccgagcaatctcgaaatcagtaccgcaacctcctacgagcgcactaccatctacgttgacgcgaaagggagaatcttgtcccttctgcagcgccacgttcggaatgcgcagtgccttgtcggcatggttgtagaccatgaaggagtaagtcttggtgggctctccgctgataatggtgtcgaaggccacggtatctttgctaaaggccagtcggtcgttgggcgaggcggtgtaagcatcgtccttcaagcatgaggccaatagcagggcgggcagaagaagcaataggaagtaacgcatggggaaaatgataagtttataagtttaataagtttaagagtttaggaagtcacctatcgtcaaaggcagctcctaaacttttaaactcctaaacttatctactctttttgcttatactctcttgagaatgtcgagcaagtgatcccataccatctttacggtggggatgagcagacgctcgtcgggcgagtgaacgccgcgcagcgtaggtccgaagcttaccatgtcgagcttgggatatttctcagagaaaaggccacattccagtccggcgtggatagccagaatcttgggctctttgccgaagagactctcgtagctttccttggcaatctttacgatttcgctgttcggattgagtttccatccaggatagccttcgttggtcacgactgaagcaccacccaactcgaatgcagcacgcactacgctagccatgttggcgcaagcactgcttacgctgctgcgttggctcgttgtgacagtcacgtggtcaccctcaaggcgaatgctggccaagttagaagaagtctctactagccagtcgatgtcttggctcatagcaaacacaccattgtggacggcatggagcgaaagcaacattttgcgcatggcagtgggcagcatggcttcggtagctgcgggttcctcatcgatgctaaacaagattgtcttctccgttacagaaaactcctcctttacatcttctgcaaatgcttgcaagtctgccttgatttgtgcaaatttgtcggcgggaacagcgcaagtagcgtgtccttcacgaggtatggcattgtgaaggccaccgctctgaatgtcagaaaggcgcaggtccatcttctccatctcattgacgagaaaacgaactagcaatttgttcgcattggcgcgttttttcttgatatcatcgcccgagtgacctcccgtaagtcctttcacgccgatgcggaaggtggtaaagccctgaggaatggcttcggtggggaagggataagtggcagtggtgcgcacgccgcctgcacagctcacgaagatctgtccctcatcctccgaatcgaggttgatcaagtagtcgccgtgcatgaagtcgcccttcatgccaaaggcacccgtcagtccggtctcttcgtcgcgagtaaacacgcactcaatgggaccatgctcaatatcgtccgatttgaggatagccatttccatggccacaccgataccatcgtcggcaccgagcgtagtgcctttcgcacgcatccattcgccatcgataatggtttggatagcatcagtctcaaagttgaaatcggaatctttatttttctcgcataccatgtccatgtggctctgaagaatcaccgtcttgcgattctcataaccaggagtagcaggcttgctaatgcatacgttgcccgtctcgtctaccttcgtaggcagtccgagactctcgccaaatgccttcagaaaggctatcatcttctcttccttctttgaaggacggggcactttgtttacttcagcaaagcaatcgaacacgatgctcggctctaaaagattggtgttactcattgtcatatatatattattgtgtaactttgcttcggaatctaggagcaaagctcccgtattcagaaagcaaaagtaaaaaaaagaaatggaactcttcattgtaacactcataattgttgctttgtgcattgctttattgtccgtgcgcctcttctttggtcgcagttttgtgaaaacccacgtcgatcagagtaaagcaatgcgccaacgcggcatacgttgcgtgcagtcgcaggatgctgaagcgagatttgagaacgcgaaaagagtgaaagaaaaaacgaaatgaaacatctatccacatgcgccatactgctcttcgcagcgagtgtggcattgaccggttgcaacaagaaagatcctgctcagcaggtaaagtctaacggacttcctaaagctggcactacagaaatggctacagccagtgcaagtcccgtagccgtagtagacattgacacgcttgctgccaagagcgattactgtaaagaggggcagaaagtgcttgaaaacaagcaaaacacctatcgccagcaactcaatgcaaaggggcagaagttgcaaaacgatatgataaacttccagaaaaaggctcagcaaggcgggttcacttcgcaacaggaagccgaagcagctcaggctcgccttcagaagcaacagcaggaactgcaaaagtttcaagaacgcattgaagccgatatggccaaggccacacagcagtatcagaccaagcttcgcgatgatatcaatgctttcctaaaggaatacaataaagatggccgtttcaaggtaattatcagcaagagtggcgataatgtactctataccgatccttctgtagatatcaccaatgatgtgattgaaggcttgaacaagagccacaagaaataagtccacattcttttagcaccatttagcgccagcgtagccatattctgcatagagtagcagccacgttggcgctttttgaaagtgtctatttgatagcaatctccatcatcagaataaatagaatcccccataaggcgattcttcctttttttacccttctttccaacctaaacacgaaatatgtcgcattcaaagaaagtagctctcgttctatctagcggtggagcacgcggatatgctcatattggcgccattagggctttgcatcatcaaggctacgacataacgtctgtcacgggaacctcaatgggcgctcttgtgggagggctctattgtgcaggtcgtctcgacgaggccgagcgatggtttaaatcccttacgcgtcgcgaaatgctttcgctcaccgacatttctctcggtagaaattatctagtcaagggagagaaagtaatgcacacgctcgaagagttcgcccccgactgcttgatagaagcactacccatcccctttcgtgctgtggctgccgatctcgtatcgcagcgcgaagtagtcttttccaaaggcagcctttatcgagccatgcgttcgtccatctctatgccttcagtgttcaaacccatcaagatagcccaccatgtcttggtggatggaggcatggtcaatccccttccgctcaatcgtgcaccgcgcacagagggcgaccttctggtttcggtcaatgtgagcgcacccgccagtatggagatagaagagcagcgcgaaatcaagcggcaacgtgagcgcca

SEQ ID NO: 1376 - DNA, 15654 bp, synthetic construct
  source 1..15654: mol_type = other DNA
  misc_feature 1..15654: note = Synthetic
aacctgtttttaaagaaattgaagaagtgaaaattgtaagtatcgatattaaaaagctttttcaggatgtatttaaaaattaccagaaaagatattatgataagccttccgtctatgatgttgtcatgaaaaataaatattttaataatgataaactgtattttatggcaatttcagaagccaaactctggagcaaaaccaactggtataatttcaaagacggatacaacaaaagatatgacgacattatccagctacagctgaacaacgttaaatatctaaagagaaacgctaccgacagcgtattctctgcaaaaacgaaagaggttaatcacgactatatcggaagttatttttttaatcatgaagtcgatagagtattgcagtttatgagaacttctaatgctaaattttcaggaacaatagttggtgaagaagaggatgaccaattgattaattttaagctaaagacttcttacggtgtaacattagacggaagcctgagatataataagattgacaaagtaatcacgtcttaccaaatcacatacaatcaggaagatttggctgcagaaaaaaaggtatctgcagacggaagagaatatacggtaaaaggcggaattgcaacctacacgtatgaattttataaaagagacggagtatatattccagcagtttcgcgggtggaaagcgataaattcacctatttctataaagatgaaacccatgtgaaaaaatctatgcgagaagttgtttacaacacatttacaaaagctgacgaaaaaggtttagacccaaaagttgattttactaaaagtatttggcagggtgttcccgtaaaagatgaaaaagaaactacaattttactttcgaaggaagaacaggaatttgttaacgaaaaataatcagatataattaaacatgaaaaatatattattatcaacttttctatttgtcggatttgctgcgaaatctcaaattcaccgttttatctatgatgtagaatataaaaaggattctacacaaaatattacgacaaaagagaattaccatcttgatatcgaacctcaatcagtaaaatactatcctcgcaatttttatctcggagattctttggtgacaaacaatttgcctgttacagatggttcaaaatttaatatttctcatattataacccataaaccgggttctgcagattatgattattatgatattttggaaaatgttgttttgaaactttcttcaaaagattctcagaactggaaactgactaacgaaaagaagaaaacaaatggtataaatcttcaaaaagctatgaccaattggggaggaagaaaatggacggcgtggtttacgactgatattccttttcaggaagggccttacaaattccacggacttcccggcttaattgtagaattgtctgatgataaaaaagattacatatttgaactggtaaaatcgcaaaaaatcgcaaagcctaaaaacaatatgtacatcgattacatggttgaaaatagtattccggttgatgataaaaaatacagagattctaaactgaaatattatgactctccggtcggttatttgagaaatgcaactcagcaaacccgatcaagcgatgagttctacctaaatgacggaactaaagtggggcaaaacaattcccgtgaagtgaatgaaagactgaaagaaaatatcagaaagtataataatccgattgagctggataaggcgataaagtatactttgtaaaaagaaaaagtaaaagaaaaaataccaaatgacattctgtgcaatctgtggaatgaaattttgcccacagattgcacagattttcccgaaatgccgggtggaggcgattcagatgcagcaggggtttccggattttctttaagtttattaaactggggatatttcggttatacatggcatacgacgaaagacacgtatgataaaattgtttttgatgaggtgaaaaaaacgtgattcttaccgcaactttagcgtcgtacatggcttctgaaagcctgaatttacaaagcagggaacgcagaacaatgcctgaaaatgataaggtgaagttgcaaaatggactgaattgaaagagcagagaagagattctaaggattttaaataacagaaaaagtagcctgattttcaggctactttttctgttaacagtttttttcattttaaatgacttcggagtctgaagcgttaagaaaaatgataatgtgaacgttaagaaaattctattgtttgaagtgcgagacaaatcttaaaatgagcttatgagctcgcacaagttttagaatttttggtgaatattattattttttagctgaagaatccaagtcttgaatttttgtttcaagacaaaagaaaatcatattatcatactcaattgaattcttttcctctgttcatccacttccgtaactcttacctgaacatgttgatgcaacttcaccacttcattcacatcagaaacaaagacgtctttcaactgcgaaatatgaaccagcccgctttctttaattcccaaatccacaaaacatccgaaagcggtaatattgttgacgatccctggaagaatcattccgctttttaagtcggtaatcttttttacattcggatcaaactcaaagactttggctgcttttcttgggtctagtcccggtttttccaattctttcaagatatctttaatacttaaaatcccaatggtttcggtaatatacttttcaggttgaattagattgattttatctttgttggcaattaaatcattggtttttatgcctaaatctttcgccattttctcaacaattccataggcttcgggatgaactgccgagttgtctaaaggattttctccgttggtaattctgataaaggcagcagcctgttgataggctttttcgcccaacctaggaacttttttcaattgttttctgttttcaaaagctccgttttcggctcgataattcacaatattttcagccatcttttcaccgattcccgaaacgtagcttaaaagtgatttacttgcggtatttaaattaattccgactgaatttacgcatttcataacggtagaatccagctcatttttcagctgagtttgatcgacatcgtgttgatattggccaacaccgatggattttgcatcaattttaaccaactcagccaatggatccgaaagtcgtctcccgatagaaactgcaccacgaacagtcacatcaaaactcggaaattcgtttctcgcaattttacttgcagaatacaccgatgctccggcttcagaaaccacgaaaacctgcaaaggcttatcaaaagcaattttctttatgaaaaattctgtttcacgacttgctgttccgttaccgattgaaattgcctggatattgtaagcattcaccatcgatcggattttcttcatcgccattccgctttcattttgcggagcgtgaggatagattgtttcgttgtgcagtaaatctcctttttcatcgaggcaaacgactttacaaccacttttaaaaccgggatcaatcgccagaattcttttttcacccaaaggtggtgcaagtaaaagttggcttaagttttcagagaatatttcgatggctttcttatcggctttttcctttgcttcctgtaaagtttcgttggaaatagcgggttcgagaagtcttttgtaggaatcttttatggctaaaacgatttgctctgaactttcatttttatatttaataatggcattttcaataaaatctagggcttcgtctttgtcaattccgatgtttgtttttacgaaaccttcggcttctgctctgagcattgccaaaagtctgtgagagggtgttcggttcagactttcttcccactcaaaatattgtgaaaatttctgtgcatcttctccgtcttttttagcctttacaacctttgaggtaattaatgctttacgttgaaaaagtctacgcagatttttacggacgtacatattttcgttaatccattctgccatgatgtctcttgcgccttgcaaagcatcttcttcagaagaaacctgatcatttaaatatttagaagccaaaaactgaatgtcctgagctttctggctcatgataatttttgctaaaggttcaagcccttttttttttgcagcatctgccttcgttttttttctttttttgaagggtaaatataaatcttccaactcctgaatatcaaaactggcttcaattttctgtttcaattcagggtgtaaggcattttgttcctcaatcgatttcaaaatagtttcttttcgttttatgagctcttcaaactgtttattgagtttaaatatctgttcgatctgaatttcatctaaatttccggttgcatctttccggtaacgggaaataaaaggaatggtgcagtcttcagacaataattttagagtagcgttaatgcttttatcggataaatgtaattctttgtttacaaattctgttatggtcatgaggcatttttagaatggctaaaatactgacttttttgagatcattttaatagagatttgtaataaatttttgaattatagattttgtatgaagagaatattaattattgtttaagtgtgaattgaattaattgtgtgcttaatttttaattataacctgaatgaattttaatttctgtaatcatattgtgatttaaataaaaaaactatatttgtgtttcaaaccaaaatattttatgcctatgaggaaaaactctacttattctatctgttttatcatttcaaattttaatctttttctgagaaaaagatactctcacaattttattaacttaccaaattccgattatatgaacagacttttaatggttctggggcttttgctgtgcatacagataaatgtctcggcgcaaatatgtaatgcggttcccgtaccgtttttacaatcatttagtacgggagcagtgcccacttgctggaccaatcaaaatcctacaacaacatctacgaacgtcaatgtaaaatggaaattttctggctcagcaggttatggagctacaggaaacggtggaaaacccgcaggaacttttgcctgggtggatgcaagtgctccttacgaggatgaaaataatgtagaattaataagtcctcagattaatcttacagggcttacgaacccatatgtgaaatttgagtggtttaaaaatcaccttacttcagcaacaggaaccgttcctgcttttgagcataatgtactaaagcttgctgtaaataacgggagtggatgggttcagatctggacagataatagcaacagttctgaatggagaactgtaggcattcctttagcagcgagttatatcggcgcaacaattcagcttaaatttactgttgataaagatgttgctgacaatggaaacttctatgatgatgttttgctggatgaagtgcaggtaattcaggctccaacgtgttttgaacctttggtttcgccagcaactaatattgcaccgatttcagcaacgcttaactggtcgcctcctctttcaccagctcctgcaccggcaggtggttatgaatactattacagtacgaccaacacgcctccgactgcggcaactgtcggtaccattataccgggaacttcagcaaatatttcacctttagtacctggaactacttattactggtgggtacgttctgtatgttctgcttcagataaatctcaatgggtggaaggtgacagctttataccgggacaaattggcggtggaacagcaacgcacggatttttaccggtatattcatgctcgggatataattattctcagatgatctatactacggctgaaattgcaagtgcagtaggaacgaataatttaattacatcaattagatatttcgtgtctagcacagcagctgctcaggcaaattataatcagtgggtagtgtacatgggtaatacttctcaaacagattttgccaccacaacaagctggattcctgcaggatctttaactcaggtgtattccgggaccttgcctgcaatgacagccggaacctggatagaaattccgcttgtaacacctttcctttgggatgggacgagtaatgtggtaattgctgtagatgaaaatacaccaggtacatcttgtactgcaaactggggcagttattctgcaggagcaaacagaggaatgatctattataatgcatcaacaaatccggatcctcttaatcctcctactgctacgagcagatatgctgtattgcctcgtcttcagcttgtaggaactgtgcttcctccgtgtacaaatactcctccgtcaaatattacagtaaataatataacggccacttcagcttcggtaacctggacggcatctcagaatgcaacttatgttgtaaggtacagagtattgccttcaggaacatggcaaaccattaatgtaacaaccccttttacgaataatatttctcttccggggcttacggagcaaacgcaatacgaagtagaaattgctacaatatgtggaactcagggagcattttctccgccagttacttttactacaccggcgcttacttattgcaattcgggaactgcaacggttaccaatggctttattagtaatgttactatgataggaacaaacgttccgatgacaagtaataattcgggagcgagtacctacactgattactccaatgatcctaccaaaaccattacgcttcttagaaactcggttaataatacgctttctgtaggaagaacgattgcatcgagtacttatacaacgtacgcatggattgattttaacggagacggtatttttaataacaatccttctaccacacctggtggagagagaataatgggcatggggctttccaacacaactcctgttacaggaaattttgatgttcctgcaaacgcttatgttggaacaagtaaaataaaaatgcgtgttattgtgtattgggtaactcctgcagatgcatgtgcaaaccttacgagtaatggagaagtggaggattatcaaattaaatttattgatcttcagccgtgtactacgaatcctccaacaaacatagcggtgagtaatatgacacatacttcagcctatgtttcgtggatgcctactgcaaatgcgacttatgttatcagatggagagaaggagctacaggagcatggttaccaagtgcagcaggattaacacttcctgtagggcaaagtttttatacaataccaaaccttacggaacaaactgcttatcaggtacagattgctacaatatgcggcggtaatcagggggctttttctccatctcttaattttactacaccacctgttacttattgtaatatgataggtaccggaactaatgattacatatcaaatgttacggtaactccggtaaactttccggtgatgactaatacgactctgcaggataactatacaaattatacgacaccggcaacattgatcaatttagaaataggatcaataggaaatcagctttctgtttctaaaggatgggtaggaactacatttggagatgcggtacatgcctggatcgactggaacagggatggtatatttaccgattcggaaagaatcatgagtactgcttccaatactttaagtcccgttacattatcgttcgatgttccggcaaccggagtatataccgggccaaatacgacgaccatgagagttgttctgaaaagaggaagtgctccggtaatgtgtgtagatccggtaaatggtgaagttgaagattatgctgtaaaacttagaccatgcagcaatgatactccgggtacaccagcatttaatacgataactcataattcagcgattattaattgggttgcagcgactaataatactgcatttgttttagaatacagacctgtaacgaatcctgtttctgcatggactatactaaatgtttccactttagcaggtaatccgcctgtattggtgaatgcactcactccggcgactacatatgaggtaagagttgctgcaacatgtggcgccggcggaatcggaatttttactccaattactacttttacaacaagatgtgacccgacgccgccaaacgtaacggtaaccaacattacatcaaattctgcattagtaacctggaatccgattgtgccgaatgcaacctatgttttacagtggcgtgaacaaggaactataacttggaatactccaacgttaccgccgccgccaattaatacttatacaattccgaatcttgattcttataaaacatacgaagttgtagtagcaagtatttgtgatggtgaaactacaccaaacccctggtcaaatactcaggtatttacaacagaaagagtttgtgaagttcctcctccaggatttacaattacccagctgaaccctacaagcgttgaagttgtatgggattcgttcccgggtgcaacgtatattttaagatacagaaaagttggaattccaaactggacaaatattccggtaaatacaaatacgtacaccattacaggattattagaagtcaccaagtatgaaatgcaggtagctaatatttgtaacggtgaaccgggaaattttacaccattgtattatttcataactcctactgtaatatattgtcatatgcagtctgcaaattctgctaatgaatttatttcaaaggttacggctaagccaaccagtaagcctgaaatgatcaatgaatccgcaggaactacttattctgactttacgggagatcctaagaaatttattgaaatggttcaaggttctgcaggaaatcagattattattgataaaaacctgagttcaggaggaaaagctggtgtagctgtctggatagattttgacagaaacggaactttcgatcttgatgagagaattcttgcagacgggccgaataccaatgcaactgcaagtgcagtatttaatgtaccttctgatgcatttatcagcatgacagatcataaatatgtggttatgagagtggcaatggcaaaagatgcaatccctgtaaactgtattagttttgcagatggggaagtagaggattataccgttagaatttcaaaaattccggtaccaaattcattagatcagacttctataatgatttacccaaatcctgttaaatcgatactgaatgtaaagaatatcagtgaaaaagcgagctataaaatttacggtgcagctggaagattaatttcaagcggatttattgttaataataaaattgacgtaagtgtactcatcagtggagtttatattattgatatagaagatgtaaatggaaaagtacagaagaaattcatcaaagaagaataatcaaaaaattcatcattaacaaaaaagagctctcagaaatgggagctcttttgattaatggaaagttttttgaattccatccaaatattaataggtaatattgtaatatttttttaactgaaaatgccccgcatataggcgaggcgctaaatgttttcacaacggaataatccttattgtgaattgctttcggttacaaatgtagaaattaattatttaagctaattactgttttccgtatttatgtgaaataatttctgtttaattttaggaaattcaaataaactagatagttatggtgaaaaatatacttggatttaataatgaaaaaggtcgctcttattatgagcgacctgtgaaagcaattcacaacagatgtctgattattaataatcgttatctgttaaaaaaaatatcaatattatctgttggcagataaaacgctgggcttggacctccagtcaaattaatttcgtcaaattaattttgatattttaatgacacaaagatagaataataatttaactataatcaaacatctacaaatttattttgtatttttgttagaatatttgaactagcaaagtgattagtaattatatgtgaatcaattaatattataataatgattaaaaatatactcggattagacttggggacgaactctattgggtgggcgttgatcaatcaagatttcgataaaaaagaaggggaaattcttgggatgggaagtagaatcattccaatgtctcaggatatccttggagaattcggtaaagggaattctgtttcgcaaactgcttcacgtacaggatacagaggtgtgagacgactgcgtgaaagatttttactaagaagagaaaggcttcatagggttttgaaccttttacaatccttaccttcccattatgcttctcaaatagattttgaaaagagattcggtaaattcaaagaggagaccgaaccgaaattggtatatgatggcaatgaatttatttttaaaaattcatttgaagaaatgctttctgattttaagaaacatcagccccagcttttggagaataataaaaaagttccttatgactggacaatctattatctacgtaacaaagcattaactcaaaaaatagagaaagaagaactggcttgggttcttttgaattttaatcagaaacgtggttattaccaattgcgtggagaagattttgaagaagaaaaagataaaacttttgtacgtctaaaggttgaaaaggttattgattctggagataatataaagggcaaaatattatatgatgtttatttcgagaatggctggaaatacgataaacaaattgtaaaaactgaagattggattgaacgtgtaaaagaatttattgtaactgagtcttttttgaaaaacggagacataaagagaactttcaaagctgttgattccaaaaaagattggattgctatcaagactaaaaccgaacaagaaatagataactctcaaaaaacagtcggaacttatatctataatgcacttctacaaaatccaaagcaaaaaatcaatggaaagttggttcgaactatcgagagaaagttttacaaaaaagaactcaaaaaaattttagaaacgcagaaatcatttcattcggagctgcaaaatgatgatttgtataatgattgcgttcaggaattatatagaaataatgaagcacatcaattgactctcagtaaaaaagattttgtatatctttttatggatgatattattttctaccaaagaccattgagaagccagaaatcctctatttcaaactgtactttggagttcagaaaatataaagatgaaaatggaatagaacatactcaatttttaaaagcgattccaaaatctaatccttattatcaggaatttcgagtttggcagtggatgtataatctaaatatttatttaagagatgatgattccaatgttactacagaatttttaaacacaacaaaagattttgaaaatctgtttgagtttttaaataacagaaaagaagttgaccaaaaagcgttgttgaaacattttaaattaaatgaaaaaacacatcgttggaattatgtagaagacaaaaaatatccttgcaacgaaactaaggtgatgatttcatcgagattagataaagtcgaaaatatttctgatgatttcctgacaagagaaattgagcagaagatttggcacatcatctattctgtgaatgataaagttgaatatgaaaaagctttaaaatcttttgcggggaaaaacaatctggatgaaaactcttttgttgaagcgttcaaaaaatttccaccatttaaaagtgagtatggctctttttcggaaaaagcgattaagaaattgttgcctttgatgcgattggggaaatattggaatgaggatgaaatcttaagatatagtgattattattttaaaaatatagaatctttattaagcgtactaaaacaaaggaatgaaaatatttctgacgatgaccgccaaaattataataaaacaataaataataaacttcgcgaagaattagaaaattttcaaaatgcagaaatagaatcttttcaaggtttaaggctgcatattgctcaatatattctttatgggaaacattctgaaggagataataaaaaattcaattctgcagatgatttggaagagtttttgaaagaatttaagcaacattcacttcgtaacccgattgtagaacaagttattacagaaacacttcgtgtagtaaaagatatttggttgaaatacggaagtggggcgaaagatttctttaatgagattcatattgaattgggaagagatatgaaacttccagcgaaagaaagagagcaattaaccaaacaaatttctgaaaatgaaaacacaaatcttcgtataaaaagtctgttagcagaaatgacaaatgacagttcagtagaaaatgttcgtccgtattctccaatgcaacaggaaattttaaaaatctatgaagatggaattctgaaatcggatatagaaattgatgatgatattttgaaaataagcaaaacagctcagccttctccatcagatttaaaaagatataaactttggctggaacagaaatataaatcgccttacaccggacagattatcccattgaataaactctttacaccggaatatgaaatcgaacacatcattcctcagagtagatattttgatgatagtttcagtaataaaattatttgtgaatcggcagttaacaaattaaaggataattatattggacttggatttattaagcaatttggaggaactattattgaacttggtttcggaaaaagtgtaaaagtttttgaagcagaagaatatgaagattttgtaaaaaaacattacgccaacaacagaggcaagagaaacaagcttcttttggaagaaattccagagaaaatgattgagcgccaactgaacgatacgcgtcatatcagcaagtacatttccggtattctttccaatattgttcgtgtagaagatggaagtgatgaaggtgtaaattctaaaaatatcgttccagtaagtggaaagattacgacacaattaaagcaagactggggattgaatgatgtttggaatgatttgattttaccacgttttgaaagaatgaatcagctaaccaattcaacaaacttcacagcttggaatgggaatcatcagaaatttttaccaaccgttcctattgagttttccaaaggattttcaaagaaaaggatagaccatcgtcatcacgctatggatgctttggtcattgcttgtgctacgaaagaccacgtgagtttactgaataatcagtcagcaaaatcggatagcaaacgctacaatttgagaaagaaattaataaagtttgaaaaagtggtttacaatcatccgcaaacaggtgatagaatcgaaagagaagttccgaaacaattcttaaaaccttgggatacgttcactgcagatgctaaaaataatttggatagaatcattgtaagctttaaacagaaccttcgtgttattaacaaagcaaccaactattatgaaaaatatgtggagaaagacggtgtgaaaactaaagagaaagtagagcagacgggaataaactgggcaattcgaaaaccgatgcataaagaaacagtttctggaaaagtagatttgccaagaattaatgtacctaaaggtaaaatcttaactgccacaaggaaaagtttagatacttcatttgatttgaaatctatcaactcaattacagatactggaatccaaaaaatacttaaaaactatttagaatttaaaggtaattcagagttggcattttcgccagagggaatcgaagatttgaataataatattgaaaagtataacgatgggaaagctcatcaaccaatcaataaagtaagagtgtttgaattgggaagtaaatttcaagttggacagacaggaaataaaaaagataaatatgtagaggcagccaaaggaacgaacttattttttgctgtgtatgaagataaaaatggaaagagaagttatgaaacaattcctttaaatatagttgttgaaagacaaaaacaagggttaaattctgttcctgaagtaaatgaattggggagtatattgaaatttcatctctctccaaatgatttggtttatgttccaagtaatgaaaatgagcctgacagaaatgactataataatttaaataaacaacaaattaataatttatacaaaatggtgagttcgtcaacttatcagtgcttttttattcgaaatgatgtttcgacttctatcgtaaataagattgaattttcttcattgaacaaaatggaaaaatccattgaaggagtaatgataaaagagtcttgtgttaaattaaagatagataggctaggaaatatttcaaaagcttaattttatgatcacccgctccatctacatcggcaatccggcatacctcaagctcaaagacgagcaaatgtatattatggaaccttcctctaacgagatgaaaggcaaaattccggtggaagatttgggattgctgatgttggaccattttcagattactatttctcatcagcttattcaaaaaatgatgggaaataacgtagttgtggtcagttgcgattctcatcatttgccacatggaattatgctgccgctttacggtcacaccgaacattccgatcgcgtaaaagaccagttagaagccagcgaaccgctcaaaaaacaactctggaaacaaaccatcgaatgtaaaatcgaaaaccaaaaagaagttcttcggcgattaggaaactattacgaaccaatgtttgattatcaaaacaacgttaaaagcggcgatattaccaatatggaaggtattgcagcacaacattactggaaatacctcatcagtcttgatttcctcagacagcgttttggagactcgcccaatcagttttttaatttcggttactcgattctaagaagtattgtagcaagagcaattgttgagacgggattgcttccggttctaggaatttttcataaaaataaatacaatccttattgtcttgcggatgatttgatggaaccttaccgaccatttgtagatttattggtaatggattggttgacaaagaatccaaatattgaggaactgacgaaagaattcaaatcacacattctacaaatcgcaacaaaagatgtattgatagaaagtaaaacaagaccattgttggtagccgtaaaaacaactgctacttcgctttataaatgttacacgggagaaaaacgactgatttcttatccagaactgatatgaacgccgaaaggtttaatgcgtaccgaattatgtgggttttagtattatatgatttgccgacagaaactaaagccaatatgaaagatgccaaccgctttcgtaaatctttgttggatgatggttttactttatttcagttttcaatgtatgttcggcattgcccaagccgtgaaaatgctgaggttcatattaaaagagtcaagtttatgcttcctaaagcagggaaagtagccattatgtgtattactgataagcagtttggagatattgaaattttctttgccaggaacaaagaagaaccgccaccgaccttccaacaacttgaattattctaaattttgatttctaaataaataaaaaatccgttgattatcaacggattaaattttgaggttgtgtaatatctcaaagatactcaaaaatgaaagcaattcacaac

SEQ ID NO: 1377 - DNA, 15598 bp, synthetic construct
  source 1..15598: mol_type = other DNA
  misc_feature 1..15598: note = Synthetic
caaaagtaatggattggccttttttattagaaaattttaagtagcaacttaaattaaaatatattatatgaaggctaactaattggaatatagcgcatataaatattgccacccttacttatagtgttacagcaatagtttctacattaaaatatttgatatattggcaattacaggccagaaaaaacaaattcactctatttttccgtaaaacgaaatctgtacccggttagggtcgttcacgatgagggttgcgtaccccgattcttgtacagttaaatatagtgtaattttccgccctggctctgttgttgtaatagttatttccctaccattcttcttctcattcgaagtgtagacagcatctgtcgtaacaaatttaattccaccgtcatcagaccccatcggcgcagtatacgcccttccgtagaaaggcagatatgcatttactgtatcgcccgaaactttgagcgaatatccataactaagaggtacagaaggatatccattgggcaaagctgtattagcattaaagatataatcttttgagtcaattttcttcagaatatgttccgagccttccatctgctgactcttgcatccagccagcataatggatatgataataccaataaataatacttttttcataaccttcaatattaatttgagtttatatttataacaaacaaaaactgttcatgtttacataatctatcacaaaagctactataactgcatttatcagaactagcgagaaattcaaaaaaattgatgttggtcttcaataattcggtcaatggaaaaaaacgatacggaagatgcaggttattgatggtcagcataggttgcgcgttaaaatctcggataaaaacaatcccattttctgaaactacaagtcgttgtattttagtgtgaaatgacatcattcgcccttatcttatattaaaagagcggaccggccataataacttcatcaaaaaaaagaaggtgagaactacttcccaccttaaatgttttcacaacggaataatccttattgtgataagctttcaatttttacaaaattacatttttttattcaaaaacacatacataattgttaaaaatgattacctttaatagttaaattattcaattatgaaaaaaatattaggactagatttaggaacaaatagtatcggatgggcactgatagacagagatgccaataaaattctaggtatgggtagtagaataattccgatgagtcaggatgtcttgggtaatttcgacaagggaaattctatttcacagacagccgaaagaacaggatttcgaggaataagacgactgagggaaagacatttattgcgccgagaacggttgcaccgagttcttcatgttctcggttttctgcccgaacattacgagcaacatattgattttgaaaaacgtttggggcaatttgcaaatgaaaccgaacctaaactagcttataataattgcgattttatcttcaaagaatcttttgaagagatggcagccgattttaaacagcaaaatccgtccttattttatattaaagccaatggaaaagaaactaaaattccatacgactggacaatttattatttgcggaaaaaggcattgactcaaaaaatagaaaaagaagaacttgcctggattatcctgaacttcaaccaaaaacgcggatattatcaattgagaggcgaagaagaggaagaaaatccgaataaattggtagaatttcactctctgaaaattgttgaggttgaagcagacgaaaaacctaacgccaaaggcgaaacatggtattatctgaagttggaaaatggctgggtttatcgtaggtcgagcaagaatccgttgtttgattggaaagataaagttagaaatttcattgtcactaccaacttgaacaatgatggtacagtgaaaattgacaaggagggaaatgaaagcagatcgttccgggctccaagtgatgacgattggacattgctgaaaaagaaaaccgaagcagaaatagaacattctcaaaaaacagttggcacgtatatctacgaaaatcttctgtccaatccaaatcaaaaaatacgtggtaagctggtgcgaaccatcgaacgtaagttttacaaagatgagcttattgccatactgaaaaagcagatcgagttacaacccgaactgttttccgaagatttgctcaacgattgtgtcagggatctgtatcgcaacaacgaagcgcatcaatttgtcttgagcaaaaaagattttgttcacttgttcgtaaatgatattattttctatcaacgtcctctcaggagtcagaaatcatctatttcaaactgttctttagaatttcggaagtataaagacaaggacgaaaacgaggttaaagaatacctgaaagccataccaaaatctcatccattgtatcaggaatttcgtttgtggcaatggctgtttaaccttaaaatatacagaaaagatgatgatacggatgttacttctcaatttattgcaagtattgaggatttagaaaatcttttcgatttcttgaacaaccgaaaagaaattgaccagaaagctctattgaagtattttaaactaacagaaaaaactcatcgttggaacttcgtagaagataaagcctatccttgcaacgaaacagggacacagataagaacacggctggcaaaagtagaaggccttccggctgatttcttaacatccggaacagaacaaaacttatggcatataatctattcggtaacagacaaaaaggaatatgagcaggcattgtcttcttttgcaaagaagcacaaaatagacgaagattcttttgtggaaaatttcaagaagtttcctccatttaaaagcgaatatggaacatactccgaaaaggctattaaaaagctattgccattgatgcgcttgggaaaatattggaattgggatgccatagacgtaaaaactaaaagtagaattgagaaaatcctcaccggagaatacgatgaagaaataaaagaccgtgttcgagaaaaagctataaacctgacatgcgagaatgattttcaaggcctgcaactgtggttggctcaatacgttgtttacgaccgccattccgaagcaagtgacattattctatggaaaacgccacaggatattgacgattatttaaaggaatttagacaacattctttgcgcaatccgattgtagagcaagtggttaccgaaacactgagggtggtacgggatgtctggaagaaatacggagacatttcagaaattcacatcgagcttggacgtgaaatgaagaaaactgcgaaagaacgtgaacaactgacttcgcaaattacgaaaaacgaaaacaccaatatccgcatcaaagctctgttgatggagttgaaagaaaacacggatgggaaattgaatgtagataatgttcgcccctattctcccatacagcaagaactattgaaaatttatgaagatggtgttatcaattccgatattgaaattcctgatgatattctgaaaataagcaaaacagcacaacctacaagttcggaacttcaacgttataaattgtggctggaacaaaaatatcgttcaccttataccggacagtttattccgcttggcaaattattcacctcagaatacgaaatagaacatattattccgcaaagccgctattttgacgatagtttcagcaataaggtaatatgtgaagccgctgtgaatcggttgaaggataaccaactaggcttagagtttataaaagaacatcatggcgaaaaagttcaattaggattagggcaagctgtcgagatcttttcggtagaagattatcagagttttgtaaaggaatattatgccaatagccgttcgaaacggactaaacttctgttagaggatattcccgaatcatttatcgaacgtcaaatgaacgatacacgatatattagtaagaccgtgaaaggattattatcgaatgttgttcgagaagaaggcgagcaggaggctaatatagtgatttgcagcggcaacatcacctctatattgaaacgagactgggggttggatgctatttggaacagcctgattatctctcgcttcgaacggatgaaccagttgaccaatagtactgcatttactgcatggaatgaacaatatcagaaatttttgcctactattccgttagaattctcgaaagggtttcaaaagaaacgtatcgaccaccgtcaccatgcaatggatgctttggttattgcctgtgttacaaaaaatcatgtgaatctgctgaataatcagtccgctaaatctgatgtgaaaagatacgatttacagcgaaaactgaggctatttgagaaggtttcatatttcgataaaaaagccggcaaacaagtagagcgcgaaatacccaaagcatttttaaagccatgggataacttcaccactgacgcccggaaagagttagagaaaatagttgttagtttcaagcaaaacctgcgggtaataaacaaaaccaccaacaaacatcaggcttacgaaaacggaaaaaaggtattgaaatcgcaaataaagggcgacagttgggcaatccgtaaacctctgcacaaggatacggtatttgccaaagtttcgttgcagaaaataaagaaagtaagactgattgaggcattaaaaaacgtagaaagcattgtcaataaagaatttagaaatgaaattcggaaaatcagtgcagcatacggaaagtttgaccctgataagatcaacaaatactttaaagacagaaaatatctctatgaaaaaacggatatttccaaagtggaagtttattattacgaaacagagaatgctgctgtacgaaaatcgttggatacatctttcaccgaaaaggtcataaaagaatctgtaacagatagtggaatacgaaaaattctgttgaattatttagcagcgaaagataataaacccgaactggccttctcgccggaaggtatcgaggaaatgaatcaaaatatagctgctttcaacgatggcaaaccacatcagccaatccgaaagatacgcatgtatgaaacaatcggaaataagtttcaggtaggatatacaggaaataagaaggcaaaatatgttgaggcagcaaaaggaacaaacctgttctttgccatctatgcagacgataaaggcaaccgttcgtttgaaactattgcattaaatgttgtagtagaacgactgaaacaaggtctgattgctgttcctgaaaggaatgacaaaggacatgaattgctgtttcatttatctccaaacgatttggtttatgtacctacggaagaggagttgattagtggaagtaagttcccttcagaggatattaagatagacagaatatataagatggtgagttccactggaaatcagtgcttctttattcttcaaaatgttgcaatttcaatagtcaataaagttgaattttcctctttaaacaaaatggaaagatgcattacgggtgaaatgataaaagatgtatgcattaagctcaacattgatcggctaggaaatattaaacctttactgccatgattaaaaaaacactctattttggcaatccggcatatttgagtatgcgaaacaaccagctggtggtaaggctaccagaggttgagaaaaacgacacattgcccgaaaaattcaaaaaggatagtgaggcaactttccctatcgaggatttagggattgttgtcctcgaccataagcaaatcaccttgactcatggcctgatagaattgctgttggagaataatactgctcttatcacctgcaatagtaaccgtatgcccgttggactgatgctttctttatgtggtaataaaactcagactgaaaaatttgcggcacagattcaggccactgatcctttaaaaaagaatctttggcaacaaactatcaaagctaaaataaaaaatcaggctaatgttttgagaaaatttcgtttatgcaacattcgcaatatggagtattgggcaagtgatgtaaagagcggagatccggacaattacgaagctcgtgctgcagcctactattggaaagaagcttttcctcaaatcaataattttctgagaggtagagaagaacttcctcctaataatctgttgaattatggttatgccattcttcgtgctatagtagcacgttcgcttgtttcgagcggcttgttgccaacattagggatacaccatcacaatcgttataatgcttattgtttagcagacgatattatggagccttatcgccctttcgttgatgctgttgtattttctattgtggataacggtgaaaactttgaagagttatcgcaatccataaaaacgcaattattgcagataccaactgtcgatgtaatgattaatgggaggaaaagtcctttgatggttgcagtcagccagacaacatcttcattagcacagtgttttgaaggtaaattgcggaaaataaaatatcctgaatttgtattgtaacattttgttatgaaacaggacagattaaatcaatatcgaattatgtgggttttagtactgttcgatcttcctaccgaaacaaaaaaggaccggaaggtctatgccaattttcgtaaaaatctgcaaaaggatgggttcacgatgtttcagttttcaatctatcttcgtcattgcatgagtatggaaaacgcaaatgttcatatcaaacgggttaaaaaatttctacccgaaaaagggcatgtcggaataatgtgtataacagataaacaattcgggatgatggaattattttatggaaaaagtgcagaagccaagaaaacggaaggacaacaactagaacttttttaagaataagaaatcccgaccttgatcgggatttttatttgaaatacatcattttttgaaatcctaatgagtcgcgataattattgaatatcagtatattatatacacctatactgtatttcaatgaactaagatacaaaattgaaagcttatcacaacttgttcggatacgactaccggcatggttacactgtatttcaatgaactaagatacaaaattgaaagcttatcacaacccttatgatgctgacaaagtgcaagccccaactgtatttcaatgaactaagatacaaaattgaaagcttatcacaacatcaggagataatatttctaaaacaatggtactgtatttcaatgaactaagatacaaaattgaaagcttatcacaaccaactcctttcgactttgcgtattcgggagactgtatttcaatgaactaagatacaaaattgaaagcttatcacaacggcagacctatcattacacatctgagtaacactgtatttcaatgaactaagatacaaaattgaaagcttatcacaacaggaggctatttcctttcttgccccagagcactgtatttcaatgaactaagatacaaaattgaaagcttatcacaactgaaaacaaggatgatattttaaaggctatactgtatttcaatgaactaagatacaaaattgaaagcttatcacaacaagaggcgctatcggttatcgaaaagggtaactgtatttcaatgaactaagatacaaaattgaaagcttatcacaacgagtgtaagcctttttcttctactaacgctactgtatttcaatgaactaagatacaaaattgaaagcttatcacaacactttaaaccaggaacatacagatcaccttactgtatttcaatgaactaagatacaaaattgaaagcttatcacaacatgaaacaattaagttagaaaatggagaatactgtatttcaatgaactaagatacaaaattgaaagcttatcacaacctttggatgagcagttggagcagttcaaggactgtatttcaatgaactaagatacaaaattgaaagcttatcacaacatcccaagtgtctaatcttctggctacatcactgtatttcaatgaactaagatacaaaattgaaagcttatcacaacgcgaacctatgacgtttattccgatattttactgtatttcaatgaactaagatacaaaattgaaagcttatcacaactgaaaacaaggatgatattttaaaggctatactgtatttcaatgaactaagatacaaaattgaaagcttatcacaacagggtcattaatagcctttagtagcattatactgtatttcaatgaactaagatacaaaattgaaagcttatcacaacaaacatcataatcaggtccaaatacttgacactgtatttcaatgaactaagatacaaaattgaaagcttatcacaaccctgatgggtcggttggatgcaaacgaaatactgtatttcaatgaactaagatacaaaattgaaagcttatcacaacagtaataggagtagcattggctatcaatttactgtatttcaatgaactaagatacaaaattgaaagcttatcacaaccaagcgtgtatgtgttcttccatctatcccactgtatttcaatgaactaagatacaaaattgaaagcttatcacaacaatagacaattcagatgaatattaccgtctactgtatttcaatgaactaagatacaaaattgaaagcttatcacaacaagccttacatcgcttgctctggaatatggactgtatttcaatgaactaagatacaaaattgaaagcttatcacaacttcgtgagtggattaagccggtattattggactgtatttcaatgaactaagatacaaaattgaaagcttatcacaacgggaatagcgacggcaataggcgctgttcaactgtatttcaatgaactaagatacaaaattgaaagcttatcacaactagatggtttagtggcataaattttcagtcactgtatttcaatgaactaagatacaaaattgaaagcttatcacaactctttttgcaatatcctacattattgtttactgtatttcaatgaactaagatacaaaattgaaagcttatcacaacatatacaatatgctttattttatccagttcactgtatttcaatgaactaagatacaaaattgaaagcttatcacaacaaaaacatggacacttgctcaaattgagcactgtatttcaatgaactaagatacaaaattgaaagcttatcacaacaatataaaattatgataaaccataaaagtaactgtatttcaatgaactaagatacaaaattgaaagcttatcacaacagtaatggatatctattatctattggaagaactgtatttcaatgaactaagatacaaaattgaaagcttatcacaacaacaattaatgtaacgaatatcattaaaacactgtatttcaatgaactaagatacaaaattgaaagcttatcacaacacctagtgagctagatatagcctcgtaaccactgtatttcaatgaactaagatacaaaattgaaagcttatcacaactcaaaaatgtatgcaatagcggtgaatattactgtatttcaatgaactaagatacaaaattgaaagcttatcacaaccagagtcggttaaatggctgagtgaaaatgactgtatttcaatgaactaagatacaaaattgaaagcttatcacaacacagattgcaccctttaatatttcgggtatactgtatttcaatgaactaagatacaaaattgaaagcttatcacaactaacatcttcatttaaatcttcctctttatactgtatttcaatgaactaagatacaaaattgaaagcttatcacaacggaattgggcacattgatacatcaatcattactgtatttcaatgaactaagatacaaaattgaaagcttatcacaacacaacgggttgcgaggctcacagttcaacaactgtatttcaatgaactaagatacaaaattgaaagcttatcacaacggattatcgctctttattcgttccataactactgtatttcaatgaactaagatacaaaattgaaagcttatcacaacttatgaaacaagaccctgaaagcctatcgactgtatttcaatgaactaagatacaaaattgaaagcttatcacaaccgtcaatgttatggtcgaatcagcttttgcactgtatttcaatgaactaagatacaaaattgaaagcttatcacaacacattcgctctgtttcatttgggcgggaaaactgtatttcaatgaactaagatacaaaattgaaagcttatcacaacagttgtattcgcattcaggtaaatcatttgactgtatttcaatgaactaagatacaaaattgaaagcttatcacaacataccatttgccattattatagtcatatctactgtatttcaatgaactaagatacaaaattgaaagcttatcacaacgaaggatgaagcgtatatccagtctttcagactgtatttcaatgaactaagatacaaaattgaaagcttatcacaacaatctctcattgattacattacaaatataactgtatttcaatgaactaagatacaaaattgaaagcttatcacaacagattttccttgcgagctgcttcattatacactgtatttcaatgaactaagatacaaaattgaaagcttatcacaacaccatacgtaatcaaatccgaacgaaaactactgtatttcaatgaactaagatacaaaattgaaagcttatcacaacattatcaaacaaaatgataacgcaaggtaaactgtatttcaatgaactaagatacaaaattgaaagcttatcacaacggaattgggcacattgatacatcaatcattactgtatttcaatgaactaagatacaaaattgaaagcttatcacaacagattctttctttggcttcattgaacataaactgtatttcaatgaactaagatacaaaattgaaagcttatcacaacagatcatatgtgcttagatcaccctctgtactgtatttcaatgaactaagatacaaaattgaaagcttatcacaacaaatattcgctgttggctcatcatattcaaactgtatttcaatgaactaagatacaaaattgaaagcttatcacaacagattctttctttggcttcattgaacataaactgtatttcaatgaactaagatacaaaattgaaagcttatcacaacagatcatatgtgcttagatcaccctctgtactgtatttcaatgaactaagatacaaaattgaaagcttatcacaacaaatattcgctgttggctcatcatattcaaactgtatttcaatgaactaagatacaaaattgaaagcttatcacaacagattctttctttggcttcattgaacataaactgtatttcaatgaactaagatacaaaattgaaagcttatcacaacagatcatatgtgcttagatcaccctctgtactgtatttcaatgaactaagatacaaaattgaaagcttatcacaacaaatattcgctgttggctcatcatattcaaactgtatttcaatgaactaagatacaaaattgaaagcttatcacaaccattagctatccatatatcttccgtacgccactgtatttcaatgaactaagatacaaaattgaaagcttatcacaacagatatcaaggtgtaatccccagtactgttactgtatttcaatgaactaagatacaaaattgaaagcttatcacaactgctggtcaaggttttgttgacaaaggtttactgtatttcaatgaactaagatacaaaattgaaagcttatcacaactaaaaacacaatataagaatttgcaattagactgtatttcaatgaactaagatacaaaattgaaagcttatcacaacctattttaaattcattaaattttggattacactgtatttcaatgaactaagatacaaaattgaaagcttatcacaactatatcaaatacaaacaaagggggtgcacactgtatttcaatgaactaagatacaaaattgaaagcttatcacaacggaatctaaacttatcaaatataaagaattactgtatttcaatgaactaagatacaaaattgaaagcttatcacaactaatggaggtatcttaaagttcgcccagaactgtatttcaatgaactaagatacaaaattgaaagcttatcacaacaacacaccttcatcaaaccaataccatgtaactgtatttcaatgaactaagatacaaaattgaaagcttatcacaacgcgactacctgaggtaaatctacaagtgttactgtatttcaatgaactaagatacaaaattgaaagcttatcacaactcaattatcgcttgctgtgaagattctatactgtatttcaatgaactaagatacaaaattgaaagcttatcacaaccggatatggcatacaatcaacgcaatttatactgtatttcaatgaactaagatacaaaattgaaagcttatcacaaccaaatccatcagctttggatgaatccatagactgtatttcaatgaactaagatacaaaattgaaagcttatcacaaccggacgtatgcagttaataagtgttaaacgactgtatttcaatgaactaagatacaaaattgaaagcttatcacaacagtttagtgattggaataatgtttattggactgtatttcaatgaactaagatacaaaattgaaagcttatcacaacagtgggttattcacccactttatatctttaactgtatttcaatgaactaagatacaaaattgaaagcttatcacaacatattgatgcagatggtaaatttgcaggtaactgtatttcaatgaactaagatacaaaattgaaagcttatcacaacaccttctgtgtcaccgataacaacagtagaactgtatttcaatgaactaagatacaaaattgaaagcttatcacaacactatgttatcaataatgatgatagttattactgtatttcaatgaactaagatacaaaattgaaagcttatcacaactgcaagttacagcgaaattggacggtaccaactgtatttcaatgaactaagatacaaaattgaaagcttatcacaacaggcggtaaccggaagtttgactgggaactactgtatttcaatgaactaagatacaaaattgaaagcttatcacaacgaagatagatataatggactatccaagataactgtatttcaatgaactaagatacaaaattgaaagcttatcacaacgtttcaaccttcaacaaacaaaatattgcaactgtatttcaatgaactaagatacaaaattgaaagcttatcacaacttaatttattaaattcaaaattttcaagttactgtatttcaatgaactaagatacaaaattgaaagcttatcacaactggaatttaacaaagatgttattattgaaactgtatttcaatgaactaagatacaaaattgaaagcttatcacaacttggttttattcctgaaaatctacgaagttactgtatttcaatgaactaagatacaaaattgaaagcttatcacaacagatgtttggactaataactttatgttattactgtatttcaatgaactaagatacaaaattgaaagcttatcacaactgtatggcataaccaccccaagtgcctaaaactgtatttcaatgaactaagatacaaaattgaaagcttatcacaactcttagccattaccttgtgagtttaatgcactgtatttcaatgaactaagatacaaaattgaaagcttatcacaacaagataggataaaggacactatcgaggacgactgtatttcaatgaactaagatacaaaattgaaagcttatcacaacgacaatgaacgcaccgcatgattgttaattactgtatttcaatgaactaagatacaaaattgaaagcttatcacaactgatagtgtattatagttgaaatcttgattactgtatttcaatgaactaagatacaaaattgaaagcttatcacaaccagtaggggagcatactccaatgtcaacaaactgtatttcaatgaactaagatacaaaattgaaagcttatcacaacatttgaaaaaacaccatattttgattctcaactgtatttcaatgaactaagatacaaaattgaaagcttatcacaacagactccaatcctccaattctatcagtttcactgtatttcaatgaactaagatacaaaattgaaagcttatcacaactatgctgatgttatacagaattttaaagaaactgtatttcaatgaactaagatacaaaattgaaagcttatcacaaccaggatcagccatcactttcataatgagttactgtatttcaatgaactaagatacaaaattgaaagcttatcacaactccgattggaaagggcgctacctcttttatactgtatttcaatgaactaagatacaaaattgaaagcttatcacaacatgacctcctccatcattaggctgctaatcactgtatttcaatgaactaagatacaaaattgaaagcttatcacaacggcggaacttgcgacgtttggtcgtgcccgactgtatttcaatgaactaagatacaaaattgaaagcttatcacaacaggcacaagaatgtgcattaactggattgaactgtatttcaatgaactaagatacaaaattgaaagcttatcacaacattatttttataataaatttcaaaatttctactgtatttcaatgaactaagatacaaaattgaaagcttatcacaacacatcgcaatcttgtgcaagttctccgcgaactgtatttcaatgaactaagatacaaaattgaaagcttatcacaacgcagtctttaagcgcgatttaaggaattacactgtatttcaatgaactaagatacaaaattgaaagcttatcacaacactcgccgctaaagaatccatgaggtttttactgtatttcaatgaactaagatacaaaattgaaagcttatcacaacgtcgcgggctatttttaagaggcgtttataactgtatttcaatgaactaagatacaaaattgaaagcttatcacaacatataagtgtaaaaatggaatcgaaatacaactgtatttcaatgaactaagatacaaaattgaaagcttatcacaacccgtatgcgtattgtagcctcttttatcgcactgtatttcaatgaactaagatacaaaattgaaagcttatcacaaccaactgctttgctttggttgccatatctatactgtatttcaatgaactaagatacaaaattgaaagcttatcacaactcaagattacagacctcagagctgaaaggtactgtatttcaatgaactaagatacaaaattgaaagcttatcacaaccaagaagagtttatgaaattgtaaaggggactgtatttcaatgaactaagatacaaaattgaaagcttatcacaacacagcgtatacagtgcaaattggcactccaaaaagagacttactttttcttttttttgtttttcgcaatcttttcttcaaccttctttttcactttagagtcagt

SEQ ID NO: 1378 - DNA, 15596 bp, synthetic construct
  misc_feature 1..15596: note = Synthetic
  source 1..15596: mol_type = other DNA
aaatctgcttcattggactaaagaaataaaaagtggggattctgaaaaccatgaagcacgggcttctgcttattactggcagaatatcttttctaaaacacagctaacaggagtaaaacaattcagaagggaaagagaaggattgcctcctaacaatttgcttaattatggctatgctattttaagggcaactgtggcaagaagtttagttggaagcggcctgttacctaccttaggtatttttcacaggaatcaatataatgcttattgcctggcagatgacattatggaaccttaccggccttttgtagataaaactgtgtatgaaattatagcaaacggcgaggccctggatgaattaaaccaatcgcttaaaagacaattgcttgcaataccgcaaatggatgtattaatggaaaaagaacgaagtccgctaatggtggcagtacagcggacaactgcttcattggccaaatgctttgaaggcaaacaaaagaaaattgtttaccctgaatttatgtagaacctaattttaactcttggagggtttaaaaccctccaagagtttggcgtaaagcaatcgtatgagactaaacgaataccggattatgtgggtgctagtgatgtttgacttaccaactgaaactaaaaaagacagaaaagcagcttctgactttaggagagacatgttgcgggatggttttgcgatgttccagtttagtatgtatttgcggcactgcccaagccatgaaaatgcggcaactcatataaaacgggtcaagaactttttaccagataaaggacacgttggaattatgtgtataacagacaagcaatttggggatatggagatattttattgtgctgagaaagcgaaaaggagggatattcctcagcagttggaaatgttttgagggaaataaaaatgccccgcattggaaggcgaggcgacttaaatgttttcacaacggaataatccttattgtgaattactttcaatactcaaagataaaattttaaaaacaaaaacaataactttttaataatgaatattttaggacttgatttaggaacaaatagtataggatgggcattggtagagcaaaattttgaagagaaaacaggccaaataattaatgctggaagcaggattatcccaatgagtcaagacattttggggaagtttgacagcggagtgtcgatttcacaaactgccgaaagaactggttttcgtggtgttagaagattgagagaaagacatttgctgcgcagggaaagacttcaccgtgtattaaatatccttggttatttgccagtacattatgctacacaaatagattttgaaaaacgatttggtcagtttgttcctgaaaaagaaccgaaactgccttatgtgttcaattctgagactagtaaatcagagtttcttttcaaagattcatttgatgaaatgacaaatgatttcaaactacatcaaccacaattatttgaagaagtcaaaaaaaacggagaaacaaagaagataccgtacgactggacaatctactatttacgtaaaaaagcgttgacaaaaaaaatagaaaaggaagaattggcttggttgcttctgaacttcaatcaaaaacgtggttactatcaattgcgcggcgaagatggagaagaaaatccaaataaactggtagaattttatgcgctacgagtgaccaaagtagaagcaacagaagacaagaaaacaaaagacgaaatttggtacaatgtcgtcctcgaaaatggctggatctatagaagaactagcaaaacacctcttgattgggtaggtataataaaagagtttatcgtcacaaccgatttgaatgacgatggaaagataaaattagacaaagatggcaaggaaaaacgttcgtttcgtgcgcctgcgccagaagactggaccttgctaaaaaagaaaacagaatttgacattggcaaaagcggcaaaacggtcggtacttatatctacgacaccttacttaaaaatcttaatcagaaaatcaaaggcaagctagtaactgttatcgaacgcaaattctataaagctgaacttgaaaccattctgaaaacccaaaaagaattccacacagaactacaagacggaaaactgtatgctgattgtttggaagaattgtatgaatacaatgaagcgcaccgaaccaatattggcaaaaaagacttcactcacttgtttttgaatgacattatcttttatcagcgtccattgaaaagcaagaaatcgctcattagtgattgcaaatttgaaagcaggacatttgtaaaagaaggcaaaacagaaactgaaccgatcaagtgtattgccaaatcgcatccactatttcaggaacttaggttgtggaaattggttcaagatttgcgcatcattcagaaagagaagctaatagacggcaaattctatacggatgtaaatgtcacgaatgaacatttcaagacggtagatgatcatactgctcttttcgagtggttgaataaccgaaaagaaattgaccaaaaagcattcttgaaatattttaaattgagcgacataaaattccgttggaactatgtggaagacaaaatctatccttgtaacgaaacacgaagccaaattctgagccgattggcaaagattgaaaatgtgccacatggttttttaaatactgtaaaggaagaagccttatggcatatcctgtattctgtggaagataaaaacgagatccagagagctctaaaaacgtttgcaaccaaaaacggactaggtgaagattttgtcgagcaattcgcaaaatttccaccgttcaagaaagaatacggttcgtattcagtaaaggcaatcaaaaagttgctgccattaatgagaatggggaaatattggaatgaaaatacgattcatcctctaactacaaaacgcatagataagattctttcaggcgagtttgacgacaaaatcagaactcgtgtcagggaaaaagcaattaatctccaagatataaacgacttccaaggcttgccagagtggttggtatcctacatcgtgtacgataggtcttcggaagatggcaatgctttggtttggaaaaaacctgaagacatcgactattatttacgttatatattcaaacaacacgagctccgaaaccctatcgtagaacaagttattactgaaacgctacgtgtggtaaaagatatttggacgcaacatggcaatggaacagaaaaattctttaacgaaatccatatcgagctaggaagggaaatgaagaatcctgccgacaagcggagacaaatgaccgagcagatcaacgagaatgaaaacacgaatctgcggatcaaagccttgctaatggaaatgatgaacgatagggaatttgaaaatacagtgcgcccatactcgccttctcaacaagaaatcttaaaaatatatgaagaaggtgcactgaatgcaagcaatgatattcccgaggatattttaaagattgcaaaacaggcacaaccaagttcatctgatcttacaaagtacaaattgtggctacagcagaaatacaagtcgccatatactgggcgtgtgattccgctgaacaaactatttacttctgcctacgaaatagagcatatcattccgcaatcaaggtattttgacgattcgtttagcaataaagtaatatgcgaagcagccgtaaacaaggacaaagacaatagccttgcgatggaatatatactaaacgaaggcggcaaagtgctagaaataggctttggcgaatcggttactattcttcaaaaagacgattacgagcaatttgtaaaaacacattattacaaaagcaaaatgaaaaagctgctgatggaagaaattccgcaatcgttcatcgaacgccagctgaacgacacacgctacattagtaaggtagtcaaaaacctgatgtccaatattgtgcgtgaagaaggcgaacaagaaaccatttctaaaaacgtaattgctagcaatggatctatcacaagtacattgaaacaagattggggcttaaatgatatttggaacgacataatcacgccacgctttgagcgactgaaccatttgactaataccaccaattttggcagcgtcaaccccaacaccaataaattcttgccacaagtaccaatagaactacaaaagggattcagcaaaaaacgtattgaccaccgccatcatgcgctggatgcgatcgtgatagcctgcgccactcgcagccatatcaattatttgaacaacgaaagtgcgttggggaaaggcaaagaggaagtaaaggagaaaaaacgctacgaccttaggcacaagctttgcactaagaaatacaacgatgccagtaagcaacactataaatgggcatttaacaagccatgggatacttttacccaagatacccgcggctcgctttattctattgtggtaagcttcaaacaaaacataagggtcatcaataaaaccgtaaatctttatcaaaaatggaaggaaaatggggatggaaaaatggtaaaagagttggtaaaacaaacaaaaggagatagttgggctgtgcgcaaaccgatgcacaaagatactgtttcgggctcggtaaaattgagaaacaaaaagactgtaaacctttctctagcaatagacgaatgggagtcaatagcagacaatccagaattgagaaaacaaatcaaagaattagtcgggttgaaatacgacaaaaaattgctcctgaaatattttaaagaccggggtaacaaatgggatggtaaagacatttcgaaagtcaatattttctattgggagacagataacgtagcttctcgtgtaaaactagatgaaagttttagctcttctaaaattgaaagtatcaccgatagcggaatcaaaaaaattctttccaggcatttagaaaaataccacgaacacaaaaatgacaaagtaacagaacatcccgaactggctttcggtcctgatgggatagacgaactcaataaaaatatcgctcaactgaatggaggcaaaccacaccaaccgatccacaaagtgcgcacctacgaacctaagggaaataaatttgcagtaggtgaaacaggaaacaaaaaagacaaatatgtagaagccgccaaagggacaaatctcttctttgcaatctatcaagacgaaaaaggcaaaagtaattatgataccattcctttgaatattgtgatagagagacaaaaacaaggattgttttctgtacctgaaaaaaatgaggcaggagatttcttaattctatatctatcgccaaatgatttggtgtatgtgcctggaaatggagagaatatcaacaccattaattttacaaatcttaacaaagagcaaaaaggtagaatctacaaattcgtaagttgtacaggaaatgaaggtcattttgtacctaataactattcaaaagagattgttaaaaacgaaatgggtacaaataataaaagtcagaatgcgatcgatgggactcagataaaatccgtttgcacaaaactaaaaacagaccgtttgggaaatgtaaaaccgtactttaaggcttcataaactccaaaatcttcgctcttttttaacaaaatgtatttaacaaaatgttaaatacattttgtatatttaaggcatgaaaatgaatgaggtaaatccttttcctgttactacctatatttcacctaattatttctgcaatagagatttagaattaaaaattcttcttaaaaacaaccgaaacaatttgcataccagcttattttcccaaagaagaataggaaaaacaggactgataaaacattttttaaccaaattagcaataataaagcatctaaacgtctgtatatagacatcttttctagccaaaaccaggccgaatttatcaaaactctttccaacgagatcttccaaaggtttccgcctaacaaaagtattggtcgcaaatttatggaagccatcaaatcatttcgtcctgtgcttagttacgattcgctttcgggtacgcccgaattgagtttggatattaccgatgataaaacgaaagaaaaatcgatccaagaaatctttcgctttttggatagtcaacaaaccccactcgtaattgcgatagacgagtttcagcaaataacagaatatcccgaaaatgtggaataatctgtttggtctattttacccaaatacatactttggcaagatgagtaaaatggtcgtttgctgttgtggaacatttcgttcatcaggcgcatattacttattaaaagtcactttgaacaagccaaacgtgatattacagatgaaagtatttcctttattctggactggacttgcaggcatacctattacacccaatatctttgtaatcaagtatttgccagcggcagcacaaaaatagatctcccacacactctgcatgtgtgcaaagcgatactcgatcaagagcaaatggtattttttcagtacaaaaagctactaactaccgaccaatggaacttgcttacagccgtagcgaaagaacaaaaagtaacccaaccttatacaaacagctttatctcaaaatatcgcctaaaatcttctgccaatgtaaagcggggtttcttcagtaatcagccgaaaatttactctaagcttattgcttcctataaatcaattttttactaacgccgtttttcggctatttgtaacgaatacttcagtttgaatttatacttcacacctggaagtttttttaaaacattgttttttgagtgtaacatttggttgcatattgtttaaaattattaacatttgtagtcgtaaacatttcattttaaccattagatattttttgaatagtattatatctatagtttaaatctggtttttaataattaacactttgatatactaatcattagtattaacacttccttaacaaaatagtaatatcttttatatgtaatatttatattgatttttaattaaaagtttgacagaaacagcatgaattttaatttgagtttaatattccattaataaatttcactttataaggattttattccttttatatcatgtgccttttgggagtttggtgaaaaactgcttagaaattgttcgattacctttacaatattgatatttttaaaatggaagcttaccgaatattaaaacaaattatttttacatccctcatctttatcactatttgcggactaagctcttgtgggaatctacgcagcccttgtcagtggcccagaaaatggtttagaggagaaagtcatgaaaaatgtattaataattcatatataggttataaaccaatagttaaacaaggaattattggatggaaagtttgttctgttaaaagagattataaaaaattaaaaagagaattattcattaatgtagatccatttacttatgaacctcacaaaggtagaccaaataattttgaagtagataaaattggtgattaccaatggagtcctggagataatggtttacaaggggctaatcttccttcccttctaagtgtgggagaaataaaagatggggaaaaacatatatacaccaatgttgttcaggcatttaacgcatgtccctattatacccatataaaagatgaagccaaacagcttgattgtccttcaacttatggttgcctgcgagaagaaactgaaaaaaaactcgataactgtttacacagagagaatggtggcaaagcagacggagagtttgcagaaataaaatgtcctaaggatgtaagtagcagtaataatgttacacagctttttgacccaaccaatcaaagaaatcagcaacttgcggcaggaataaatgtattatatagccattataatgcaactgaaataggtgccaattatgtggttgatcctagcaaagatgtaaaaaaaggccctgattcaaagtatgttccattacctagaacggcctatttgaaagttattatcggaccctccggtattggcaataaggaccataagcataaattacttttttataataaaagccttacccctaacgatggaaatcagatttaccttgattctgaaaatcaggacggtctaagatactgttctttagatgatgcgggaaataaaacatacgtagtatctgttccacttgtagcggctaataaccacctagtcttaattcaggatataagcgatgggtctaaggaagtcatcaaagcagagcttacagtaatacctaacgataaatttaataatatcactagcgttttgaatagtaataatcgggtattaaatatcaatactatcaagatccccactacaaaaaacttggcgtttgataaaattgatggtagtcaggttaatgaaaaacttatcaatctggcagaatgcaaattaagtggaaccagaaggaatagtttagaaaaagcacttgaagacgcatttgctttaaatcctaaaacaaagagttccatttcacttgcaacagttaatcctgctatagatatatcagtaaaagcctgcgatttgagcgatgatctgaaggagaattttttagatgacggggatatccttttactagtggataggatatgggaagcgtggttagaattaaatcgccctcttgactttaaacaggcttattatagggcattgtctaaagtttgtaaggaattatatttaaagcattcgtccaattgtggctcaacaagtagttacgaggaggtagaaaagcagatggctgctatccttgtcggtggtatagatctgggttacaaacatttttctaaagcttccacatatgatggaggcattcctgatcctaatttaagctatgaaaatactggtatagattttagtaaggttgccagcccaaattactattttttagataatggagccacaaacggtgtaacacttccttcaactgcatcagatggaccagacttgaatccattagaatatcatactactgtttttctttttgcaaaatacatttacaattctgcttcaaacagtggtacaaacttatcttctaatgcaacaatgacacttgcccatgaattgggacatgtatggtctcaaagctatatgatgggtacaacaggaaatgcaggagatcaacatggttattattgcgcaggatataattacgctgattgcgcatttagttatcgctctgataataaattatcaataacaaaattcgacaataatggaattgttttctgtgaagcacacaggcatctcatgtttaatcaattaatgcgcaagtacttcaaatgaaaaaacttttcgcattattcttgatggctaattcgtattctctaataacctattcacaaagtagttgtttaagaggtttgtgtattgaagaggacagtactttttatcatgatacattttatcaaggtcaaactatcgcttttacttattattttaacaatactacgaatgaggataaattcgatagaaccattcaatcatttcattttacaagggttttacctaagggaaaatctgaagaattatcccaaatgaagttgccaaacttagaccgatttaatactaaacctgacacaggacacaataaaattaaagctaattataaagcacctgcaatatttgattcacattactggcatatttggaatgactctgttactgagtacaacaaaaaatacggagaatctaaccgaattgggttgttgaagccaggtaagtactttatgaaagttcaaactcacttagcacctgatgatagtttgttaacacttctaaaacaatttgaagtgatagaagctaaaggaaaactgaagcaggaattaatggactatttaaagtgtattaattattattactattttaaatacggagagaatgaattggaacgtatttactcacctgcattgccaacaataacctggtacttgaatacctatccaaatggtatttacacagctgaagtttttaggttcataactaataattgggagaacactggctacaaaccacccttcggtgcggagggaagggctaaagaatataaaatgcaaatggaactatttgctaaagtcaatggcaatttcagcaatcttgataataagataaacaaggccatctataatatcgacatcatgatgaaataccggcttattgatgatgaagtagtatttatggacaaattcctgaaaagtattgaagataagccagttatcttaagtgacaggtttattgcccagtttatgcgattatataaggattctaagcttagtaattatgcaaggttaaaacagaataaggaatgattaagcttagattttttattgtaatactattgttttggaactctgtttttgggcaaggtattatacagttgcaacagacacctatgcttataagtccttgcttcacaggttctgatactgctgcaagaattatcgctgcgggacagtttgtccatcaaaaatataatgatactgaaaggggaaaagatcgaaataatacaaattcagcctttttaatatcctatgataaaatgttttccggcgggaaaaaagccatcggattctatacatcagttgaagacaacagggttactgataatagatttatgggaggagtaacatatatgcgattgcaagctcccgttacagaccattggttgaacaggagcctgaaaaccaggcttatagaattcaatgtcaactacataccacacttcatgtccttaaaaatagatcagaaaaattattcattgaccccagcaatatcactgaatattgcgcaaggttcagcatatgaaaatcacagaaagaattatgagcataatgactctcaagacactgttagctttgtaaacttagcaggtggaacaacccaaaaggtttacaataactttaaagatacatcattaggatacaaaaatatcaccttttatagggctggggtggctgcagcatgtatgtttacgagtcagaggctttttattgcatatcagttaaaatttttagttgacaatttttcactcagttactcagattattcttacgatagattttacgatgcaaaacaaggagaatggaaagaaaactttaaaaacaggaacgactcatataatactttttcttaccaggtcttgcaggtaatatcgtttggggccaatttccctaaaagaaaaaactctctggtccaaattacacctattgccgttatctcttataattccagctctttaaacgcctcttaccggcctcttatagatgatgaatattattattatgtcaacaatttgaagtatgactatacaaacgtattcggattttccggtagaaattttagtttcaatcttagagtagggaaaatacttgcaggtatcaatactggtcaaagcaatttctattctacggttaccaattattacctgggctataaagcaaaaaagtatactgtaacagcaggatatttccctaataatatttttaacacaagtttaaaattccttttataaccttactaaatcaattttatgaaaaagtattttttactatttctccttattatctgttttcagcagacttattctcaatcaaaattgataaagtatacggttaaaagtgtaaaactgaaaggagaggaaggatacttgaaaaagggcaatccggataccatcaaagcagaaagggaagtaaggcagtttgccaggatggccaatgacggaagatggacttccgtcagaagattcttcagggatgatcttgagtacagcaaatttattgccagcctgtcctacgatggaagcatccggagcatgaaacctttcaaagtaattactgagaatgaaagtgagctggtcatagaaaaccaaatcagcaagcaaactcaggttattcagttcacaacgaataacacaaccaaaaacatagagcaggttaacttacaaacttcagaaacaaacttccgcctggaagagacctctcctcttaattatgtaaggttgccagaaaagcctgaagagaagatagaatacttttcttccgttccggccgcattccaggataaaggaaatccagtttccaacaacctgatgtttggtcaggtcaattttgccgatctggagataaaactggattactgtgtgggtataggaccgtttgaaaaatgcggtggcaacactcaatcatatgcttttggacctgttatttcaggtatagatctgaaagactacgctccagaggaacaggaggaagcatttgtagaaattgcagacattacagctttcagtactgcttttgatgatggatctggaaataaactgtcatatcttccccatgaatatatcctcacggctgtagtggcagatgtaggggccaattctcttgtctttatcagggaaggacttgaaccatgggaatatacaggacaagaagagcttggttacgaagtatttggtgcaccagttgcagtaaaagttttgaaccagactatttatgtacttgataagggtaaccaatggggaaaattaccatgtatccatttgcttaggataaaccacaccagcaacggaaacttcagcgttaattatatagggaaacttaatacaggtagccttgtcctgaatgaacctaatgatgttggtggctatcttggatcaaatgctcataaactattagttagtgatgcaaatggaatacatataatacagataaatccatcgtcatattttatgaatagcgggactttaccacaaacaataacacaattacaggatcctctttattcagcagatttttacacagtaaaaaacgcaaaaagaatcgattctgatatttcgggtacgacagtgattattacgcagcagaatgaaattatttcattatctaataacagcctcctgagcgcaacaactaatattaaattcgattatataaagcctcttcgaggttgtgaccctactaatcttgcctacatggcccgtgaaaaagtttgggtaattacggacaataatggaatgcttcataaactggatatgtacggcaggtacatggggggtgacggaaaatttggtgttaatgaaacaaatggtgaattatattttcctgttggggcaacaccaaaccccatttcagacctctccaatccatatcgctaccgattcatcgtggctaaccgatggggcattgagacaggttttaaattattcgccccaaaactggctattccagaacttaaagtgtttgagaacatgacaaatggcaaccttacagcagcttttactacttctggtatgtggcaagctgtagaaggtgcaagatctgtacaatttaatggtttcttcataaatggcactcctgtaacccctacaagcacaagcagttctgtttcttatgccattcaaggtgatttttattctgaaaatacagattatttgatgggcgtacctaatacagcagaatttacaattgcctccttgccagggttaaaaagaggttggaacaatatttacgttatgatcacggttaaaaaggtcattaaaggagaagaaatcacagagcctgtatttaaacttataaatttctattggttaccttccaattttaatactgtaggtgtttcaggagaaaattttgctgagtttaaaattaatgataacggtggttcatttgattatatttataagccaataacattacttgacagagccattttctatgtagaccaaactagagttggagtcggtaaccttggagttctgaatgtagaagctggttgtacattttattcaaagttcgatcagcaacaagtactaagcaatttttcatttgatagcattggaaaaataaatgtaaaagcacaaggttttatttgtgtagaaactggaacactgccacaagttgtatacagccttccagatttgccccctcattttagcctggacaaatattactatttgggaacaaaccctaacttaccagattttttcggaggtgcctgtgaatctccctgccagtttttggcttataaacaacccaaagtttcttttaaagtaagtgttgttcaccctaccgtctcaggccaggggataaaagttaacatttctgatgttttttcgacctatgcggaaagtcaccaatggacattgataaaaaacgggattataattgtttcaaaaatagtgaccggccagcctgttgcctctgaactatccgccttattgcaaaccacccttgaggcttgtcaggaatatcaggtcaggttatcaattggttgcaataatattaatttcatacctgtaaacacggtgacattcagtaccaagcccccaataaatgcaggaaaagaagaatctgtgtgtgaaactctttttccttatcaactttctggtttccaacctatacccacaaatgggtacgggacactgcccggaaaaggaaagtgggagattgttacgaccggaactaattcgagtataacgcctggggggaatatttctataaccaccagtacctctcgagacagggtaataaaactttcatattcctaccaagacttgcttggctgtatcgtatccgctaccaaaaacctctttgtcacagctgtacctgctaaacctgtcttgaaattggttgatacagtttgtgttaatggttcgttgcaattagcaagcacaaacacacaggaaggagattatgtatggcaaggacctggaaattttaattttgaatcagctgcaagatcaatgttaagagttaaaacaaatacatctatgtctggaatttattctgcaaaagttgtaaggaacggctgtgaaagtttacctgggtcaataaatgtaaaggtaaacccactaccggtaatcacgttcccggactctgtaaagcacttgtgtgcgtggggaagtgcttataatcttaaggtaaatgtgaatcctggcggaggaaccggcttatggtctggggctaatataaggcaaaattcttccactaaacagtattattttgatccatttggtttgccaatcaaagaatatccattaacctataactatagtgccccaatcacaaagtgtaaacaaagtgccatccaaaaaataattgtaggtcccaaaatagaaacagaaacaaaccagaccgtttgccagaacacaccacagtttccattaattgccagcccggcaggtgggacttggtatgaatacgatctggaatctgttgttacaaactttaaccctgcctcaaataatattgggccgcactattactggtacacctataccgacccatattattgtgcttcacaggtacaaaaaactattaacgtcaaacctgcgcctgtttctaccttgtctttgtccaatccggctgggctcaggtacaaatattatgaaaacatcttttccacaccatggacaggaatgccagactttagcaaattggcaccactcaaagaaggaacggcagtttcggccgacctgggcaacaggttgcgagaaacccagtatggatttgtatatgaggggtttgtgaatgtcccgtcttcaggaaactatactttttatatgtcaaatatagacggggcaaagctttacc

SEQ ID NO: 1379 - DNA, 15594 bp, synthetic construct
  misc_feature 1..15594: note = Synthetic
  source 1..15594: mol_type = other DNA
agggtttgtacctatgctttattcaaagataagaaatcttcaaaaaagtttttggccatgaatgttcattttgatcatatcggtaatgttgccagggtaaaatcagcagacctgattcttaaaaaaatgaaggagctgaatccccagaatttacccgtggttttaagtggtgatttcaatttaactgaagaaacggagcccataaaaattttatccaacagtctttctgataccttctaccattccgaaaagcaacattatggtcctgcaggaactttcaccgatttcaacgtgaacgtagtgcctaaagaaagaattgattatattttcgtgaagggttttaaggtaaaatctcaccgccacattaacgataggagagagaatctactgtatccttcagatcattttcccgttttcacggagttgaggttttagagaagaaagaggaaagaggaaagaggaaagaggaaagaggaaagaagaaagaggaaagaagaaagaagaaagaagaaagaagaaagaagaaagaagaaagaagaaagagggagatttaatcctttattcctattaatcatataaaacaggcgacgctgaatattcaatgtcgcctcttcttttatgtagtattattaagttacgattgtgcatttttgggaatccatacacttacattgcctgcaggaacaggaaattggccccaaccttggtcgtcaatgatcacttcgtgatccggaaaatgtcccataacatcacagaatgattgcccctggtataactcaccaatttccattggtttttcgtacgcgtctttgttgcttaacgtaacggcgcaagctttgtgatcgttatctccaaatcttatccaacctaagcaatttgcatcttcgaaatagtctttctgatctccgtaagcatggtcttttctggctttaatcaaagtttctatgccataagctttttcaagaaaaatttcgtgatcaccttcttggtaatgcgctccaaataaatcaggatagaatatgcatggatagccatctttacgaaggagtattaaagcgtaggcaatcggtttgaaccaagcctgcacttctgcttccaaggcctgaagcggctgggtatcgtgattaccaacgacggttacagcatgcaaaggatcgtgctgggttaacgtattatcgaaaatggtgcgcaaatcatagtttcccccttggtgagacgcttcataaaagttatgctgtaaacagctatcgaaaagactcatactgccttcagtggaggcgatgtagttttgtaaaagatcgagctgtcccggagcccaatattcaccgacggcaaaaatgttcttgcctgtgtttgatcttaacagggttagccactctttgaaaaagtcgaaaccaacatgtttcaccgcatccaaccgtacgccatcgaaatcagtggtatcgaaataccattttccccagtggttcagttcttctcttacaaatggatttcgatgttcaatatcgttgtacatgaggtaatcatagtttcctttttcattgctgatcatctgatcccaacctttttccgtatattcgttcagcacgcggtaaatagctttgggttgcccttcggcataatccacgcctgaaaaacaattgaaatcccaaacgaaatcggagtactgagttcctctgccagcaaaagtaaacttggtataactttcaatttcgaagggctccgaaaccgtttcatccctattgtcttcattcaccataatcgcgttgaatttttccagctcatcgccacctgctttatgattgagtaccacatcaacaatcaattgaatatgatgttctttaatggttttgatggcctcaagataagactcttttgtgccatattttgtcgggatgccgcccttttgatcaaactcacccaaatcatacaaatcataaggatcgtagcccacagaatatcctccacctgcacttttgtaagctggcggaagccaaacggcagtgatgcctaactcttcaagatgggctgcattggatgccaattccgaatacagttgcccgttgccttcgctgtaccagtggaaatattgaatcaaggtgttgttcataacggaatcttatttttaattagaaaaaagtaccatgaaaattgcttgccaagattgttaagtttcgttatttacaattaacttttggacttataaaccatttctatgtaatggttaaaaataggaataaatgcggaggatctgtcgttttcttttctgagtttcagacaataagtatgaatgactaattactgcctgttcttcattttcttttattgcgaaactcctgcataaaaacagtacttcctataaaatgttttcaatgctttttatggctaaatcactgtttggattcaccctgaaagtcatcattctttttagattgacctcttctcatttggggtggttctggtattttccttccaccataagaatacagggttcatgcgtttctttctgtccgcacataacaaattttttatcttacagcagaaggagggcattgccccaattccgtgcttcagtactatctgtatcctgcttgacgatgattttccttaatgaaagcgcgtagctcctgttgggctattgtttactcggatggcaatgatggagttctttaagtaactactttacagcaattaaaatgtcaatctccgcatctgccggattttgagctttcgcaccaaacacttcaaagtctgccgtaaatgtccggtctaaatccatttcccaaatctttttccattgatcgatgatcagttcttttgacagatctcctttggccgaaaatttcacatagtttcctccatcaaaggattgacccatcattccattgggaatttcgtttaggttttccaccttgcaacccaatagagtggtgtagggtttggtgtggtcactttcataatccgtgtatatgcaatagattgtagggtctattttgttggggatgagatctaggacgttctcattcataaattgactccataaattaccaatatcttttgctgcctgattgttttcgttggttgttcttaccgcaataccgatcactttaaaaggttcaatttttactttgttcattttgcactgttttttagttagcccacaaaattaagacggttttttgaaaaccctatgtcaagggtgatgaaaaatatttttccctgcagatctcaaagtattgctgcaaggttattttgtggggttcagagtgttcactgagggcaatgaggttaagaattcaatccaaacgaaatgttctgaaatcttttcttaacaaacaaaaagcgatgagcagccaattgtcctgtgtgctgtacattgcaaaaggttcaatggttctctcagttgtttcgttggtttcaggtgaatgatagtttattttaaccagcttaaagttggtcagggctaattgcaatgtggataggtcgttgcttgttctgttttgatctgcgttttgtctgaataccatccggtgggaaagcaggtcggctttatctttggtattgattcgtagaaccgattttatcttgttaattgattcaattccctttcaacataatttttttgcttcattttcttgtattcaaaccatttttggcgattttcattttcgaaagtgatgacatatttaaattcttgaaaaggtttctttttgtccagcgcttttaaaagtctatttttcaatggattttcgcaaacattttcagcaaaagatttcataatttcatatgaaaatgaagaatcccaaatgttgatttctacataactttccccatctctgttcagttcacttatttgttcattccacgcttcattttcttcaaaaaaactgtcatcaaagtttggcaaactaattattttaaaatttgttttattgatgaatactttcattccacaatcaaaatcattttcaatttcatttatcaaattttcaaggtataaattcatgatttttcagatttaaattcaaatttaagaaatgaacatttaaaaacataattttggaaccgatttacgataacggaaaaagtattgacgaaatcgaagcttcggcttcgccaattgccggacaaattggaagaaatgttcaatttcgaccaagagcagatcgtgttttttcaatgaaactaatttattaataaaatgtggaattgaaaaatattggggtcgaaatatttctaattcccccacttcaacgctttccccgcatttgagttcccttcggtcgtcgaaccacttcgttagattttgccaatattgtgctacccgtattgttattttatttcagggaatttaaaatcattaccaaaaagtgaataaacaatatattttataaattcttctttgggaatccgttctccgttagtattgtaagaaatagataaattattttctacattataaatgattagagcatgagaacccaaagtgtctccgccatgtccataaaaaatacgcccatcaaagtcccaaactgacatacctcttccccaattttctttccccaaaataggcgtcattgtttctaatgtttctttttttactattttgtttttaaataaactattgatgaaaatatttaaatcatttggagtcgaaactatatcacctacaccaataacatttggaaaataaatttcttcttttaatttagtccattcattgttaataaacttataaggatcgaatatgtttttaggattcgattttattgaaaaggtgttttttaaatttaatggttttgctatttcttcactaaagattttatcgtaagatttactatacttttgttcaagaatttttgtcaacaaataataagcggaatttgaatattttatttgttcattaggttggaaattgacaccttgctttattattaaatcaaaaatttcgttctcaggaactttctttgttacccacacatctccatcttttacaacataacttcctaaaccactactgtgttcaagtaaatttttaatagttattatctcagaattaggaatttgtggataaaaatcagatagtttatcttctaattttaactgtttattttcaattagtttaaaaattaatgtagccgttatcattttggttaccgagccaacatgatattttgtattgttattaaatttcagattttttatgttcttttgcccaaaatttttattataaattactttgttattcttacatattgatacacttcctacacccaaattattattttcaatatattttagaaatttatttagattttcatatttatatgtttgagagaaaatatttgctgaaactattagagaaatagtggtaattatacgtttaaattgtttcatagagtttttataatattctgactattgttaattttatataatgataatcaaatggttataaattttaatttttgaccatacggtgcaatggtgcggtaactttgcttcaatattttacaaaaagcttttttaaatcaaagtttgcgtgctgttcattatgcttactaaacgtgctgtgttttgggcagcttccacaggatagcggcgttcatttcttttttgttatccaacctacataaactgacgactgaaaaaaacgaattggtgcttcaaaacctgcttcttgcaacaattccgaaagtcgttgttctgatatggcaaaaagttcattttctattctgttcattcgaaaatttatcatttcttcatctaagccatccggcaaaagaagtctgagcacattgagattttgtttgatttgttttttatcgccagttatgtcaagcattacaaaagtcgcacccgacaacaacctgtcggaaatgtcttttaataaatttaatttattaccattatcttcaagaaaatgcaggacaagcaggagtgtcgctgcactatattttttatcaacctcaaggtcggaaaccaaaccttcaattaaagtcacgctgtcggaattttgaagtttttcgtttgcttgttttatcattgcaggtgatggatcaatacctgttatcatccacttttcgggcgcttttgcaaacctttctatttcgtttcccgttccgcaaccgactaccaacaaatctctcggtttggtatttttgcgtaaaagttggggcaaacagtctaaaaaattgtgatagtttggtatccacgtttcaacaaattgattgtagccagccgctctttcgttttcaaaaatttctatgttattcattttatttactttctatagaatggtttgttatttagggcaataggttgatcattttttggttcgtatccaagaaattgtttagcaatttaagaataatgtttttttcttagttgactatcttaaggatcaccttggggtatttacttttcatattatgctggaacaatttggctgtggaaagtcggcggtgcaatgtaatatatttactaaattgatttgaactttgctaaggtacagatcgttagttctttctggtctggctcatttatgctatgagtttttaaataagagaaacgctaaatttcatcttcacctaatatgattttattttatgttttatggaatactttggaagttccaatttgttagtattttcaatttgtcgttagttatttgaaagatttgcagcttgcattagattagatttttagcacaaaaatcggttgaagcaccgcttcctttctctttcaaacaccttgttagcggctacttgtattcttcaatcgttctgaacgtcagatttactctcggttttgtgatacgttttgttggtggtaaacgatgtaaccagtgggtttgtgtggtgtctttcataaccaacaagctaccatgttccaaaagcaactctactttttcgcctgtctgtttgtgtttgaaagcaaattttcgttctgccccaaaagtcagtgagccgatagctgcgttcttttttaaatcggtttctgcgtcgctgtgccaagccattccctcttctccgttatgatacaaattcaacaaacaggaattaaaggtttcacctgtttctttttctatcgcggttttgagcttcaatagttcttttgtccacgccaaagcatatttggttgtgttggaatacgtgtatttgaaagtcttgtcgccataccatgctacttttcgtttggtaatgattttctttccgaagataattgcttcatcgtttctccattcaatagtgttgagcaatttttcaaaatagttgtcggcttctttttgactgaataatttgccgaaatagtttaccgttccctcgtaaggaagccaatttttatttttatctatagtttggttaaataaatccattctttcatttttgatattcgactttcgtacaatgtccgcaaggacaaacaccttttttaatggcttcgtttgccgatgaaaataaagtgcggttttcacgtttgattttcttgcctgaagcacaagacaaagttcgataaatttttaatttaaaattgagaccaaaacggatttagtgctgatagagtttgtaatgcaaatcgctaccggacatttcgctgtgctgtatcattgataatttatggaatcaggtagtaggtttataaatgtcgtcttctaccagtgctcctgttatgccggttttatcttctgataaagggaaaaaagccatatcgtaaccatcaaactcttcccgctcaaattcaaatgaaaacactgcttcatagaaggctattgcccgttccatatccgtcacaggaatttcaaaataaacagcaggatttgttttttctttctttaatataccaacaatcttctgctgattacccagcacttcaatcgcctgagtgttgctcataggaattaaagaaagttgattttgatagcgtttcaataccgtatctgcaacatcagcaaatggctcgcttttgaaatggggcaatggatagaacggaactattcccaatccggtaaaatcgatgagttcgggcgctttggtgctgtcatccatcatttgtgcgtaggtaatatctggagagagtatcattgttcctgcctaaactccgatgtagatttttcctttttcaatttctgctgtgagcaattggtctgcgcctgattttttcagttcctgaagcaggtaaaaggtatttcctcccgaaacatatataaagtcgtttttggcaaacatttttttgatttcgctttctgtttttccagtaacatccaattcttcgatgctaatccccaattgttcaaaagcatttttatcatcatttatatatccagtaaattcttcgggaacggatgcggtggtgataaaagtgaccgatttgccgtgtactgcatgacctacaaattcctcgaaatagtgggcaacatctgaaaaagaagaagttaagaaaagtgttttcattacaaatactagtataaaatataaaaaatgatcgtaggcattcctcagcgattataatttcggaacgcataggaatgaattgaaaagatgaaaaccactgcaaagagggatattattagtttttataatatcctaattttacgtcatggcacattgtgtttatctttataattttaatcagaaaacaaatgaattgtttactaactagcagggcgaaggaagttataaatttcctttgcaaccgtagccacttgcacaggttatgagactagatgaacatgaactgtatgcctatagcccgtttttggatattttagaaaaaagattggattaattatgttttagactattttgaagaataatcaagatcttcgaattcgtagcatacaatgcatcgatgaataaagtactagcatgacgattgctcaccgattatacatcgtgcgccatgccgaccacatcatcgtcaaggatcatggggaaattgtggattggggaacgcacgaagatttggccaaaaaaataattattactattccatttaaattttgcgagtagaagtactttttttatgcgttttagaattctcatactgcataatgcggatgataatggaaatgatttttattgatgtactcactttgaaacaaaacttaattcatgcactatccatgctttatccatgctttatctatgctctatctatggagtatggttttgttatccatgtgctattttgatcagcgctcgaacaaggatacatttgctttcgctttgcttaagcacgatttttatttttcatttttttgattatcctaaaatctatcttacctcttacttgttatttgtccttttgccttgatgcaaaaggaccaaaagatcaagacttggagttattgtctaaaaactgaaaataagtgctaaatgtttcggaactcgcttcgctcaagcaagaaatcatttactttcacttcgtttcagtacgcatttattttcagttttctttacgccaataactcctatgtcgtttttaacattttttctttaacttttggcttgatccaaaagttacaaaagatcgagacttggaatttctagctaaaattgaaaataatttcctgaaatctccaaactcggtcggaaagatcgctttgttattttattttgttttttctttgccgccagtcaaacagtggagattttttgacggaaattattttcaattttttgacgctagagtttccgaggtcgtctttttttgcttgtcggttttttagtgggggatgtttttattgatttcctgaggagagttgggattttttattacgaataaaaaaggcgagttgccccgccttgaatgttttcgcaacggaataatccttattgtgaattgctttcaaatacaaatttacaaataatattttttattggtttacggttttccttaattgtatgaatttatttttttttaattttaagaatttcaattaaactatattgctatggcgaaaaatatccttggattagacttgggaaccaactcgattgggtgggcgttaatcaaacaagactttcagaataaacaaggggaaattctcgggatgggaagccggattattccgatgtcgcaggatatactgggtgattttggcaaaggaaataaggtttcgcagactgccgctagaactggatacagaggtgtaagaagattgcgggaacgctttttattgagacgagaaaggcttcatcgggttttaaatgttctgaattttttgccggatcattacgcttctcaaatcgattttgagaaaagatttggcaagttcaaagaggaaacggagccaaaactcgtctatgatggcaaggaatttattttcaaaaaatcttttgaagaaatgctcactgactttagaaagcatcatcctcagcttttggaaaatgataagaaaataccgtatgactggactatttattatctccgaaataaagcactttcgcataaaataaagaaagaagaactggcttggattctgctgaattttaatcaaaaacgtggttattatcagttgcgtggcgaggaagaggaagaaaatccgaataaattggttgaattttattctttaaaaattgtagatgttttagctgatgaacctcaaaaaggagaaccggatatttggtactctttggttttggaaaatggatggatttacaggcgttcaagtaaaatgccattgtttgattggaaggacaaaacaagagatttcattgttacgactgatttgaatgacgatggaagtatcaaaacggatagagacggcaatgaaaaaagaagtttccgtgcgccgagtgagaatgattggactttggtgaagaagaaaaccgagcagcaaattgaccaatcacacaaaaccgttggaacttatatttatgaaacgcttcttcaaaatccaaaacaaaaaatcaaaggaaaattagtcagtgcgattgaaagaaagttttataaagaagaacttaagcaaattcttgagaagcaaaaagaatatcatcaggaattacagaatgatgatttgtacagtgattgcgttcgtgaactgtaccgaaataatgaagcgcaccagttgactttaagcaaaaaagattttgttcatctttttatggaggacattattttctatcaaagaccattgagaagtcagaaatcttccatttcaaactgcactttggaatttagaaaatataaggatgaaaatgaagtagaacacactcaatacttgaaagctattccgaaatccaatccttattatcaagaattcaggatttggcaatggatttataatctaaatatttataaaaaggacaatgataataacgttacgaatgaatttttgaatacgaccaaggattttgaaaatctgtttgagtttctgaataatagaaaagaagttgaacaaaaaccattacttaaatttctattggaacaaaaggattttaaaggaaaattattgaatatagaagctgaaaaataccgttggaattttgtagaagataaaaaatatccctgcaatgaaaccaaaacgatgatttcttcgaggttggaaaaagtaaaaaatatttcagatgatttccttacgagggaaatagaacagaaaatctggcacattatctattccgtaaacgacaaaattgaatacgaaaaagccttgaaatcatttgcaagaaagaataatctggatgaaaattctttcttcgaagcgttcaaaaagtttcctcctttcaaaagtgaatacggttctttttctgaaaaagcgattaagaaattgttgcctttgatgagattgggtagatattggaattatgcagatattgataaatactctaaagacagaattcagaaaatcattactggagaatacgatgaaaatatcaaagataaggtaagagaaaaagccattcatttgaccacagaaaacgattttcagggattgcaattatggttggctcaatatattatctacggaagacacgctgaagcctcaataaccggcaaatggaattctgcggaagatttggaggtatttttaaaagaatttaagcaacattcgcttcgtaacccgattgtagaacaggtaattaccgaaacgcttcgtgtggtgaaagatatctggatgaaatacggaaacggagcaaaagatttctttagtgaaattcatattgagctgggaagagaaatgaaacttcctgccgatgataggaaaaagttaacgaaccagatttctgaaaacgaaaatacgaatctccgcattaaagctttgttggctgaaatgatgaatgaccaatcggttgaaaatgttcgtccgttttcgcctatgcaacaggaaattttgaaaatttatgaagatggaattttaaaatcagatatagaaattgaggatgatattctgaaaatcagcaaaaccgcacaaccttcttcctccgatttaaaaagatacaaactttggttggaacagaaatacaaatcgccttacaccggacaaattatacctttaaacaagctcttcactgccgaatatgaaattgaacacattattccgcaaagccgatattttgatgatagctttagtaataaaatcatttgcgaatctgcagttaataaattgaaagacaattatatcggacttggatttattaaacaatttggagggactattattgaacttggtttcgggaaaagtgtgaccgttctcaaggaaaaagaatatgaagatttcgtaaaaaaacactatgccaacaatcgaggaaaaagaaataaattgttgttggaagaaattcctgagaaaatgattgaacgtcaattgaacgatactcgtcacatcagtaaatatatttcaggtgttttatccaacattgtgagagttgaagatggaacagatgaaggtgtaaattctaaaaatatcgttcctggaaatggaaaaataaccaccactttaaaacaagattggggcttaaatgatgtttggaatgaattgattttgccacgttttgaaagaatgaatcaattgaccaattcaactgattttaccgcttggaatgaaaatcatcagaaatttttaccaacagttccaattgagttttccaaaggattttcaaagaaaagaattgaccatcgccaccacgctttggatgctttggtgattgcttgtgcaactaaggaccacgtaaacctgctcaataatcagtctgcaaaatcagatacgaaacgttatgatttacagcataaacttcgtcatactgaaaaatggatagataaagaaggcaaggaacgtgataaatttacagcgttcaaaaaaccttgggaacactttactgttgaggctaaaaattctttagataaaattgtggtgagctttaaacaaaacctcagagttatcaataaagccaccaattactacgaaaaatatgtggagaaagaaggtttaaaaaccaaagaaagagtagaacagcacggaactaattgggcgattagaaagccgatgcataaggatactgtttctggaaaggttgatttgccttgggtaaaagtgcctaaaggaaaaatcttaactgccacaagaaaagccttggatacatcatttgatttaaagacgattaacgctataacagatacgggaattcagaagattttgaaaaactatctggaattcaaaggaagttctgagttggctttttcgcccgaaggaattgaagatttgaataaaaatattgaaaaatataatgatggaaacccgcatcagcctattaataaagtaagagtttttgaattgggaagtaagtttcaggtcgggcaaaccggaaataagaaaaataaatatgtggaagccgccaaaggaacgaacttgttttttgccgtatatgaagataaaaacgggaaaagaagttatgaaaccatccctttgaatgaagtagttgaaagacaaaaacaggggttatctgttgttgatttaaaaggtgccaatgatttttatctctgcccaaatgatttggtatatattccttccggagacgagcttgacaatataaacaatattgatttcaaaaatcccacaaaagaaaacaatgaaagaatttacaaagtagtaagttttaccggaaatagactttcttgtattccatatacagttgctacaacaattgttaataaattagaatatactcaactaaataaaattgagtttacaaaagaaaaggagattataattaagctcaatatggaccgtctaggcaacatttcaaaagcataactatgatcacccgctccatctacatcggcaatcccgcttatctcaagctcaaagacgaacaaatgtacatcctttgcccggaaaccaaacagatgaaagggaaggtggcggtagaagatttaggacttctcatgttggatcattggcagattactgtttctcatcagttgattcagaagatgatgaaaaacaaagtcgtggtcattagttgcgatgattctcatttgccacacggtatgatgttaccaatttatggccattcggaacattccgatcgaataaaagatcaattggaagccagcgaaccactcaaaaaacaactgtggaaacaaaccgtcgagtacaaaatcgacaaccaaaccgaagtgctcaaacgcttagggaattatttcgagccaatgctggaataccgtcagcaggtgaaaagtggtgatatttcgaatatggaaggcattgcagcacagcattattggaagtatttgattagtcctgattttcttcggggtagatatggagattcacccaatcatttcttcaatttcggctatattgtcttgcggagtatggtggcgagagcgattgttgaagcaggtttgttgcctgttttggggattttccataaaaataagtacaatccatattgtcttgccgatgatctgatggaaccgtaccgtccatttgtagatttgctggtgatgcaatggttgaaaatccatcccgaagcagaagaactaaataaagaatgcaaagtgcacctgctgaatattgcttccgcagatgtatggattgacgggaagaaccggccattgatggtagccgtaaaaatgacggcctcgtccctctacaaatgctacactggagaaaaacggctgattgcttttcctgaattgcgatgaatgtcgaaaggttaaatgcataccgaattatgtgggttcttgtcttgtatgatcttcctaccgaaaccaaagccaatatgaaggctgccagtcgcttccgtaaaaatttgttggatgatggcttcagcttatttcagttttcgatgtatgtgcgccattgtccgagtcgggaaaatgctgaagttcacattaagcgggtgaaaaatatgcttccgaaagcgggtaaagtagcgattatgtgtattaccgataagcaatttggtgatattgaaatcttctttgctaggaataaagaagaacctcctccaacatggcaacaattagaattattctgatttttgaaattctaatcaatgaaaaaatccactgaaaatcagtggattaaattttgaggttgtgttatatctcaaagatactcaaaattgaaagcaattcacaactgaggtg

SEQ ID NO: 1380 - DNA, 15546 bp, synthetic construct
  misc_feature 1..15546: note = Synthetic
  source 1..15546: mol_type = other DNA
ctcgtttagttgtgatttgctttcagaattatatctttgacagattgataacaacctctcctaaagcatcccatccgctaccgttgttgtgatttgctttcagaattatatctttgacagattgataacaactaaccacttaaaactggtttagctgccagcgttgtgatttgctttcagaattatatctttgacagattgataacaaccagaacttgcggaaaagacagctgaagatagttgtgatttgctttcagaattatatctttgacagattgataacaacaacaagtattggttaacatggctttgggcgttgtgatttgctttcagaattatatctttgacagattgataacaacagaatgtagttactgcctgctgacttggcgttgtgatttgctttcagaattatatctttgacagattgataacaactttccaatgcggaggccgcagcatggtttagttgtgatttgctttcagaattatatctttgacagattgataacaacagacacaacaaagttgctcaatgtgtttgtgttgtgatttgctttcagaattatatctttgacagattgataacaacactaattacctttgcatcgcttatggaacgttgtgatttgctttcagaattatatctttgacagattgataacaacacagagtggagcatagctttttcatttttcgttgtgatttgctttcagaattatatctttgacagattgataacaacagacctgtgattaatattcagattgttatgttgttatggtcgaaaaataggataaaaaatcaatcgatttttcgtgttgttatctcaaaaagcctgcggttttttaatcgcaggcttttttgtgtctatgccttatccttgaagcttccgaaggtgccttttggttgtccttctttagtgtcgcgagagggtgaagtagaatggtagaattaattatgcaggtaaaataacaaaggcgagttgccccgccttaaatgttttcacaacggaataatccttattgtgatttgcttttagaattattcgacaaatatataattaaaatataaatatacaaaatttatgtactatttttgaggggtaattttatatctaactcatgaaaaagatattaggtctcgatttgggtacaaatagcattggttgggcattgatccaacaagactttgatgcaaagaaaggtgaaattcttggaatgggaagcagaattattcccatgacgcaggatgtcttggatatattcagtggagggaaacctttggaaacacaaaccgcagcacggacgagctatcggagtgttcgccgtttgcgcgaacgtcatttattacgacgggaacggttacatcgtgttctaaatgtgttagattttttgccagagcattatgccagagctgttgattttactcaacattatggtcagtttgttgctgagtccgaaccaaagctaacataccacaatcgaaattttatcttcaaaagttcttttgaagaaatgctgaatgacttcaaacaatcacaaccacaattgttttatacaaaaccgaacggagaagaaacaaagattccgtatgattggacaatttattacttacgtaaaaaagctttgagtcaaaagatagcaaaagaagagttggcttggatagtgctgaatttcaatcaaaaacgaggatattatcagttgaggggagaagaggaaacggaaaacccgaataaattggttgagtttcactctctgaaaattgtggatgttgtagcagatgaaaagcccaacagtaaaggtgatctctggtattctctttatttggagaatgggtggatttatcgtcgttcgagcaagacgtcattgtttgactggaaggacaagattcgtgattttattgttaccacagacttaaacgataatggcacaattaaaaccgacaaagaggggaatgaacgacgaagctttcgtgctccaagtgaagatgactggaccttgctgaaaaagaaaactgaacaggaaatcaataaattagataaaacagttggcgtctatatttatgaaaacctattgcaaaacccttcgcaaaaaattcgaggcaagttggttcgtactattgaacgtaagttttacaaggacgaattgattgctatcctgaaaaagcaaattgaactgcagcccgaacttttcaccgaagatttgtacaacgattgtgtgcgtgagctttatcgaaataacgaggctcaacagctctccttaagcaaacgtgattttgtgcacttgttggtcgaggacattatcttttaccagcgtcctctcagaagccaaaagtcttctattggtaactgtacattagaaaaacatccaactaaagacaaaaatggtaatattattagggatgagaaaggaaaaccagttttagtaccactaaaagtaattcccaaatctcacccgctttatcaggaattccgagtgtggcaatggttgtcaaatctcaaaatctatcacaaggaagatgatatcgatgtcacgactcagtttataaaaacgaatgaggacaaagtggctctctttgaatttttgatgatgcagaaggaagtcggtcataaagatattttgaagcatttgcttttaccaattctgaaagaacagtaccccagtgcaaaagcggctgcatttaacaaggaagtggataaggaaattgccaaatatcgctggaattatgtattcgacgattcaaaagaaaaggaagaggacaagtcgaaaaaatatccttgcaattccaccggttacgaaatcaggcgaagactcgaaaaagttgcaaatgttccggatgactttctgactccgggaatagagcaacatctatggcacattatctattctgtaaccgataaaaaagaatatttatcggctcttggtaagtttgctgacaagaattcgcttgataaagagtcgtttgttgctaattttgagaaatttcctccctttaaaagtgaatatggggcattttcagaaaaagcaatcaagagattcttacctctgctgcgtgttggtaagtattgggattgggaggcaattgatgttaaaacacaagacagaattggcaaaatccttactagcgaatgtgatgaaaacataaaggagcgcgttcgggaaaaagcaataagcctgaatgacgagagccattttcaaggattgcctatttggttggcaagctatgtaatctatgatcgccattcagaagctgatattgcaggcaaatgggactctattgcagatctggaaaagtatcttgaagatttcaaacaacactcgttgcgcaatccgattgtcgaacagatcgttaccgagacattgagggttgtgcgtgatatttggaagcagtatggacatggagcaaaggatttcttcaacgaaattcacgttgaattgggtcgtgatatgaagaatacctccgaagaaagacaacggttgacaaatattgtcagtggtaacgaagcaactaatctgcgcataaaagccttgttaatggagttgaaggataattcggacgggaaattgctcgtggataatgtgcgtccttattcttccattcaacaagacacgctgaggttatatgaggatggggtactaaattccaaaatcgacctgcctgatgatattgtaaaaattagcaaaaccgctcagccaagcaaaacggaattacaacgttataagttatggttggaacaaaaatatcgctctccctataccgggcaaatgataccacttggacggctatttacagaagattatcaaatagaacacgtcattccaaagtcccgttattttgacgatagcttcaataataaaataatttgcgaagctgctgtaaatcagctgaaagataaacagcttggttttgaatttatcaaaaatcaccacggagagaaagttgaatgcggaatgggtaaagtagtggaaattttatccgaagaggcgtatcagtcttttgtaaaagagcattacgctaaaagtaaggttaaacggcaaaacctgctgttggaagatattcccgaacaaatgatcaccagacaattgaatgatacgcgctatatcagtaagttcatttcgtccctcttgtcgaatattgttcgtgaagataaggaagacgatggaatcaattctaaaaatctcattcccggcaatggaaagattactactgttttaaaaaaagattggggactggatgctgtttggaatgatttgattttaccacgctttcaacgaatgaatcaactgacaaacagcgaagccttcacctattggaacgaacagtatcaaaaatttctgccggtggattattcgccaacagattcgaagcgaatcgagaaaaaaagaattgaccaccgtcaccatgcaatggatgcgttggtgatagcttgtatgacaagagatcacgtaaatctgctcaacaatcaatctgcaaaatcggaaacctcacggtatgatttgcaaaacaaattgaggactaaaagcaaagaaacctggatcgatagaaaaacacatgaacaagttgaacgagatgttttcaaagagttcaaaaagccttgggatagctttactgttgatgcgcgaaattcactggaaaccattgttgtcagtttcaaacaaaaccttcgcgtaatcaataaagcaaccaataactacgagaaatggattgaaaaagacggacgtaaagtaaaagccaaagtaaaacaggaaggaacaaattgggcaatacgaaaaccgatgcacaaggaaactgtttcgggtaaggtggatttaacctcggtgaaagtttccaaaggaaagattcttactgctacccggaagagtgtcgataacacttttgacttgaagacgatagatgcaatcaccgatacggggattcagaaaattctcaaaagttatttggcatacaaagggaacaatccagaaatcgctttttcgccggaaggattggaagagatgaatgccaatgtaaaacaatataatgacggcaaatcacatcaaccaattcggaaggttcggatatttgaacttggaagtaaattctctttgggagaaaccggcaataaaaaagataaattcgtggaagccgcaaagggtacaaacctatattttgcaatctacgaatcaaaagatggtaaacggagttacgattcaattccactgaatatagtcattgaaagattaaaacagagtttgcctcccgtggaattgaagggtgaaaaagacttctatttaacacctaatgatttggtgtatgtgccgaatgaagacgaaaaaataaatatcaaaaatcttaatccacgtgaatttggcgaagagcagagaaaaaacatctataaagtggtaagttttaccggaaatagactttcttgtataccccattcagttgcaacgccgattgtaaataaattggaatatacgcagctaaacaaaattgaatttacaaaggaaaaagaatcaattgttaaactcaaagttgatcgtcttggaaatatctcattataaatggtccaaatgcagcctcttgtcccagccgccgtctaccatattttcaaccatgccaatggttttgagaatgtgttccgggaggaggagaattatcggttctttctggagaagtaccggttgtatatctctccggtggcggagacgttcgcgtattgtctgatgccgaaccattttcatctggtggtacgtattcgcaagcgggaggtaatagaggcgttgattcgaaataaatctaacttcagcttttccaaagtttcaaactttggaaaagctgaaaaaacaatcgaaatcgataaaatcgatgacgttgatatagaaaagtttctgtcgaaacaattcgctaatttttttagtagctatacgcagtcgttcaacaagatgtatcagcgaatgggttcgctgtttattaagaatttcaaacgggaagtgatttcaaacaaagagcattttatcaatgccgttgtttatactcaccgcaacccgatacatcatggtttttgcagttcgtttaccggttggggatatagttcgtatctggaaattgcaaatcgtaagagcgatgtggttgcagttgaaaagacactagggatatttggaagtttggagctttttgaacaggttcatttggaaaaacttgagaaattcaaccagatagttaatcttgaaattccgtaggtcatgattaaacgcacgctttatttcggaaatccggcttatttgtcgaagcggaatgaacagctggtaatcaaattgccggaggtggtgaaaaacgataccttgcccgaatcgttcaagcaaaagagtgaaattaccgttcccattgaggatattggtgtgatggtgctcgaccatcagcaaatcacccttacgcatggtttaatggacagtttgttgtcgaataatactgcagtcattacgtgcgatagtaaccggatgcccgccggtttgcttcttccgctatcgggtaacactacacaacgggaacggtggcacgatcagattgacgcatctgtccctctgaaaaaacagctttggcaacaaaccataaaagctaagattgataatcaggcatcgttgttggaacgacgttgcaaggtgaataccaaaaatatacgctactggtcagaagccgtaaagagtggcgacggcgaaaatcatgaagcccgtgcggctgcttattattggggcaatatctttccgtcattacctgatttccgacggggcagggaagaggatccgcccaacaaccttcttaattatggttatgccattcttcgtgcggtggtagctcgttcgttagtcagttcgggtttgttgcccacgctgggtattcatcatcgcaaccgctacaatgcctactgcctggccgacgatataatggagccttatcgtccttatgtggacaatattgtgtgcgatgttgtcgataagggatacgattatttcgagttgacaaaggagctgaaacagcagcttttgcaaataccgaccatcgaagtggtaatagatggcgaacgcagtccgctgatgataggcgtgcagcgtactacggcatctctttataaatgttatagcggcgaatttcgtaaaatcagctatcctgtaatgtaagcagtattatggatcgctttaatgaataccgaatcatgtgggtgatggtattttttgatctgccgaccgataccaagaaagaccggaaaatatattccgattttagaaagaagatgatgaaagacggatttaccatgttccagttttccatctatctgcgtcattgtcccagtcgcgagaatgcagacgtacatgtgaaacgtgtaaaggcggctctcccagagcatggcaacgttgggattctcacggttaccgataagcaattcggtatgatggaactctttcaaggtaaaaagcaggccgaagttgatacaccctaccaacaactggaattgttttagattcggcaggtttgccatagctatctgatgaagagtaaaacaaaggctgttctgctagaaaaatagcagaacagcctcttctattgcgtgatggatggactcttacttgtcgatgcggaaccagtctacatcggtgtatcccgagtcgttgatggcttttggacggatgcagtaaagtcctacttttgcgccgatccagaggccttcacgagctttgaacgattctccgaaggggctaaatttcttcccatccaggctgtagctgaacgaacaggttccggtgggttgcaaaataccctctttgttcttgttgcggctctgcttaatgtcaactttcaggtaaacagtcgcttgttttatttcgagggtggcatggttggtttccgtcgcacctttgtcggctttcaggcaggagttctgggttaacaccaacccgttctctccattttcgatgcctatggtggcataatccattcccatcactaccagtccggtacgttcgcctttgtacatggggttaaatgtaagcttggtggtggtgctgaagtcgggtgccggaaatttctgcaataacagattcggcgcatcccagagattttttgcatcgcccagcagttgccatgagaagaggcgcatataacctttattgtcggcatagaaagcccacagtggattggaattagcttgccattgccactgtttaccaagcgtcagtccgtcaaattcatcgctttcaaccggattcacaaccgggtatgttttacctacatccggttttttgtaggtggacacaggagtgccacagcctttgccctctttgtcgatgccgattaccggccagtcgttcacccatttcatcggttcgagcaacaccacgcgaccataggcatatagatcctgaaagtggataaaccaatcctgcttgccgtcgggagtatctacccagccaccctgatgaggtccgttgatgtccgattttccctgcgccattacaatgcgttcttcgtaggggccgtaaacgtttttcgagcgcatggccagttgccatccgggttttacgccacctgctggacacatgatgtaatagtaaccgttgcgtttgtagaatttggcgccttcagtggtagaatgattaggatgtccgtcgaaaacgagacgatcttcggaaatagctttggttccttctgcattcatttcgaaaacggccaatacgctcttcataccggcacggcttcccgcaaaggcatgtaccatataggcgcgtccgtcttcgtcccaaagaggacaacaatcgatcagtccttttccttcttttaccatagtgagtggttcccacggaccggcaggatttttggctttggtcatgtacaagcctgcatcgggatcgcctacgtagatataaaattcgttgttgtgataccggatgctgggagcccagataccgttgccgtgttgcattttgtcaaaacgctctgtcggtggaaccttatcgagcgcgtagccgagaatctcccagttgaccagatcttttgaatgaagaatgggtagggcaggggtgttggcgaacgaagaggctaccagatagtagtcgtcaccaacacggcacacatcaggatcggaatagtcggcatagataacagggtttttgtaattgccattgcccagatcaggctgccatactttcgaagtatagttttgaccgtttgcagcgagagagatagcacaaagtcccgcaagaaaaaatgattttatcatgatattgttttgtgttcaatgtgtaaaatacacaattgtagatggtatttccgttattttaattcgttaaaaggttgtgtgaaggtcacttttacatctttttcggcacgcaggttgtcggtaagagatttaagacccagcgttttgaatccttctatagccatttttgccacttccatggcaccgtctaccgacatgtgagtgtcgtcttcgctccctttgggtgccagtttgtatacaccaggagcaatatgcaggaagagctttttcgactcttcaggacctttgctttcgatgagtgtgcgcgtgctaacctgcaagtcgataaaggcaacattttcttctttggctatttggcggatcttgtcgggatacaggccgtgctgatcgacaaatttaccgttagcatcaaacttgcggcgttctatcggggtgcagataatcggagttgccccttttgcccgtacatcggcaacaaattttttgaagttggctttgaagtcgtagagtgtagtgccacggtcggtatctactttttcgtcgttgtgtccaaactcaatgattacgtaatcacctgcaccgacacggttcatcagggtatcccagcgtccttctttgatgaatgaacgggtactgcgtccgttgcgggcgtgattttcaacgattacattatcgttgaagtaggagggaagcaccattccccagccacgctcgggattttcctcaatgggtttgtcggccatggtggaatcgcctgccataaatattttgattggtttgggtttcgccgcaatcagcaaggtcagcaccgcgacgatagaaagtagtattgagaatttcttcataatgtgtgattagaaaattgtgcgtgtttccaacgactacacaatttatcagttatacagatagatttatttaccaaccccgcacttcaacagaatcttttgatgcgtggtcgctccagttaatgtttttgtacgtaattccggccgaacgctggatggaaatatactggctattcattccactgacattgataatgggtttgttagtgtcaggaaacagtatgttgaccagcgtgatgtattgagagttgttgataatcagattgggtgtcgacggagttttgagcaccacgttagtaagcgttacattggtcgattcgctgatttttcctccttcgttggcaacaaacattccgttctcgagcgaaatattttcgaggttcatctccggcaatccattgaagaaaagggctcgttttgcaccattgcagttaatgtttttcatggtaatatccttgaaaacaggggttgtttcatcggcttttaccttttcgtccttgtttttggcaccaccgtaaaaaaggtcgaacaagactgcatcgcccacgatatcgttcatgttgatattttcgatagtgatgttttcgaccacgccaccgcgtccgcgggtactcttgaagcgcagaccggcatcggtgcctttgaagttgcagttggtgactttcacgttctttacgcctcccgacatttcgctacccaccacaaaacccccgtgcgcatgataaactgtacatccgtctacaataaggttttcggtaggaataccgcgtttgcgacccgattcgtttttgcctgatttgacacaaataccgtcgtcgcctacgctgaaagtgcttttgtaaagcactatgtttttgcaggattcgatatcgataccgtcggtgttttgtccccattcaggattttggatgttaacgttggaaacaatcacattctgacacataagtgggtgaacggtccatgaaggtgaattctggatggtaactccctcgataagtacatttttgcagttaaccagatcgaccatgatgggacgcaggtaatccttgattgcttgccatcctgcttcatcttttacgtcaggcacattctgatcggtagccagttgactgcctttgtatgctccttcggaaggccaccaggtagttttgttttcgctaagtactccacctgaagcaaccagcgcgttccattgaacttcgcttacttttgatttctttaccggacgccatgcctgtcccgagccgtcgaaagttccctctcctgtgatggcgatattttcggcaccatccgctgagatgggttgctggcaacgataggtttccagtccttcgaagttggctttgataacagggtaaagacttttgttggtagagaacagaacggtcgctcctttcgctgtatagatacgtacgttgcttttcaatacaatagggccggtaacccatgtcccggctggaacttctacagtgccgccgcctttggttacaatagcatcgatggctttcgcaaaagcttttgtgttgtcggttttgccgtcgttttttgctccaaaatcgacgatggatacattattggcgggaaaaaccggagctttcacctgttccatctgaaacggaagattgctataaagataaccggggatgttggtggtgttttgtgcgttgacagagaggaatagccctgcacaaagagctaaaaatgtgtgtttaaacataactaggatgatttacgattaagagcttcaaatttactcaatttttagagcaagcgggcttaggttacagcaaaactcattgaacaaagcggagaagactctgttcaatgagttggccgaataattattttcaagccttatttttttaacggagaaaacagggttgaagttttttccgaagaaatgatggtattgttgatgcgtacgttttcgaaatttacgtttacagctcccttaatatcgttcgagttgtattttacacctctgaaatcgcaattcttcaggttgatattgtttacgcagttggcatcttccagtccgtcgatgcttacgccgtagttactttgctggcaggtgatattttcgagattcacattgcgaaccaccggcacataaccgcgtttgcatggttcgttcggttcgtattgcaggtcgattttaagaacggcttctttacactggcctactttgacgttgcggacaaatacgttttcaacaacaccgccgcggcatgtgttcgatttaatgcgaatgatgcgatcgagttcggggctatccatctcgcagttttctacgtagaggtttttgtagccacccgaaatttcacttccaacaaccacgccaccgtgtccggctttcattttacagttgcgcacgatgatgttttcgctggggatgttccaacggcgaccgtcgttgttgcgacccgatttgatagcgatgcaatcatcgccgtcatcgaacgtacagccttcgatcaatacgttcttgcacgactcggggtcacaaccgtcactgttgggtccgaggctctcgatggtaacattgcgaacggtcaggtcgttggtcaaaagcggatgaattacccagaacggagagttctgcaatgtcacaccttctatttttaccgtgttgcattgtacaaaattgataagttgagcgcggaggtaatttccttctcccatctggcgcttttcgaccgggacattctcttcgctcattttcatcagagccgcacgtcctgtggttttttgtgaaggttcgccatctttgtagccaaacagtttgttaccattccagttccaccatgcggtgttggagccttgtccgttgatgatccctttgccggtaatagcaatattggtcgctttgaaagcatagatcaaggggtgatagttgtagcagtcgagaccttcccaacgggttaatacagtgggaagatattcagcataattggtggtgaagcgtaattcggccccttcttcgatacagaggttgacattgcttaaaagagtaacaggaccggtaacgtacacgcctttgggaacgatgactttgccacctccctttttgttacaagcgatgatggcggcattgatggcctttgtgttcttaatacttggatttttttctgatgctccgtattttacgatgttgaaacttttgtcggggaatgaggtctgcttgatgctttgggcaagctgtgccatatcctcccagggacctgcataagcgctacaaaacgatgcgagaagaattaccgcaaataatgaaagaagtttcttttgcataattaatagattggttattttgtggttagcatttagaattcagtgatgaaaggtttgtcatccattcgggcaatcatgttctaaacgaataattcagttttattgttgcctgattcagagaataacggaacaagccgtgtccgaacacgaattgacaatgtattgtattttttaattcaacgataatgatgttggtgttttattgtatataaggttagttgtacacaatgtggggttgcgctttatttcgcaatcattgccagctggcagcaccaaagaatgaaaggtccgattactttcgggtcgttatcacgttggggctcgtgaatgtagtaatcgtatgttccgctgcgatagggtgttcctccaagtccggcaacagcacaggctttggttatgttgtaggaaccgtcagcgtcgatgcgggtggcgttttttatgaagagattaaatgtcttttttgaaatggcaaagtagcttggttctatatatcctttgttagcagctttggtaatagcatacatgaacatagcagtggaggaactttccaggtaattaccttcagctccgggtttgtcggttacttgataccagagtccggttgttttgtcctgatactttaacaggcttttggtcaggttgctgaatatacgtttgatggcaggacgttgcgggtggttcaacggtaaatagtcgagtacatctacaatggccatcatataccatccgatgctgcgactccagaaattaggtgaacaacctgtcgttttgtctgcccattcctgagttttgctctcatcccaggcatgataataaagtcctgttttggggtcgtatgtgtgctttgcaattaatagaatctgttttgcaacgtcatcaaatgtttctttctcattaaagcgttttgcatattcagctaagaacggcgatgccatataaatgccgtcgagccacatttgatttgggtatacggctttatgccagaatccgccttcgcttgttcgtggatgagttttgagttgcgcacggaaggcttctatggctttgtagtattttagttttagcgttttgtcatagagcgtgaataaaaatttagctccgtttatgcggtcgagactgttttcagatgctttataggtgagaacatttccgtcgttatcaaccatgtaatctccgaatttcagcacataatcgtagtatgttttatcttttgtgagggcgtttaattttaataaagcggaacacatcagtccctgacaataatcccatttaggagttttgttgaaatcgatcatccagccttccggattgcgtttcatgtctgattgagccacgtttgtagcccagttgagaaccgtggcgcgtgtttgtgcaaaaatagagatggcgaaaataaaggatagagaaatcaaaaagattcgtttcatggttttgtgtatgaatggtgtgtatagctacaaattaaatctgatgcaaatttataaaaatagacaaagaattattctatgttctgtgattttaagtggtgattatccagaaaactgattctttatcaacattgagcgggattaacctcttacaggttgcgttagaaatgtttattgatcacagcaatttgagatatacgtgttcgtgcacggaaaattttcacaaacataagagaatattttgatagaaggataatgtttgtgatgaattttgtatttttctttttatgatgcttttgtggttagaaaaatcaaaggaaaagagggggctctttcgataaaggaaaaaactcctgcctgattataaataacagacaggagtttcttttgtttttatttgtcacagatggatattattggttgtccaatgcatccattgggcatttgtatgtggagcagggcggcaactgtggccgaaatgtcagtcatgtgggtggtttgggtggtaaagccatgttgaactttccatcccataaatataagtggtatgtgagtatcgtacggattccagacgctgtgtgttgttcctgtttttgaatagtaaggcaaccatccgggtttagtaatcattactaccgaaccgctgcgttgttggttataaccgtttatcatcatttcttttataatagcagggattgaggtcgtcgatatcttatcctgatcggcggca

SEQ ID NO: 1381 - DNA, 15501 bp, synthetic construct
  source 1..15501: mol_type = other DNA
  misc_feature 1..15501: note = Synthetic
gttgatcgtttatgatacaacgctcaaatgtatctcacagaatgcgggtactgctgctagcccgggatgggtatgcctttcgggtagagatactcagtccggttcgttctatatgccttcgattgctatagatgcttcggctgtggttaccaatcaatctttagacttgtacgacgaatataaaaagcagttcagtactcctactgtgagtagtaccggtgctccttcgagcataccttattttagtaatgcttccgatttgtattattatattactttctatgatgtatcggtactacagattaacagcctggatgcagcgggggtactaaactatgatattgtggaagaggctcattacgatacttttatgaatgttgtatttgttgttaaataatgaatatgaaaaagataatactactggctctttgcatggctgtgagcttattcatagtggctcaaaaagagacttccaactgggtattcggttatgctgcaggtttgacatggaatacgaccagaagtgtatccttaacaggacttttgggcacacccaatgcgactcttgacggcttacccaattcgtttacatcagctgtatatacgtacgagggatgtttcagcctttccgactcaaacggaaaccttctattttattcggatggcacaactgtttataataagaaccatgcagtaatgactaatggtgatgctctgaccggaggtaactcgtccgcacaatcggggattatcctcccatatcccggaaggaccaatcaatatatagccataacggcgggtgcgacccgggctaacaacttgtcttactctgttatttatatgggtgcccagggaggattgggagcagtagtgtctggccaaaaaaacattccgtttcggaatgcaatgggatataccggcgaaagcgtcacagtcgcacgccatagtaatggcacagattattggatactagctattggccagcaaacaacagccccttcctatatcaatgcatggctactgaccagcaccggggtgatatctacaacacccgtagttactacactaccctatgcaatgtcaggaaacggatccagtggctacctgaaaatcagtcccgaccatagacattttgtttggccaacatttttagatcagcgttttttttatggtgatttcgattcttcgacggggatgtttagtaatataaaggtgataacaggacttaatgatccttatggtgtcgaattctctcccacgcaatcttgtttatatctgactgaggtagatgggctaacagtattcaaatttgatgaattattctccagcgcagacccctcttcagtcaccaggaaaaagtatgcaatcacgaactcatctgttaccgcgttacaaattggtccggacaaaaggatatattgggtagctatgagtcaaaaatatatgcgtataattgataatgccgatgattatgacaatatggcactataccagacaccggcaacttttctttccggggaaggaaaaggcggacttccatcttttgccacttcttggttcgcaatagatactgctaagccagcttctctcttatgcgtcggaaacgatttcaaattcagcattactatagatatgtcaggggcaactgctaaccttccggtatccctctcatgggattttggtgatggttcgacggctgtttcgcagcccgtcgtttcgggaacaactgtttatcaacaatctcatacatactctacaaccggacaatacacggtgagtattacgccctacaaatccgacggtactgctttggctaaaacgaccctaccggcgacagcaaatgtggtcgaatgttcgttccgtaccaaccggatgatacgccacgacatgcacaacagtgctacgaaagctactaaccgttaattagtgacctcaatgaaaattcgatatttatacaaaacgttcttttcgatagctgtgctattgataagtttgaactcgtactcccagatagggatcaataatgattcacccgatgcgagtacggtcctccatatggagggggtgaccggtggggataaaggattacttattccccggatgactactgtgcaaaaaacggctatagcaagtcctgcccacagtcttttggtatatgataccgacctgaaatgtatttcgcagaatctgggtacggaggctgctcctcaatggacttgtcttacttctctcaaccggaagtttttctatatgccgtctatcaatattacgactacagcattagggactttcaccaaggatttgtatgctcagtataagcaggagtatgccacgccgatgtacagtagtccgggggctccggccgagatcccttactttccttcgtcgggcgatttgtattactatgtcagttatcacgatccttcgcgaataactattaatagtattagtgctaacggggttatgaactatacggtaatagggaaagccgattacgacgattatattaatatcatttttgttgtaaaataaatctttaatggcatgacaagacactcccctcgcggggattatctgatattaatgaacttctgtttaagacagaaacatctggaatctttttatgttctacgtaatatatatcatgtgcatttagccacttttgttggtccagtaggttgtgttgtgtagagtcattgttttcgttgtttatttaaactgatactattcaaacagctacctgagcacagaccaacaatatttcgcagcaaggtgcagggattgcactttgctgtttcttatctatttcccttacgattcttatcgctggccctgcctttaatgcaaaaatattcgaagaaatgctatctaaatttgaaaatttcgccaaacaacagaaagaagcgttactcgaagtatgtagaaaaaaagagtaatagctgatattattgagtatatcatcaagagtttagaatatactccatattaattgatacagccctttctctggttcaatctcaaaacatactataaatcgcaggatgtgaaaaagatataaataatcagctaacaatataatctcttataaaatatctgtatttatgaatcttttaatcctaacatccaaaatatctcaaattttagctttaacgtgaaaaaactatttactgaggaacctttactcaacaaaccaccataaaagcttcataaaaaagaaagcgagaattacttcccgccttaaatgttttcacaacggaataatccttattgtgataagctttcaatttgttttgcaaaaataattttttacttcgaagaatccaaggatttgttaaaaataatttatctttaagcattagattgttgtgaaatgtgatcttaattaaaagtttataatgtaaagatctcatgcattttacataaccttaaaaacacaaatttttttgtatgaaaaagatattaggtctggatttaggcacaaacagcattggatgggcgctggttgataaagatgctcaaaaaatattaggcatgggtagtcggattattccgatgagtcaggatgttttgggaaacttcgacaaagggaattccgtttcgcagacagcagaaagaactggatttcgaggaacaaggcggttaagggaaagacatttgctgcgccgcgaacggttacaccgcattctgcatatactaggcttcctgcctgaacattataagaaatatattgattttgaaaaacgtttagggcagtttgtaaacgaaacagaaccgaagctagcctataacaattgtgattttctcttcaaaaaatcttttgaggagatggtggctgattttaggcaacagaatccttccatgttttatacaaagtcgaatggaaaggaaacaaaaattccatatgattggacaatttattatctgcgtaaaaaggcattaactcaaaaaatcgaaaaagaagagctagcttggattatcctgaacttcaaccaaaagcgtggatattatcaattgagaggcgaagaagaggaagaaaatccaaataaattagtagaatttcactctctgaaaattattgaagttgaagcagatgaaaagcccaatagtaaaggtgatacatggtattcactgcaattggaaaatggttggatttatcgcagatcgagcaagaatccgttatttgactggaaagataaaattagggatttcattgttactaccgacctgaatgatgatggtacggttaaaatagacaaagaggggaatgaaaggcgatcattccgtgcaccaagtgaagatgactggacattgctgaaaaagaaaacagaagcagagattgaatattcccggaaaacagttggcacatatatatatgagaatcttctatcaaatccaaatcaaaaaatacgaggtaaattagtccgtaccatcgaacgtaagttttataaagaagaacttattgctatattgaaaaagcagattgagttacaacccgagctcttttcggacgatttgtacaatgattgtgttagagaattgtatcgtagtaatgaagcgcatcagtttattctgagcaaaaaagattttgtccatttgtttattaacgatattattttctatcaacgtccccttaagagccagaaatcatctatttcaaactgttctttagaatttaggaaatataaagataaagacgggaacgaggttaaagaatacctgaaagccattccaaaatctcatccattgtaccaggagtttcgcctttggcagtggatttataatctcaaaatatacagaaaagacgttgactcagatcttacttcacaatttattacaagtgttaatgatcagaaaaatctttttgattttctgaatagccggaaagaaattgaccagaaagctctactgaagtattttaaactttcagaaaagacccatcgctggaattttgtagaagataaaacctatccctgtaatgaaaccggagcacagataaaaacacgattagcaaaggtcgaaaagcttccggctgatttcttaacagcccaaacagagctaggcttatggcatataatctattcggtaacagataaaaaggaatatgagcaggctttgtcttcttttgccagaaaatactatttgaacgaaacctctttcgtagaaaacttcaaaaaatttccaccattcaagagcgaatatggaacatattctgagaaagctattaaaaagcttttgccattgatgcgcttgggtgaatattggaattgggatgccatagatataaaaaccaaaggtcgaatagataaaatccttactggagagtacgatacggatataaaagaccgtgtgcgagagaaagctataaacctgatctacgaaaacgattttcagggtttgcagctatggctggctcaatatattgtttatgatcgtcattccgaagcaaacgatgctgtctattggaaaacgccacaggatatagataattatttaaaggaatttaaacaacattccttacgaaaccctattgtagaacaggtaattacagaaacattacgagtggtacgagatatctggaaaaaattcggagatatttccgaaatccatatcgaacttggacgtgaaatgaaaaaaacagcaaaagaacgggaacgtcttacttcgcaaatgacggaaaatgaaaataccaatctccgcatcaaagcgctgttgatagaattaaaagaaaactcggatggaaaattgaatgtggataatgttcgtccttattctcctgtacaacaggagctattgaagatttatgaagatggtatcatcaattctgatatcgaggttcccgatgatattctgaaaataagcaaaacagcacaacctacaagttcggaacttcaacgttataaattgtggctggaacaaaaatatcgttcgccttatacaggacagtttattccactcggcaaattatttactcctgaatatgagatagagcatattattccgcaaagccgctattttgacgacagtttcagtaataaggtgatatgtgaagctgctgtgaatcgtttgaaggataaccaacttggattagagtttattaaagaacatcatggagagaaagtacaattaggattaggacaagtagtcgagatcttctcagaagaagattaccaaagctttgtaaaagagaattatgcaagtagccgttcgaagcgtactaaacttttgttagaggatatccccgaatcatttactgaccgtcaaatgaacgatacgcgatatatcagtaaggcagtgaaaggactattgtcgaatgtggttcgtgaagaaggggaacaggaggttacgtcaaaaaatattgtggtttgtactggtaatgtaaccaccattttaaaacgtgactgggggctggatgctgtttggaatagcttaattatctcacgttttgagcgaatgaaccagttgaccaatagtactgcatttacctcttggaacgagcaataccagaaattcctgccaactgttcctttaaaattgtcgaaaggatttcaaaagaaacgtatcgatcaccgtcatcatgcgatggatgctttggctattgcctgtgctacaagagatcacgtgaatttattaaataatcagtatgctaaatctgaaacttcacgatatgatttgcagcggaaattaagactgtttgagccaatttcctattttgataagaaagccaataagcaagtggaacggaaaattcctaaagaatttataaaaccatgggatagtttcactactgatgcccggaatgagctggagaaaatagttgttagcttcaagcaaaacttgcgggtaataaacaaaactatcaataagtatcagacttatgaaaacgggaaaaagatactgaaatcgcaagcgaaaggcgacagttgggcaatccggaagcctctacacaaggatacggtatttgctaaagtctcgttacagaaaataaaaaaagtaaaattgagtgaagctttaaaaaacttagaaagcattgtcgataaagaatttagaaatgaaattcggaaaatcagtgcaacatatggaaaatttgaaccagataaaatcgacaaacactttaaagacaggaaatatctttatgggaaaacagatgtttccaaagtggaaatttattattttgaaacagagaatgctgctgtgaggaaatcgttagatatttcatttacagaaaaatttataaaagaatctgtagcagatagcggaatacaaaagatttttctgaattatttagtgacgaaggataataaaccggaactggctttctctccggaaggtatcgaggagatgaaccaaaatattactgccttcaatgatggtaaatctcatcagccaatccgtaaagtgcgagtgtatgaaacaatcggtaataaattccaagtgggatatacaggaaataagaaggcaaaatatgttgaggcggcaaaagggacgaacttattttttgctgtttatgcggatgacaaaggtaatcgttcgtatgaaactgttgccttaaacgttgtggtagaaaggttaaaacaaggtttaagtactgtccctgaaaggaatgaaaaaggacatgtattgctgtttcatttgtcaccaaacgatttggtttatgtgccaacggaagaggaattggtaagtggcattaaatggaatattgaagatattaaagtagacaggatatataaaatggtaagtagtacgggaaatcaatgcttctttatctgtcaaaatgtagcaaatccaatagtaaataaagttgaattctcccctttaaacaagatggagagaggcattacgggtgaaatgataaaagaaatatgtgtaaagttaaatattgatcgtctgggaaatattaaccttttgatgccatgattaaaaagacactctattttggtaacccgacatacttgagtatgcgtaacaaccagttggtcgtgaaattgcccgaggttgaaaagaacgacactttgcccgaaaaattcaaaaaaaacagcgaggtaactttccctatcgaggatttgggtgttattgtcttagatcataagcaaatcaccctgacacatgggctgatagagatgctactcgaaaataatacggctcttatcacttgcaatagtaaccgcatgccggttggattgatgcttccgctatgtggaaataaaacacagaccgaaaaattcagtgcgcaaattcaggctactgatcctctgaaaaagaacctttggcagcaaacgatcaaagcaaaaataaagaatcaagctgatgttctgcggaaattccgttcatgtaatattcgaaatatggaatattgggcaggtgatgtgaaaagtggtgatccggataattacgaagcacgggctgctgcctattactggaaagaagcttttccgcaaatagataactttgtgaggggtagggaagaatctcctcctaataatctgcttaactatggctatgctattctacgcgcagttgtggcacgttcgctggtttccagtggattgttgcctactttagggatacaccatcataaccgatacaacgcttattgtctggcagacgatattatggaaccttatcgtccctttgtcgatgcaattgtgctcactattatagatagtggagaaatttttgaagagttatcacagaccataaaaacacaattgttacaaataccgattattgatgtaatgattaatggaagaaagagccctttgatggtcgcagtaagccaaactacatcttcattggtacaatgttttgaaggaaaattacgaaaaataaaatatcctgaatttgtaatgtgatatcatgttatgcaacaggataggttaaatcaatatcggattatgtgggttttagtactgtttgatcttcctaccgagaccaagaaagatcggaaagtatatgccgatttccgtaaaaatctacaaaaggatggatttacgatgtttcagttctcaatctatcttcgccattgtatgagtatggaaaatgcaaatgtgcatatcaaacgggttaaaaagtttttacccgagaagggacgtgtaggaataatgtgtataacggacaagcaatttggaatgatggagttattttatgggagaagttctgaagccaagaaaacagaagggcaacaactagaactcttctaagaatgaaaaatcccaatcgaaatcgggatttttatttgaaatacatcatttttgaaatcctaaagacttgtaatagttgttgatatacagtgaattatgtgtcgctctactgtatttcaatgaactaagatacaaaattgaaagcttatcacaacatagcttctaataagtctcgaatatcatccactgtatttcaaggaactaagacacaaaattgaaatcagcaacccagaataaattataaaaaactacactttatgaaaaaactattatttatcacaactactatatctttactatcatatacatcaattaaaaaaaagtccacaatcttattaaaaaccatttgaaagaaactattcatgattgggatagttatgaatcagcgagttttggtactctcaactcaacttttacatcagagtttgatgatcctgaatacagagatatgtttataacatatattccttacaaagagctaactgcagaaaagatgaaagaagaagaaacatatcaagatctgtattctgattgggctgtctctaaaagaaaaaaaattcatccccaaatttagaggatggaaaatgaaacatagtttcagggctaacattttactttttaaaataaaaaaatcccaaaacgtaaaaatacggtctgggatttttcgaattaaacgacttgcctatataaatttgatggagtaactcccagaataatacttggactgataccaagcttttcacataatgccctgcctattttcaatgtcggttcggtcttccctgaaatatattcgctgattctcgaagggcttacatttaatagttcggctacctgtacctggtttagtttcatttcttccatacgaaacttaataatatcgggcagtgatggtaactcaatgggatattgctttgattcgtattcctcgatcagagaggaaaggatatcaagctccacggcttcgggtgaagtatcccaattagtatcactcactacttccagcagctcattcacacggttaaccagtgcattgtattctttttcgctatttatatgtctcataattatactcctttcttttaaacttgcgaacaatcttctattttatcatattctgcatgtgtaccgataaatcgaatgtacacatatttaggaacaaacaggactatggcaaccagtcgataattattcccttttatattaaatacatatctcttattacctaccaagtcaacactgttgaatgtgtttttcatttctgcaaaattattccattccgcttccttagttcttatataccaatcctgaagggctgtttttgcatcagcatgctcattataaaaatcgactattgttttttgtacgaaaattctcatattccttcatcgtttacacaaatatagggcaaatattccaaaatacaaaacaaaacaatttacatattttgaaattcggaatcacattttctctgatattttgtttattcgaaaaatattaccacatctgttgtaccaaaaacgattaataaatagcataatatcacacaccacatatatatctataaatcaataatttcctcctttttacttatcaacttagctgtctcataagggagttcccgtatcctcattctgagaagaagccaaagcaaggtttccttataccactactaaaacagaccaaggcataaaaatcgctctacagaataaaattcctataaataggatattttcttggtaaaaaaaagcaacattaacaggcaaacagccaatcatataaacacctacaaaacagcaatttacatcaaacaattaacattttacgagaagaaaaaagaaacttttttatcagtccttttttgttatatcaaatttactcctatatttgtaatcgaaaatgacatactaagcgaataaaacaaaaaatgtttcaaaggcacatctataaaaattctatagataatctaagatttaacattttggattttgccgtatgcgctaaaatattagagagagagagagagagagagagagagatgcgcatcggataaagcaaaatctccgaagatacaaacttttctgttatacccaaatgacggatcacttttttgtgtgtccgttaactttcattcatatatttacttttttattacacgttggctgggcaggttgtgccgggttgagtcgttgttgtttttgttgtttttcgagtcttatccgaacaatagcctgcgtgcaagccgaaatattaagacagcagggtgcagggattgcactttgctgtatttttctatccctaaaaaattactcttttataacaacaatttagaattaaaaagcaatgaaaaataaaaaaatttatttattaatattatgctctttaagcataatgtccttaaaggctcaagtgggagtcaatacggatgatcctaaagccagtttgcatgtgataccacagacactggacggtaccacccccgaagggattatcttccccaacctgacacgtgcacagttgaaatcgaaagatgcgctatacggctcagtccacaagggagcagcggtatatattacgacgatagacggcacagcctcggagaaaactaagtatgttacaagtaccgattactattattttgatggtacttactggcgtaacatgagctctctgggaccatggatgattcagggtacaacaattccggcaacaagcaataccgacagtatctaccaaacgggaaacgtggttgtaggttcaaagattccgcacctgacaggtactctgctggaattaaagacccagcaaagcacagccactataacaagtacggtcgacaataacaatgtaacatcaacaaaaggcggttttttgttgcccaaagtaaagctggtcaatgttaataccctcgaacctttcctgtcaaccaccgaccctgagtttacttcaacggatctgaagtaccgtctggcaggtcttatggtttacaatatatcggatgccggggtattctatcctgccgtttatatctggaacggcgaaaactggcagacatcccaaaccgatccggctacctcttccataacaggtcaaccggcagctttcacgttctatgaaaagggaacggaaagccttacgccgttggttttcaatgtatcgggtctgggtacatggacttaccaatggtaccagatcacagggaacaatatccatgtacgtatagctacaccggtgggtactgccccggccataagcggtaccggagcacagacatccagtttcagccccactggtgcactaaagggcagcaccctcgatgcagataataccggctactatcgtttttactgtgttgcacaaagctcattcggagcccgtctcgaatcttcaatagccgaggttgctgtcggctgcggtgctaaaaataatttgggcgagtggattagttttatgtgtttcaatctgggggcacaaaatggcattactatccaagaacagaaggactataatgtaggagcctttacaaataataacaacggggctgccagccaacacctttatatctcgggagaggaaaatgtctggggaagtctctttcaatggggccgtatagcagacggacatgaaaagacaaacccggctctaaacaatatggcttataccgctgcaagtccgcctgcatatgcaaacggaaatcgttgctcaacatctgataactacagacctctccagcagattgctcaaaactcgtcttattacgggaagtttatttatgccccaccttctccctatagctggtatacaggcgatcttgccgacctgtggcgttcaggccgttttatccagaatgacccttgcgcccattataatacaaacggaagttatcaggaattctggcataacggaactgatactcaaaataattctgtcgcctgtaccaactccaacaccgcctggcgcttaccttcgcaagacgagtggggggagatttatagaggcggtatgatttcgggaagctcagtttcctcaacagccaatacctgggtctggtataacggaacatcctctaattatagcaggggttatgaaataaaacctgatggtattacgactaccttatttttgcctacggctggttatcgcagcaacacgagtggacagctatacagccagggaacccaagggagctactggagcagtactattatcacaacaaattcctatttcctgttctttaacgatgtttccgtgaatccggcagccagtatctaccgtgcctacggctattcagtgcgttgtatcaagaattcataaaataacagttgctagcatatacaaaatagccggatacaaatatacaaatagagtattttatgagaaccaaatcaagagtacttgtcctgttttatctatttatacccttgctttccgttgcccaggaaataacattggatttaccggcttgccgttactggcagtatattttctgtttgaattacggtaccggacaggatacggtaaagaccggacgatttgatgagaaaggacatgcccgttttagcctgcccgagcggtactcgtcgtaccggggagttggagttctgacaatcccaaccactcctaaacggctgggtatagtgattaatggagagcctgtactgatcaacgaaccggcgggatctacggatatggataataaactgatggcgatatccagcgaaaatacatatctgacctctaccctatccgaacaggctagcctccttcaggcgtattattatgccatgtcgggtttgagtatccggcagaaaggcgattcgctatatgacagggcattggctgatacggagattttatccggaagatatgtttcttttcgggattctattcgccggagcgactactattctgctcgtattctggaattgttgaattgtttatccggggtcggaagtgctgtaaacatttctcctgattcggttttaaatgagcagcatcgttttctggttgacgaacttgatttccgcactttatatacgagcggctactggtctctggcttgcgatacatggtttcagacatgccgcaacgatgacagcctgctcttatcttcgtcccgcaggatgctcgaccgttgtaaagaagacctgccggtacaacgcgaactcatccagagcctgatcagtatcttttctaaatatggtaaagataatttacttctggatttgggtagggagtatctgactatacctttgaacggtatgcctgctcctgctcttcaactgaatgataaggtgagcattataccgaaaaacagcttgctgctattttacgaaacgggttgtgggaattgccataaggagcttcatgatctgaaagaaaaatactggatgctcgagtctaatgatatccgtgtagtttctatttcggctgatatggagagagaggtctttgaatcgtcttcgactggattcccgtggaaagactgggtatatgaccaacgcggatttaacagcgaaaacttccgtaactacgggatagtgggtacgcctacttttatcttggttgataaggagggtattatccggggacgtttcgcgaagatcagcgaattattaaaatgataatgaaggcctattacatcagttatattatggtgttatggaattcttattacaatactgaatatcgtgttccttatttttctggtgaccggttgattatattatatattttttcctataaatgttggtatggcaagttgtgttgtgtaaagacgttgttttattgtgtttaatatatttatacctaacaacttcctgagcgtaaaaccaacatagggcagcaaggtgcagagattgcactttgctgtattttaaaaataatttatagagtagcctgaacaatcatctgatatataattctacagtccgggttaagcctgctttccgatgttcatattggttttattggtttctctgccaaatggctgttattcttacagagatttctttccatgcccgtatctctgatgtagaagtggctgagaacatcggttataagtaattttcgatatttgtttaacatatcacaagcaagaaaaaaaagatttttttattagtttttttgtcctataaaaattattgtttacatttacagcgaaaataacatatcgaacgcataaagcaaataatatgtttcgagggcacatctataaaaatcctatagataatccaagatttaacgttttggatttggttgtatgcgctaaaatattagagagagagagagagagagagagaga

SEQ ID NO: 1382 - DNA, 15497 bp, synthetic construct
  source 1..15497: mol_type = other DNA
  misc_feature 1..15497: note = Synthetic
ctgttttaataaactacttttatagaaatgggaatattttaagcgcaaatatttgtcgcatcgaattaatttatgtatatttgtggactaaatcgcaaactattactaatccaataaaattaaattatgtctaaaaagttaaagaacattgttcgatcagcgctacttttcttgttcctgctggtagcaggagccgtttcagcgcagcagacaattactggtactgtcatagacgggacaggtgaacccatcatcggagccactgtcattgagcagggcacccagaatggtaccgtaaccgactttgacggtaagtatagtctgagtgtttccggcaaaaagtctgtagtcttctcgtatgtgggaatgaaaagccagaccattaacccagccggcaagagtgttatcaacgttaccttggaagatgactcacaaggtctgaacgaagtggtcgttattggttatggtaccgtacgtaagaaggaccttaccggtgccgtaagtaccgtaaaaggtcaggatctggttaaggtgcctgtaactaatgttgcagaagccctgacgggtaaattggcaggtgtacaaattaccacatctgacggttcacctgatgccgaaatgattataaaggtgcgtggtggtggttctattactggtgacaactcacctctatacatcgtcgacggcttcccagttagcagcatcagtgacatatcatcgtctgatattgaggacatcactgttttgaaggacgcagcctccacagccatctacggtagtcagggtgcaaacggtgttatccttattacgacaaagaacgcccaagctggtaaaactcaggttagctacaacatgtacgtacagggtaagaccattcgcaagaaacttgacacaatggatccataccagtacgtaaagtatctgtatgagcgtcaggctctccaaggagcttctggtataagctctttcgagaaacgttacggctcttttgacgaccttgacctttacaaatatcaagccggtcacgactggcaggatgagatgttcggcaaccacgatctgtcacagagtcataacatcagcatcactggtggtacagataaaacgaagtttaccttgagcggaacatacgccaacgacaacagtctgatggaagacaatggctatcgccgttacaatacaaacttcaagcttaagcatgagttgttcaagaacctctctttagacttcggagtacgccttgccgacacagagacgaagggcgttggtacaggtggtggaagctacaagattcgttcatacgatgccatcatgacgggacctgtctttggtctgtgggatcagattgacattgaccccagcatgctttctgaggaggagtatgaggaatatatcagtgccacacgtacgttgaaagaccgtgtcaacgactactggagaagaaagaatgaccgccgctacaactttaacgctgctatcaactggaagatttccaaacaattcacctatcgcgttgagggcggttacgactatctcttcaaccaacagaaagactggtatggagcacgctcaaacaaggctgttcaggatggtggtagcctaccattgggtgaatggtcaaagaaagacacttggaagctccgtgcttctcacaccttgacatggaagaagaagttcaacgacatccacgacttcaatgtaatggttggtcaagagtatgtagctactaacagcgagacaatgtctattgtcggaaaatacttccaaaaggacattaaacccgagaagatgtttgctgccatgcagaacaactcaaaggcaactggcgcacagactatctcgtcaagccttggacaggaagaccgtaccgtatcattcttcggacgtatgatttacagcctctacgaccgttatctcttgactgtcaccatgcgtgaggacggttcatccaagtttatggaaggtaacagatggggcttcttcccagctgccgcattaggatggcgaatcactgaggagaagttcatggaaggttcaaagaactggttgagtaacttaaagctgcgtctttcatacggtactgcaggtaacaaccgtatcggaagtgctatgttcgagactacatacaaggcttactcaagcaccaagtactatggagccggcaaccagcagaacccacactacactctcaataacgcacagttggctaaccctgacctgaaatgggagaccaccatcacccgtaacatcggtttggacttcggtttcttccgtgagcgcatcaacggtagcatcgactactactggaacaccgtcaaggatcttctcgtagaagtaccaatcaccgctatcggctataccagtatgcaacagaatatcggacagacatctaaccgaggtatagaattgacattaaatgcagttgcactgcagcacaaagattactcattgaacttcaacttcaatatcggtttcaacaagaacaaggttgacaagctttccgacggtgttgagatgatgtcattcaactctggagcattctctacagacatgcgtggagcagatgactaccgcgtcatcgtaggtcagcctcttggtctggtatggggctttgtatatgacggaatctatggagtggatgactttgaaacttaccaggatgccaatggtaacactcagttcctatttgactcctctggtaaatacatcctcaaagaaggtgttgttgacaacacctacatgacagcaggaagcaaaggcgggcttcgcccaggcgcaatgaaactgaaggatctcaacggagatggcaagattgatgccgacaacgaccgtcagattatcggtaagacacagccaaagttccagggaggtttcggtcttaacgccacatacaagtggttcgacctctcagccaacttcaacttcgttgttggcaacgacgtatacaacatggacaagatggtagcatcacaatcataccgtaaccaatgggctgctctccgtcaagagatggcaccggtgacactcggcggtgaggcatggacttatctggatcagaacaccggtaagattattaccgactatatgactctcaaggaaatgaatgccaacgctacgagatggtcaggtacgaccatgtctgacaacaacccggttccaacatcatgggctgttgaggacggctcgttcctccgcttgcagaacattacactcggcttctccttcccagacaactggatcaggaagtttgcatgcaagcagctccgtctgtactgcacattaaacaatgtattctgcctgacaaaatatgaaggttatgacccagaggtaaactcttcaattcgtaatagcaagaccagtggtctgacaccaggtgcggatttctccgcttatccaaagtcattctcctggactgtaggtgcaaacatcacattttaaataatcaaactaagcatatgaaaaagctatttatatatattgcagcgctgacaatgacattcggtctgtcttcctgcgaagacacacttgacacagagtctttgtcaaccgatgacttggggtatctctgctccaatcctactgatgcccgaaaaatgatagaccatgtatatgcctatttctgcgaagacacttatacatcacgtatgagtaccaactggatgcagaatactgacgtagaggtaggcttcgttactcaggcgaataccgaagaagctacccgccgcggtatttgggcactgaacgcacaccagttcagcgacataaagaactgttgggataattccctgaaagctattgactttgccaaccagtgcattgaaggcattacaaacagtgatatgtacaaggaaggtgacaaggacatgaaacaactccgtggcgaggcattctgtctgcgtgcctactggtattggctgatgtgcaatttctgggcagatgttcctttcgcaacaactccaacgactaaggacaacatgcacaatgacccacgttgcgacaagaacattatctatactcgtcttattcaggaccttattgatgttgaggctgatatgcaatggagtactaacactaccgtagagcgcatgaaccgcgacttcgcattaggttttatcgtaaagcttgctatgttccgtgcaggttactccatgcaggctgacggcactatggcacgttcaacacaaactggtgaagaatatactgttacatataaggatgagaacggaaatgatgctaccgcaacgtccgcagatgactattacaaggttgcaaaggcttatgccttgaaacttataaatctgaaggatcgcgcattgaacaataacttcaaggaaatctttagcaatgagatcaatgacaagaatccgtctgatggcgatgtactctttgagatgggcttcgttccaaactctggaggtgacattggctggtgtcatggactgagtgtcgtaaatagtacaaaaggctcaggtacgacatatactaacctcatgccaagctatgcatgctctttcaatccacaagaccaacgtctccctgccacatgtgtcaactatcgttggctgtatgatgacaagcagggtgcctgcgacgctctaggtatccaacccgcaaagtggtgccgcatggatttgagcgtcacaagcgttgaaagcaagggaacaggtattaactggcctgtattacgttatgcagacgtgttacttttgcttgcagaggctgacaatgaaatcaataaagcacctacggcacttgccaagcagatgctgcagcgtattcgtgagcgtgcgtttgtcaatgccaccaataagactgatatggtagacaattacatcgctaacctgaattcatacgaggcattcaaagaagcaatcataaacgagcgcgcatgggagttcggaggagagaacatccgcaagtttgacctcatccgatggaacaattactctaacaaagttgtagatgctattgaatggatccgtaatgtcgcaatgaacttctctcagacaagtattgttaatggcgagttcatttatgacaaaaacaaagagattcaaccaatgaacgtggcaaaccgtctgtattataactacacaaagggtgctttggtattcgagaacgactatttcacatatcgtgacaggaagagtagcccatataatactgccgagcgccttgccgatgatgacattaaggcatcaggtgccacattcgatggactgaaatacgcaaacttcctggaagctctgatgtcagtaagcgacactgatcctgagacaaaggagaaatacggaacagacgctaacggagatgctatcaaaaagggtattttcaatgagcgtatccgctactcatgggtaggcttgacagagggtgtacttgtcaacggtactgaagacctcactccaatacgctctaaggtgactccatacgtcatccctattccaaccgatcgtgtgatgtcgtctaacggtgtcctgtcaaatgtcggttatgcaatacgtaactaataaacagaaataattatgaaacttaagaaatatttcattctttcactgctcgcacttaccacagcgggatttatgagcagttgcagcgatgacgaaaatctcggagaggctccgcgcctgttcagacctatcgcatcattggaagtgagtcgcaataccattatcaccacgtgggataatattaaggatgccacatcatacgatctggagctttataaggtaacaggaacagatgatgaaggtgaaaatatctatgagctggtgaaatccgcgacatgtgaggagtctccatatacatggtctgaccttaactgggacgagaagtatatggttaagattaaaggctataactcaagcaaagcctctgatgtatacacaacaagtgatgtaagtgtcaactatatcagtaacctgagtgagattaagctgatagacaatgccgcacgcttgacatggtcaacagacggtgatatcatcaagcatattaccgcagttgccgagaatggtgagaaactggagttcaatgtaaaagaatctgagtttcaacaaggattcaaggatgtctacggactgaaccctgagaccaagtacaccttctatacttacaagagcgacgaggaatttaacaacgacacctacgctggtaagctgactggcaccacaaaggcatcgacaaactttgacgagtcatacggtacaggtatgtggcttgacatccgtgactacgagccatctgaggcaaaggatactcttaagtccgaagatttctgggcacaggtaaaggatggtatgactattattcttcgcggagagcaggaatataaggtaaacaacaccgtgaagtttgaccgctctgtaacattcgtaacgggtcctactcttggcggtaatgctatcttcctttcaagtggtggtatgacctgcactgccaatgctgtcattgacaaaataaagtttgagagcatcgactttataagcgataaggcttacaatggtgacaacgccattgcgaccaacaccgacaaggcgtttggtggacgtcaggttctcaataacaacggtacaaaatcaaccattaaggaattgattttcaagaactgtaagattgaaggctaccgtgccgtcgttcgtgcacaaaattctaatgatgccatcaataagattatgttcaacggctgtacaattaacggtgtcggtgatcaaggtgttgtaacaacgacaaacagtgcagcagattggcaagacatcacattcgatgactgtactataacaaatatcgttatgctttgtgacttgcgtgagaccaagagtgcaccaacattcactgtcaaaaactgtaccttctgctatgctccaatcgagaccactgccaatgcaaacacaccattattccgctttggtgagaatcctgttaagcttgaggttcagaactctctgttcggtccatctatggcaacagacggctctgcaggatcaaaagtacatgcatatcaagcaggaacggcaggatctatcctgctcaacggagccagtgcaagtgtaaatgttttgcaatcgttcaagacaaacttcacatacactgaggttggtaccaacccaaagcaatatccaattgaaggcctaaacgagctaagtctggatgagtcaaagttatggaaagacccgactaatggtgattttaccataattggcaatattggtgtttctggtgtaggagcatccaagtgggctaattaatacatatatagtataaaagaaatgccatctttgtttgagatggcatttctttttttacataaattcctgaataaaaaaacagtacaaattacgccacttttaatagaaaatcattacctttgcaacaaataacatctacaaaactataatcgttatgacaaacaaactaaaaactatgctgactgccctgctaattagcacaggaatgactgtcagcgcacagactgccgacaacatggcattaaatgccacatgggcactgacaactggcacaggaacggagaacgctgttcttactcctgacaacgccaatgatttctttaagactgcaggcatgagcctgggaagtaacatcaaagtagactacgagagcggaaaagactatgccaccagcactgttgccacaacctccgacggctacacacagacgtatttcaaacctacaggcaaggaaaccagcgccaatgacggcaacgccatcacctttacacttgatcctaagaccggcatcgccttcacaccgacaaaggttggtctgaagattgcacgctggctcactgacaaatgcagcgtagacatcacatgggtgaatggtgacggaaccacgaaatccctggcaacaaatatcaagcctaaccgcgacaagaatccaagtggcggtgacgagacctgctctattctggagtatgacctcacaggtaacaaagccagtgaagatgcttgtgctctgcgtataaatgtatacaacatgggtagcaacaagaccgtaagtatcggtgacgtgtttattgagggaaccgtaaacggaaccgtggggcaagccattatgtactctctcactctcagtgccagtccagatgaaggcggtacggtgtcagtgtcacctgctggaacatcatttgagagtggtgacatcgtcacactctctcaaaccactaacccagactaccgcttccttggatggtacgacgccggtgacaatctaatcagtgtcgcctcaccttatcagctcaccatggacggagacaaggtaatcacaggaaagttcgcgtcaatggaagacctgatgaaaggcgactatgttattattccttcgggcgatgtaaacgcattccgtgaggctattaagaatgccaacaagaacacttctggtgtgcgacaatatatcttccttgagaatggcacatacgactacggtacatatcataacccagagtctggattcacaccttacggacgtgatactatatttgtcgacaacgtatcgattataggtgagagcactgagggagtcataatacagattgaaccagagcaggcaagcgtaagccgtacctcccctatcgtcatcaaaggaacgggcacttaccttcaaaatctcacacttaagaataactatgcatacggtggtaacgagggacaggctgccgcactgcaggacgagggacaccataccatcggaaaggaaatttgcctgacctctaaccaagatacatactattcacatactgatacaggacagctttactttgaggactctgagttccaaggaacagtcgacttcatctgcggtaacggtgatgtctacttcaacaggtgtaacctcgtggctctaaaccgtaagccgagccaaggcagctatcagggtgacacccatatcgcagcaccatataccaaggtacagagctttgacgcacctggcggacatggttatatcttcaataattgccacatagactgcaaggttcgcacatgggactacggacgcggatggagaggatggccaaagctggcatacctcaactctgtactgtcacctgatgcggtattacgcgtcggcaacgaccagacaggtggcaagcctatagactacagcctccgtgtaacagtgaaaggtatcaagaactcaaatgacagcttcgcaatgcagttctatgagtataacaccaccgacgaacaaggcaacgtggtaagtccaagcagtaaccaactcacattcactgcttacgacagtcagacttacgagactatcctacagcctaacgagacagctcgcttcgagcttgccaacgtctatacagactgggcaccagaccaggattgccgccagattggaatgacctctgtcagtctttcaggcaatactctgacatggacttccagcgaacaggcaaaggcttatctcatagagaacagcggcagttatgtgactatcgttgacggtacagagtcaagcttcgacctcacgggctatcagggtggcaactatacagtacgggcagccaacatgatgggtggtttcggcaagccactggaagtaaacggtgttcctgacagcatcaaggctcttgacctctcttccgagaaacattctgacggaagtatatataatattatgggacaaaaggtaagtacacctacacaaggaatatatatcattaacggaaaaaaagtagcattcaaatagaacataggtgattatccttgcttcttattttggaattactaccataacaaaagaaataagccgctgcatcattatgatgcagcggcttatttctttcagagccatagacaaagactttgtaataaaataagggcgagtcaccccgcccaattgttttcacaacggaataatccttattgtgattagctaaatttcgtattgcaaagtaacgaaaaaaatatcatatatgcaagtattttcattgaaattttatatctttgtagcaaaataacaaaaatcagaatctatgaaaagaattttaggattagacttaggtacaaatagtataggttgggcagtagttgaagaagaatcacacaagattttaaaagcaggcagtcgcattattccaatggatgctgccacgctcggcgattttcagaaaggtaatctgaaatcaccagcttctacaagaacagattttagaggaacacgtagattgtacgaacgtgcagtccttcgtcgcgagaggctgctacgggtattaaatgtactggattttcttccagagcacttcaaaaaacaaatagattttgaaaatcatcctggcaagttcttacatcatggggagccgttgcttccatatcgtaaaactgcgaatggtaagaatgaatttattttcaaagactctttcaacgagatgattgctgattttatgataaatcagcctgaattgcttatggatggaaagaaagttccatacgattggaccatttattatcttcgcaagaaagccttatcaaaacctatccaaagagaagagttagcatggattattttgaattttaacacaaaacgcggatactaccaacttcgaggtcaggaagaagagactcaaacggcagataatgaagaatacaaagtcttgcgtgttaccaatgtggagaaaatggatgaagacaagaagcgcaaggggatattctggtacaccatcacctatgaaaatggagcaactcaaaggaaatcaggaaaagtcgcaccacgcagcattggcgatatggtggaagtcatcgttaaaacctcctatgacaaagatggaaaaatcaaaactgacaaagaaggcaatccccaaatcaatataagtactcctcaatccgatgaatggaaattactgaagaaaaaatccgaaaatgccattaaagaaagtaacaaaacggttggaacgtatatctatgatgaattgctttcaaaaccagacaccaagattagaggcaagttgattcgtgtcattgaccgtcctttctacaaagatgagttaatacgcatcctcgaaaaacaagctgagttcattccagagttgagagacagagagctatatgagaaatgtgttcgagaactttaccaacagaacgagtcacatgttcaatctgttctgaataaagatttcacttccctgtttgttgaagacatcattttctaccaaagaccgttaaagagcaaaaagtctgagattgctgattgtccatacgaatgctaccatttcattgacaaggaaacgggcgaaaaaaaggaaaaaagaataaagtgtattccaaaatcacacccccttttccaagaattcaggctatggcagttcattcagaatttgagaatctacaaaaaagaaaaggaaatcaacggaaagctgaaaacagacgtagatgtaacttctgaattcatttcatcaccagaggatatcgtagctttgtatgaatggctaaacgaaaaagaaaaaatagaacagaaagattttctaaaatacaagccattcaatttgggaaagaatactgatggctaccgttggaattacgttgaagacaaatcatacccgtgcaacgaaacacactataagattgctaaacgcttatcaaaggttaatgggcaaccactattaagcaacgagcaagaatctgctttatggcatatactatattctgtagacgaccttatagaactgaagaaagcactaaaatccttcgcaaagaaaaacggcattgatgaaaatagctttgtcgatgaattttatcatatagagcctttcgacaatgcctatggctcatactcagagaaagcgattaggaagttactgcctctgatgcgcataggaaagtattggaagaaagaaaacttatccgcaaaaacacagaaaaggattaacaatattattgatggaatagccgatgactctatatctaaaagagtacgtgagaaagctatacaccttaccgacatctcctctttccagtatctcccactatggttagcatgctatattgtatatgaccgccattcagaatcaactgacacaggcaagtggaaatcacctgaagacattgacaattatctgcaagagaatttcaaacagcattccttgcgcaaccccatcgtagaaacggtcttgggcgagacaatgcgtgtggtacgcgatatttggagaaaatatggtgacatctcggagatacacgttgaaatgggacgtgacttaaagaaaagtaacaaggaaagagcagatgagactcaacgtattttaaataacgaacgacggaactatcgtatcagacttttgttacaggagtttgttaatcctgaatacaacatagagggagttcgtccacactctccttcgcaacaagaaatattaaagatatatgaagaaaacgctttgtctaacattggtaatgaagaggaagataataatatacaattaattgctgacaaccttggcaacagtagtaagtatgtcagcaaaacagatatcatgcgctaccgcttatggctggaacagaaatacaagtctccttatacaggtcagataatccctctttcaaaattatttaccacagcatatgagatagagcatgtgataccacaatcacgctattttgacgattctcttagtaacaaagttatctgcgagagtgaagtaaacaagctaaaagaccgcatgttaggttatgaattcatcacaaagcatgctggtgagattatacaaggaaacctggggacgcaaataaagatttttgacaaggttcaatatgaagaatttgtcaaactacattatgcaaacaatcgcggaaagatgcgaaaactgctcatggaagatattccagacaaattcatcgaacgccaaatgaatgacagcagatatatcgcccgcaaaacgattgagattctttcccatctcgtacgtgaggaaaatgagacagaagcgacctcaaaaaatgtaattgccacaaatggaagcatcactgacaagttgaaaaaagaatggggaataaatgatgtttggaacgagattatagctcctcgattccaaaggcttaatcaactgacagaaacacaagactacggcaaatgggttgataaaaatggtaaacgatatttccaaaccgatactccattagaaatctcacaaggattcaataaaaaacgcattgaccatcgccaccatgctatggatgcgatagttattgcttgcacaagccgagaccatgttaactatcttaacaaccaagcagccttatcctctgaaaaagataaacgacatgacttacagcacaaactatgcacaaaaataaaaacagatgacaaaggtaattatatctggcggttcaacaagccatgggagacattcactcaggatgtaaggacagaactaaactcaatcattgtcagcttcaaacagaatttacgcataatcaataaaatgactaacttctattggcattatgaagatggaaagaaggtattggcacgtcaggaaaaaggcgacggctgggctattcgaaaatcattgcataaagcaactgtgtctggtgctgtaagaatacagataaagaaaaccgtcagactttctgaggcacttgaaaactggcacatgattaccaataaagaacttcgccaagaaataaaacgtatcattaaattatacaataatcatttcgataagaagactatcttgaaataccttaaggatagaggaaacaaagtgggcaagaaagatatcagcaaagttgaggtttactacactccacctgttgctgatttgtcggcaacgcgtgtggcacttgatacctctttcgataaaaagaagattgagtccataactgacactggtattcaaaagattctccttcgccatttggaaaacaatgccaacgaccctaagattgcatttacaccagaggggattgcgaacatgaattctcatatcaaggagttaaatgacggaaaagagcataagccgatactgaaagtccgaaaaacagaatccttagggctaaagttccctgttggagaagttggctgcaagagacacaagtttgtagaggcagacaaaggaacaaatcttttctttgccatctatatagacgaggaaagaaaacgttattttgaaagcattcctttcaatatagcagtagaacgattgaaagttggagaaagcgttgcccccaacacagatgaagctggacataaattactgtttgtcctctcacccggtgatttggtgtatgttccagaagaaggtgaacacgtggatgatattcataatgccaataagatttataagatggtgtctgcatctggaaaacaatgtttctttgtcccatatgcagttgcatcaacaatacaaagtccattggagttgggaccaaacaacaaagctgaaaaatcatgggaagatcttatgattaaaagtgtttgccttaaactccatgtaaaccgccttggcatcataacaaaaatctatcaataatactgtaacaccaatgagcaacatcaaactatttcaagacaaaaaaatacgttccgtatggaacgaagaagaggaacaatggtattttgtagtggaagacgtagttgaagcattaacaaatagtgccgacccaaaacaatatgttaaacgaatgaaactacgagatccggaactcgcaaaaggatgggtacaaattgtacccacccttattgtgccaacagtcggcggaccgcaaagaatgagatgtgccaacgtcaaaggtcttttccgcatcattcagtccattccatcaccaaaggcagaacctttcaaactatggttagcacaagtcggctatgagcgcatacaggaaatagagaatccggaactggctcaggagcgcatgaaacaaatctatgagcagaagggatatccgaaagactggattgacaagcgactgaggggcatcgccatacggcaaaacctcacggacgaatggaagaaacgcggcatcactgaagaaagggaatatgccatccttaccgccgaaatttcaaaggctacctttggcatgactccttcagaatataaggatttcaaagggctgacaaagaaaaaccagaatcttcgtgatcacatggatgatctcgaactcattttcaccatgcttggagaaagggttacaacagaaatctctgaaaaggaacaacctgatacttttaatgaaagcaagaaagttgcccaaagagggggcaacgttgccggaattgcacgtaaagaaacagagaaagaactgggaagaagtgtatccacacccaacaatttccttccgcctgccgaacaaaataaagaattggaatagcctatgagaatatcgcattatgtgggtactcgtcatgtacgacctgccaacagatacaaagaaggaacgaaaagctgctgccaagttccgaaaggacatcatgggcgacggcttcactatgttccaattctccacatacatccgccactgtgccagcatggagaatgc

SEQ ID NO: 1383 - DNA, 15436 bp, synthetic construct
  source 1..15436: mol_type = other DNA
  misc_feature 1..15436: note = Synthetic
accagcgtggagaaaaagaagatgagcgccatgactgacattgccccgatgaaggcggccatcagtacggcggcaaagccactcacttgtaaagaacctatggagagtccaccgcccaataacagcatgactaaggccacccccagtcctgcaccgctgttgataccaaagactgaagggcctgccaacggattacggaaggccgtctgaagcatcaggccactgacggcaagggcaccgccacaaagggtggccgtgatggcttgtggcaggcggtagtcgaggatgatggcgcggtaggtcgaagtgtcgccatgcagcagcgcatcccagaattcattccacgggatcgacaccgagccgtagcgcaggttcaggacgaacagcacgatgccgacggccaggatcgcgatggaaaccagcgcgatgggtggcgttttgcggcggagggtatggtcggtgtcggatgtcattatgggattgttttgcgttgcaaagatagggtttaatttgattgggataggatatgggaaacaaataatccgcaaatcttgcggttagttatccgcagattttgcggattattggccgcaaaggttatgtgtttccagaaagcaaactatttcctatatcgttttagtgcctttgtcaactcgtcatgaatggttttgcgcaacgattttggctctatgacctccaattcgttgccttctttgaggatggtttggatgaaatcatgggtgggggccacatggtactcaaagagagcgctttgtttttcggtggctatctctttttgggagtggtgcaagggcaaggtgcgcaggtagttgtccatgggtgagtaggcgcgtagcacgatgcgttctgctttgacgttttggtcagggatgactccgaaataatcatggaaaaaggtctctgcgtcaaatgtcggatccattttgaagcagtggtcggtttcggtgagtttcgtcatgcggtcgagggcgaagactccgaggttgcccttttttctttcggttttgccgagcaggtaccagcgttggtggaagagtttcaggcagtagggttcgatgagggtggagtagggctctgaatcgctgaatttcttgtatcccattcgtaaggtgtgatggtctttgatggcgttgataacggtttgtaggtgttccaacccggcggggatgtcctccaacaggagttggtccttgatggagaggccgtcgaggaggatattgttgacggtgagggtgcggagcatccagttttgtgtggagttgtcgcggagtgcttcggggttggctatatagtattggtgttggttgtcgcattcgatgcagatgccgaacatgtcgtcgatggcttggcggatgcggtagaaggtggtgcgggagaggggacggctttcgtttaggtcgttggagagccaaagttggcagatgtgttcgaaatcgatcttttcggcacgtagtatggtgttcactagccaggtgaattgtctaaatgtgttcgagcttttcattagaaaaatgatttttgtgcaaaaatagtaaaaaaacatcaccgtttcatgttttgaaacagatgtgctgtatttttggcgcgattatagaatttaagaaatgaacagcgataagatttgggcaaaaaagacgaggcgaccgaaatcgccccgaacttgatgttttcacaacggaataatccttattgtgaattgctgcatatcttgtgctgcaaaaatacataatttttcaatactgcaagtgttttttgaaaaaaatagtaattttgaccatcttttttgaattgataaatatttgacaaatgaagaaaatattaggacttgacttaggaaccaacagcattggctgggcggtggtgaatgcggatgaaatagtccgtgaaaatgaaacttcttatttgcaacctaagagtattagctcggctggaagtagaataataccgatggacgaaggagtattaggggattttgatagaggaaatacaaaatcgcagacgaaaggaagaaccgattttcgtagtgcacgtcgactactggaacgttacttactacgtagggagcgtcttcttcgagtccttaaactgatgggttttctgcccgaacactttgcaaatcagattgacgagtttggaaagtttgtcgattatgatgagccgaaattggcttggagaaaagggttgaatggaaagtatgagtttgttttcaaggattcatttgaggaaatgttgaaagaatttgcaacaagccagcctcaacttgtttcagacggcaaaaaagtgccatatgattggacggtttattatttgcgcaaaaaagcattggctcaaagaattaccaaagaggaacttgcatggattttattgcagttcaatcaaaaacgcgggtattatcaacttagaggagaagaagaggaagaacaacatgatagattggtggagtttctggctcaaaaggttataaaagtggaagcgaccggtgaaaaaaaaggtgatgatgtttggtataacgtgtatctggaaaatggaatggtatatcgacgcacgagtcgttttcctttagattgggaagggaagataaaggaatttattgtcaccaccgaactagaaaaagatggatcacccaaaatagacaaagaaggaaaagtcaaacgatctttccgggcacccaaggaagatgattggacgttgttgaaaaagaaaaccgaattggatattgacaatagcaatatgacagtcggttgttatatctatgcttccttgttaaagaatcctgatcagaaaattattggtaaactagtacgaaccgttgaccgtaaatattataaagaagagctgaaacagattttggaggttcagaaagagttgattcatgaactgcaggacactgcgctgtatcaagcctgcatcgaagcactctatccaaacaatgaggctcatcgaaacaatattacgaaaccagattttatcaatctgttcatcaacgatatccttttttatcagcgtccattaaagagcaagaaatcattgattagcgactgcccgtatgaatctcattatgataaagacggtaccccacatccggtgaaatgcattgccaagtcaaatccattgtttcaagaaatacgtttgtggcagtttgtccaaaacttgaaaatctatcaaagagaaaaaatggtgagtggtggccagttggatttgtttggtaatgagttggcgggcaagttgcaaactgatgttgatgtaacgagtgaattcctgaagtcggaagatgattttgtacaattgttcgagtggctgaatgaaagagcctcaatcaaacaagatacattgctcaattcttatttcaaaatcaaaaaggagaaaggcaaagaccaatatccctatcgttggaattatgttgaggaaaaagaatatccatgcaatgagacccgtgctgtcattttaagcggattgtcaaaatgcgatgtgagttctgattttctaactcacgaacaagagatggggctttggcatttgctttattcaattgacgataaaaatgaaattgtcaaagcattaaaaaagtatgcggagaagaatgatttgcctgatacattcgtggaggtttttgccaaaattaaacccttcaagaaagactatggctcatattctgaaaaggcaatcaaaaagttgcttccgttaatgcgcatgggcaagtattggagtgccgatactattgattcaaagacgaaagagcgtgttgagaaaataatcactggcgaatatgatgaaaacataaagaatcgagtgcgcgaaaaggccatcaatttgacagacattacccatttcaaaggcttgccaatatggttggcttgttatattgtatattgccgccattcagaagccaaagagattgttaaatgggaaacccccgaagatatagatgcctatctcaaacaattcaagcagcattcattgcgaaatcctattgtagaacaggtgcttacagaaacccttcgaactgtacgcgacatctggaagcaggaaggccagattgacgaaatccatcttgagttaggccgtgaaatgaaaaatcctgccgacaagcgcaaaaagatgacagaaagcattcttcaaaacgagaataccaatttgcgcatcaaggctatgcttgcggagtttatggaccctgatatgggtattgaaaatgttcgcccctattcgccgagtcaacaggatattctgcgcatatatgaggagaatgcgcttgataatttgtcaaaagatgacaaagatttcgatttcatcagcaagatgtcgaaaacggccaatccttcaaagtcagatatcctaaggtataagtgttggttggaacagaaataccgttctccctacacaggcgaagtgattcctttgtcaaaactttttactcctttatatgagattgaacacatcattcctcaatcacgctattttgatgattcttttagtaataaggtgatttgtgaggcggaagtcaacaagttaaaggacaggttgctgggctatgagtttgttaagagcaacgcgggaagaattgtgcaaatcagccaaggaaaaacggttaaagtattcactgttgaagagtacgaaaagtttgtaaaggagcattattccagcaatcgaatgaagatgaaaaagttgttgatggatgatattccagacggattcatcgaacgacaattgaacgacagccgttatatcagtaaatgggtgaaaggattgctttcgaatattgtccgtgagaagttggaaaatggtgaatatgaacaagaagcggtttcaaagaacttgatttcgtgcaatggttcgattaccgacaaactgaaaaaggattggggaatgaatgatgtttggaatagcatcattctgcctcgtttccagagactaaatgaattgacggggagacaatgtttcaccgcttacaatgcagaagggcatgagatacctaatatgccgcttgaattgcaaaaaggcttcaacaagaagcgtatcgaccatcgtcatcatgcgatggatgccatagtaattgcatgcgccacacgcgaccatgtgaatctgttgaacaatgaggccgcccattcaaaacacaatgccaatcgctatcagttgcaacggaaactgcgtaggtttgagaagataatcattgatggaaaagaaaaagaaattgccaaagagtttcttaaaccgtgggatacttttactacggatgcaaagcaagtgctggaaaacatcattgtaagttttaagcagaatctgcgtgttattaacaaggccaccaatcattatcagcattacgatgatgagggcaaaaaaacaatgaggaaacaagaaaaaggtgacagttgggcaatccgtaagtcgatgcacaaagatagaaaggattgtaaataaggatttcaaggccaaaatcatggaattgttgagagaaggccgtgatgccaaatacatcaaaaagtatgttgaggaaaacaaggatgtttggtcggacatcaatttgtccaggattgaggtgtattattttaccaaagaaactagcgaacgctattatgccacacgttttcttagtgaccttgtgagttattttgcaggtgtgacgaagtttgaagatgcaataaaaaagattgaggcagttacggacacaggcatacaaagcatattgaaagctcatttgcaagcaaaaggaaataatcccgaattagctttctcgcctgatggcattgatgaaatgaatagaaacattgtcgctttgaaccgcggtaagttccattatcccatttataaaattcgtagattcgagagaggcaataagttcgcaattggtcaaacgggcaataaaacgactaaatatgttgaagctgacaaaggaaccaatcttttctttgctgtgtttggcatagaaaaattgaacaaagaaacgggggaaacagaatcagttcgctcgtatctgactattccactcaatgtgatgattggctgtcagaagagatatggttcaaagtggcgtgttgagattgagtcatttttgaaagaaatggaacttgtttccgttgatgctacattgctgtttatcctttctcctaatgatttggtttatttgcctactaagattgacaatgatggtgccagtagaattgttgaaagatctcgtatttataaagcagtttcttttacgggtaataggttctatgctataccgtataatgttgcccgaagcattgttgataagactgaatatacccaattaaacaaagtggaattttctgacaataaggattctatcaaagagatctgtgtccccataaaagttgacagattaggaaacatcattgaacttaatggccaaaagctatgatcaagcgaaccctgttctttggcaatcctgcctacctctccttgcacaacgcacaattggtcatcaaactgaacgatgcccaaacgcaagaagaggtaacgaagaccgttcctatcgaagacattggcgtggtggtgctcgaagaccggcaaatcaccatcaccaatggtgctatggatgccttgctgcaaaacaattgtgccgtcatcacctgtgatgaaaagcatatgcctgctggtttgttgttgccgcttgaaggtcatacggtgcagagtgagcgtttccgctggcagattgaagcttctctgccgttgaagaaacaactatggcaacagactgtccaagccaagatccgtaaccaagcctctgtgctgaagcggttgagtggggtagaggtgggttgtatgatggcttgggctaacgatgtgaagagtggcgatagcgaaaacttggaaggtcgggcggcagcctattattggaagtccgtttttccggaaatggagcggtttgtacgcgaccgcgaaggtgaggcacccaacaaccttttgaactatggttacgccatcgttagggctgtgattgcccgatcgttggtggccagtggtttgttgcctacctttggcatccatcatcacaatcgctacaacgcctattgcttggcggatgacgtgatggagccctatcggccgtatgttgacgagttagtgatagatattttgcgtagtggcgttgattgtagcgaactgactacagacttaaagcgacaattgttggggctacctgtaaaagaagttgtcattgacggtcgccgtagtccgttgatggtggcggcatcgcaaaccacagcctctttagcgaaatgttttggcggtgaattacggaaagtggtatatccgatgatggaattgtaatggaccgatttagcgaatatcgtattatgtgggtgctggtgctttttgatttgcctaccgagacaaaaaaggagcgcaaggcttatgccacttttcgaaagcgcatcatggccgacggctttacgatgttccagttctccatttatctgcggcattgtcccagctatgagaacgcagaagtgcatatcaagcgggtaaaatcattcatgcctgagtttggcgatattggcatcttgtgtattaccgacaaacaatttggtgacatggagattttcagcaactgcaagccgaagacggtagacacgccttgccagcaattggaactattttgaatcgggaaaaatagtcataacaaagaaaaatccaactcaaatgagctggatttttcttttctgaaacaacttctaaattgttgtggctctttgctttacacatatcgtgttgtttcaaagagcaaagatacaagataaatgcaagcaattcacaaccatgacgaagtgacacaaaagcgcattgaagttgtttcaaagagcaaagatacaagataaatgcaagcaattcacaacttaagttgtcaccatcttctacagttggcagttgtttcaaagagcaaagatacaagataaatgcaagcaattcacaacaggaaggcataatgatagacccaatcacgggttgtttcaaagagcaaagatacaagataaatgcaagcaattcacaacgaaagggagcaatgccatatccatctggcagttgtttcaaagagcaaagatacaagataaatgcaagcaattcacaactgaggctaagcgacggagggatgaccaatggttgtttcaaagagcaaagatacaagataaatgcaagcaattcacaacatggtaactatcaggaatataattctatctgttgtttcaaagagcaaagatacaagataaatgcaagcaattcacaactcgccgtatttttgccgtgtcaataagtgagttgtttcaaagagcaaagatacaagataaatgcaagcaattcacaacaggtgagccattcgccctccttgcccagcagttgtttcaaagagcaaagatacaagataaatgcaagcaattcacaaccattcaccccatagcttgcgggcgatggccgttgtttcaaagagcaaagatacaagataaatgcaagcaattcacaacccctttccttgggcattgttgggatgtgtcgttgtttcaaagagcaaagatacaagataaatgcaagcaattcacaacacccaggaacaaaaccaacagttctggcaggttgtttcaaagagcaaagatacaagataaatgcaagcaattcacaacctattcttgcacaatataggcaagaatagggttgtttcaaagagcaaagatacaagataaatgcaagcaattcacaacgtttcgtgtagaaactcttcaaggtcttgtgttgtttcaaagagcaaagatacaagataaatgcaagcaattcacaacataggttttgccgttaatctcaatagtggcgttgtttcaaagagcaaagatacaagataaatgcaagcaattcacaacgccgtggctatcgtttcctaagtggtacgcgttgtttcaaagagcaaagatacaagataaatgcaagcaattcacaaccgaaacgctgctgcaaatggtcatgatgttgttgtttcaaagagcaaagatacaagataaatgcaagcaattcacaacggtgtttgggttagtcgttaattattaaatgttgtttcaaagagcaaagatacaagataaatgcaagcaattcacaacccttgttgaggtcgaagttgacctgcttgagttgtttcaaagagcaaagatacaagataaatgcaagcaattcacaacagttggccttgttgcctgtccgctccgggcgttgtttcaaagagcaaagatacaagataaatgcaagcaattcacaaccgctggcaggcaccaatacagttgatattgttgtttcaaagagcaaagatacaagataaatgcaagcaattcacaactcgatgaagcgcgtggccttgctgtcgtctgttgtttcaaagagcaaagatacaagataaatgcaagcaattcacaacctccacagtgtcacatcacacgtcggcggcgttgtttcaaagtgcaaagatacaagataaatgcaagcaattcacaactccttttcatagaaagatctatgttgaaaagttgtttcaaagagcaaagatacaagataaatgcaagcaattcacaacaaggtcagcatcgtttccatggccacaatcgttgtttcaaagagcaaagatacaagataaatgcaagcaattctgctattagtacagattattttctacttttgtccccaccaaacatcctaaaactgaccccatgaccagaaaaatgcacctccaagaagaggccgcgcgctgcctgctctgcgccgatgcgccgtgcagcaaggcctgcaagaatggcgacccggcacgcaccattcgcgccatacgattcgacaacaaagccgtcgccggattgtggctcgacccgtgcagcgacgccgagctgcaagccgccgaggcagcctgcatccactacgacaggccgatccgcatcagggagctggcgaaaaccgtcaaaggcacgaagccacaaaaggatctccccagcctcgccatcgacttctgcggcatcccttgcgagaatcccttcttcctcgcctcgtcggccatctgcaccaactacgagatggtggcgcgggccttcgaagctggatgggcgggcgtgttctacaagaccatctgcatggaggacatccgcgaggtttcgccgcgcttcgatgccgtcaacgagccgggccgctccgatttcttcggcttccgtaacatggagcagctgagcgagaaccccgtggaggtggacttcgacatcctgcgcaggctgaaaaaggactatcccaacaaagttgtcatcgcctctatcatgggcaacgccgagacggagtggatcacgctggcgaaaatggccgaagaggccggtgttgacgcggtggagctgaatttctcctgcccacagatgaagttggctggcatgggcagcgacgtgggacagaactcggagctggtgctgttctacacggcctatgtgaaacataacgtcaagataccggtcatccccaagatgacgcccaacatcacccaaatcaaccagcccgccatggccgcccatttcgccagcgccgatgcggtgtcggccatcaacaccatcaagagcgtgaccatgaacagtcgcggcgccgtggccgataagaagaccgtctccggactctcgggccgcgccgtgaagcctatcgctttgcgccacatcctcgagatggcgagaaaccccatcttcgccgccaccaacaatggcaaacgcattgaactgagtggcatcggtggcatcgagacctggcgcgacgctttggagttcatccagctgggctgcagcaacgtgcaggtgtgcaccgccgtgatgcagtatggctaccgcatcatcgacgacctcgtgctgggactgcaaaactatatggcagaacgcggcatcgagcacctgtcggatctggtaggagaggagctgcccaatttcgacacgcccaccaacctcgaccgcgacaccatcgtgtatcccaccttcgaccgtgagcaatgcatcggctgcggccgttgctacacctcgtgtcaagatggcggccatcaagccatcacctttgatgccgacttgcgtcagccgcatctcgatggaaagcgttgcgtgggctgccatctctgccgacttgtctgtcccacaggcgccataggcgtggctaaacggattgcaaaaaggaaataaacggaattgagattcccctgcggggaatggcgtaaagtactcgtataataagcggcggcaagtaatgtttacccgttgtaaacgctacaagccgccgcattttagttggacgaattctccattaacttcgttgaatcttcgatttcccgaagggaatctcttccagctttagaaccttaacgttagattgcccatgacatggaaaccagccatcgggatgaaaccgatttggtagtagcggttgtcgttggggtgaccgtagctgtcgcagatggctgagtagacccagccactggcggcgtagcgcttgttgaagatgttgttgaagttcaccttcacgatggcttccttgacgactttcttgggtttcagcgtgtagccgaggctgacattggaggtgctgtaggccggcaacgaacggtcgaggctctgggtattgtcgagatacatgcgtgagacataattcgtgtgccaggtggcctcaaatcccttgtggtggaaggtgacgaaaccgttcaggatggccgaaggcgagaaggctaaggtggagttgtcgtagtggatgacatcgtagccgtcaccgtcgtaggcctggccgttggcatcggtgttgccttcccagtcgtcccagttctccacgacttcgtcgaagtccttgatcttgttttggctcaaggcggcgttggcctcgatggtcaaccacttggtggggctcacgccggcctgcagctcgacgcccatgcggtacgagtccttgatattggtggtcagggcctcgccgatgtcgctgacggcaccggtctgcacgaactggttgttgtagtccatgtaatagaggttggcgccggcttggaagatgcgtccgttgtagttgtaacccaactcatagtcgaggagttgctcgggcttagggaagggataggaaccgttgtcggtgaagttgttacgctctggctcgcggtggctcatggccacggaggcgtaggcgtggtggctgtccgtgtcgaaggagatgccgcccttggggttgaagaatgggtacttctcgtggatgttgagttcctggttgtagtattggctgtcttcttcgtagaacttgtcgttgatgccgttggtcttgtagtccacatagcggaactgcatgtcgccgaagacggtccagtggtcggcgaaggtgtaggctgccttgacgaagacgttgccgtcgagcttctgtgcgtcggagtcgtagtatttgtagtcgccatcagcgaggtatttgtctgcgacgtcttggttggcgatataattcacataaccgaagtggttgccttggaaattctgggccgagataccgccgatgacgttccaatgtgcgtccttgtaacgtgtgaaccacacgaggccgtaggtgtcctgacgcagtcctttcttgcggacgaagtcggtctttttcacctggttgccttcagcgtcgtaataggtcatgccgaacttcgagagcttgttgttaggacggaactcttcgtagtagccgtagccgtaggtgtagtgcagtgtggccgtagtcgaccagtgctcgttgatctcccatgcggcggagaggaggttgtggtcttgccagaagttgtcagtggtgcgctcccagaaggtgccgtcgttcatctggtagcgttgggtcatgtagtggccgttctcgtccttgacgaagttgccgtcctcgtcggtgacgaggtattcgtagagtgagttgaactgtcccagacccaccttatacatatcggcgtaggtcttgatgcccgtggggatgccgtaggtgccgtccatgaggctcaaatcgttgttgcctgccgtcacgccgttccaggcttggccggtcatctcgaagttaccgatgttcttatagcggaggatgaagttcttgcccatccaggtgaggccgccgtagtagctgccgctgcggcctttggtgccgtggatgaagccgtcggtgtgggtctcgtggtaggctccgtctacgatgaggtggttccaaagcaagccagtggaggccttggcgccgaagttgagcgtgttgaatgaaccgtaggagcccgtgatctcggcactcggcacgaaggaaggtttggccgatgtcagcgatatcgtgccgccgaaggcgccgtcgccgttagtggagctacccactccgcgttggatctgcactgagccgagcagcgagccatagctgttcatgttggcccaaaacacgcactgatcctcgggcgagttgagcgacacgccgtcgagggtgacgttgatgcgcgagtcgccagcgccacggatgcgcatgtaagaggtgccggagcctatgccattctcaccccatgcgatgatgccgggcgtcttggcgaacaggaaggggagctcttggccggtcttcgaaaagtcgttgagctccaccttctcgatgttggtgacggagaagggggcgttcttttggacacgcaaaccgccaaccaccacctcgttaagtacttcgtacttcgtggtgtcatacaccacttcattgttttgagcattcacatttgccgcgaataacaatgcggcgacaacaaaagaaaatcttttcatctcttgagcttttagtttaataaaatgtgaaggggaatgcttgaatctatccaatccctacgccggcattacccggatcaggttagagggtatgttctcagcctattcaccctgccgaagcagggaaggcacccctttgtaattctgcggcaaaaatacagcttttttcggaacgctgataaaaaagtgttatttttgctgacaaaacaaaggcacatgagatgcagattaataggtttggatattattggctggatacatgggtgatggccaatgtcatacaattggctacgcaagacttttgcgcccgcaatctcaaccacatcaacgacccttgcgggcggcagtacgaccaaatgacacaggcggcacggtctgttcccgccaatattgctgaaggcaattcgcgacattcaacttcaaaagaaaccgaaatgcgcctcacggatgtggctcgtgcaagtttggcagaactagccaacgactatgtgaattggctcatgcgacatgaggagatcccatggtcggtgaagtcagaagaacaccaaaatgtaagcaatatccccctcgaccgacccacttataaagacgatgtgcaacacctcagcagcattcacatcctgaagcagaagcacaagtttgatgcatggctttgctccaaaaactcaatgacagaagccaactgtttgcttgtcctttgcaatcgcctcattatgatgctgggcaaacaaattgagaaccaacttgaggcattcaaagaagaagggggctttgctgaagcattgtcagctgaaaggctagcctgcagggcggagcaaagtgctcaaaacgatgctcccatttgtccaaaatgcggtaagccgatgataaagcgtatggcaaaaaagggtaaaaacgctggtaatgccttttggagttgctcaagctatccagaatgtgatggaacaaggagcatttgacaattccggtagattctttcgtaatatcgtaatgacggaataacgacattacgataatcacaaggagatgatcaaaaacctattagataacacaaatacccgcaaactgccgccaccaaggcattaactatctttgctttcaagaaacttcttttgctctcggcgagcaaaggcaacgaggcatgaccgtcctgtgagatggagctggccaacagcaccgagaagggcactgtgcccgtggcaaacaaggtgacaaacagcaaatgcggccccgactctgggatgatgcccaccaagacggccaacaggatcatccacgggatgttgttgctgataagggtttcaatgtcaaagtaatgcagcccgacctggatgacgaacaaggcaccgaaggtccagaggaagatgctcaagaaatgcttgcggatgatgtgttcccagaggtgctccttgacgacatgctcgggtgccgtggcgatgaaccacactacaaagaggctcacgacggcgaagatgaggttcatccagtattcatcgaagatattcagctgggtgtagacggcttcctcatgctcatgttcgtgctccagcatgccgaaggcaagggcggcaatgaataggatgacgcccagcagcagggcgatacgctccgcgctggcgtggcgcatgttgcggaacgatgctttc

SEQ ID NO: 1384 - DNA, 15404 bp, synthetic construct
  variation 308: note = n is a, c, g, or t
  misc_feature 1..15404: note = Synthetic
  source 1..15404: mol_type = other DNA
agatggagccaaaacaaaaacgtattcggtatccataaaatcagaattacatcaagaccaaatggcttttcaagaaacagaatattacaaagaaaaagcaaaacatcgatacaagatagaagccaaaaatagcgagttaaaaaatgtacacggttatgatagagcgatatcatacggtattaccaatatgcaaatgcaaggtgcaatagcaatttttacagtcaacttaaaaagaatactcaaattaatgtagaaaatgtaatctacacatgcattttgccaaatgaacctgtataagtcaaaaaccnactcatataacctacaataaaaaacagttacaaaaataaaaacgcttataacagatgtttgaaatcctgttacaagcgttttttattatctaaaaaaggatgctaatcaaaataagcgatgtttttcagtgccctcaaaattttagcagctttttttcatccttacagttgtaatatgaaagattctaatggattaatctttatttgcaaggttccttctccttgagaaactcttaattgagaagaatacacttgatacaattgatcttttacagtatatagaccatctattaattgccactttttaatgaggtcttttgaaattttaagttcaaaagtacttgtggtcactgatgaaaaattagtaacaacaattattttttgctctgtagaccaacgggcaaatgaaaaaatactttcgtcataaccttttgtaaattgacggttttgagtatgcaactcctgataatcgctcatcaaagccggactattcaatgaaaagttaagaagtcgtctataaaaatctcgcaactctttttcatttgctgttaataacgctccatcaaatttgccattattcatccagcgctggtgatttggcacaccaacataatcaaaaattgatgttcttgaatgtgttccaaatccagcattctcattgccagcttcaccaacttcttgaccaaaataaaccatagtaggtgctgaacttatggttgttgaaactaccatcaatggttttcctttttcagctgatcccgcaaattctggacttgctaagcgctgctcatcatgattgtctagaaaatgaagcatgtggttttcaatatcatttaaaccattctgaatttgtaccaaccgatctggtgtagcttgaccttttatgatggctttcaaggcgtcatacgtctccactttgtcatacaaataatccattttaccaagatgaatgtagtttctatactcttttgggttgtaaacttcggctaatagaaaagcttccgtatttttcatttttatggctgaattcatataactccaaaattcatacggtaccatttcggccatatcaaatcggaaaccatctataccttttgctgtccaatacaaaactatgtctttgaatttcacccacgaattgggtacatttttatttttccaaaattcaaaatgctcctgaactgtttttttgtcatatcgtgctggaagttctggaaaatctttggacccatccgggcgaataccataatttacttttacggtctcgtaccaatcattcttatctggtttagccattcgggagccatttccagtccattttgctggattttcttcaaattccccatcaattaacggatgaacttctccgtttaatggtgcattcgtatcaggaacttcaaatttagtgtttggaatataataaaaattgttatctcttttatatttaacagtagtatcatcatcagcgccaaaatcgcgaactcctgagggattgtttttactctcgtacttgcgcgctatgtgatttgggacaatatcaataatcacttttaatcccgcttgatgcgttctattaataagggcttcaaattcttgcaatcggttttcaggatttactgctaaatctgggtttacattgtagtaatctttcacagcataaggcgatcctgctctacctttcacgacttctgggtcatcattagaaattccgatagcagtataatcccgaattaaagcatgatgcggcactcccgtgtaccaaatatgacttacgcctaaatcctttatttcttgcaaggctattgtggtaaaatcgttgaacttccctactccattttcttcaatagttccccaaggtttgttggtagtatttttatttccaaataatcgcgtaaaaacttgatacacgacttcttttttacgtgcaacaggttctttttgcgtagtattcattttcaaatcagttgttttgcaggctattgccaataatcccaagcctacactcgcaacaatagttctttttttcatcatagttatcattaatgctaatgtcaataggtcttgtaccaaatggacatcagattttaaatttaatattttttatactagatgaagtgaaaaacaattaaaattataccgttctacgtactagtgaataaactacaacgaaagagtagttttatttgttgataacttttagtgtaaacctatcctttaaagtccgttttgactaattataaataaatcctaatatggattaggattgtttcctttttcataaatttgacaaaaattagatccattgaaaaaaacactttttttccttactcaactagccattttattgatttcgcagtttgttttggcgcaagccccaaaaaaaatcaacatagaaaatgctgatttttcagatgtgtatcaaatagaagtgccagatgccgttttactcattggtaacgttcgtataagccatgatggaatagttctaacctgcaacaaagcttattattttcaaaaggaaaaatacatcaaagcttttggaaacgtgcaaatggtgcaaggcgacactttgtttttgaacagtaaatacgccgagtacaatggaaatgtaaaaaaagcatatgcttctggtgacgcagttatgagttcgccagacgcaacgttggtaacagatattatcaattttgaccgaaatattcaagaagcgtattacgatacagcgggaacaattaccaataaagacaatacacttaagagtaattcaggaagatattatgtaaaagaaaagaaatttcgatttttgacagcggttaccattacaaatcctacgtatgtgataaaatcaaatcatttggattattttagtaattcgggacattcgtatcttttaggaccctcaacaattaccagtaaagccaattacatttacaccgaaaaaggattttatgacaccaaaaaaaatctagcacacttcctaaacaaatcttatatcaaatatgacgatagagtgattaaaggtgacagtttgtattatgatagaaacagagaatttgcatcggcgactcgaaatgtaaaaataacagattctataaaccgcggtattgtcaaagggcattatgccgaagtgtttaaaaaacaagattctatgtatgttacaaaaagagcggtggcagtaaattttgtcgaaaatgactcggtttatattcacggaaaaaaactgatggtcaccggaaaagaaggaaacagaatcattagagcctttaataacgtccgatttttcaaaaaggatatgagtgggaaatgtgattcgatacattctagtactaaaatgggactgacaaaaatgataggaaatccaatactttggaacgcagaaaaccaaattacgggcgacattatgcatttaataggagataaaaccactcaaaaattagactctcttaaagtactcgaaaatacttttattctctcaaaagacactttgggaacaggatacaatcaagtcaagggacaaaatttatatgggaaatttctagaaggaaaattacacgatgttgatattatcaaaaacgcagaagtcatttactacatgcgtaatgaagcacaagaattgataggaattaacaaaaataaaagcagtaaaataaatttagtactagctgataatgagatcgaaaccattactttttttcaagaagttgatggagatattttccccgaagacgaactgcccgaaaatgctagaaaactaagaggcctagtttggcgaggcgatgaacgtataaaatcaaaggacgatatttttcctcccgaagaaaatgaagacaatgaaaaaattgccaaagccactaaatcagctaaaggcaaagggaatattccgatgaaaattaggaaagaaacactgaattacgataaaaagaaagttaagaagtagtctcagtttgcagtcacagtacacagtcacagtttacagtgaacagtatcagttttcagtaaacagtcacagtaaatagctgccgataacaaaaaaacatccaataaacgattaaacaataatttgtgaacacagattttttaaaataccaagcacaaacttcaccctatccgctaggcatggaggtgtcacacgctatagggtcttacatctacgcaacagattctagaaaatacctagattttgtagcaggcgtatcagcctgtgccttaggccaccagcatcctagagtcaaccaagccataaaagatcaattagataaatattcacacgtaatggtatacggcgaatattctcaaagcccagctgtagcttattgcaaattgttagcctcattattgcccgcacctttagacaaaacctatctggttaattcaggtacagaagccatagaaggagccttaaaactagcccgaagaaccacaggaagaagtcaattgatttcgtgtcacaacgcgtatcacggcaataccatgggttctatgagtgtcatgggatttgaagaacgcaaacaagtctttcgcccgttgatccctgatgtggagtttatcacgtttaataacgaagctgatttacttaaaataacgcacaaaactgcaggagtattattagaaaccattcaaggtggagcgggattcattcaaccacacaatgactatctcaaaaaagtgagagaacgctgtgatgaagtaggtgccatgatgattctggatgaaattcaaccaggttttgggagaaccggaaaactttttgggttccaaaattacgatgttgttcctgatattgtcgtcatgggaaaaggcatgggtggcggaatgcctgttggtgcttttacagcttcatcagcacaaatggatttgttgagtgacaatccaaagttaggacacataactacctttggtggacatcctgtcatagcggcagcctgcttagctactttgcaagaaattacagaaactaatatcatgcaggaagctcttgagaaagaaaaattatttagatcgcttttggtacatcctttgatacaagaaataagaggtaaaggattgatgctagccgccatgactaaaagcccagatataacaaacgaggttattttaaaatgtcaagatagaggacttatcttattctggctcctttttgaaggatgcgccatcaggattacacctcctttgactatttcggaggaagaaatacgagaaggttgtagcattatactagaagtgatggatgaaatgatgaataagaattaatctttaaaatattcgacaaggagatactctttgttttaactaaagcatttttttgttaattaaattgttcacaaaaattctaaattaccctcacagtacacccacgattacctaattttagttaggctaaattaaaaaaccaaagtatgcaattaagcaacgaagaagaagattataacttatccttatcaaaatttgagtccatgttgaaaaccaacaaggtattctttttcgactccgaagaatttgaagaaattatccttcattatctggatatgggcaaagccactttggcaaaaaaagccctcaaattagccttggaacaacatcctaaagcaacaggacttaaactcgtgcaagtcgagatgcttgtgtatgatgataaattagaactcgctgaaaaaatattgaatgagttgtatgctattgaacccaataatgaagaaatatacattcaaaaagcaaatatatgctctaaaagagaccaacatgaaaaagctgttgaactcttaaaaattgcacttaaatatacagatgatcttgccgatgtgtataatttaataggcatggagtatttgtttatggacaattttgaaatggcaaaaacaaactttatcaattgtcttgaggaagatcttgaagatcaatcagcgttgtataacgtggtatattgctttgaatttttagatcaaaatcaagatgcgatccaatttctaaaagaatacattgacaaaaatccgtatagtgaaattgcttggcaccaacttgggcgtttgcattacagcgtaaaagaatatgaagaagctatacgtgcttatgaatatgcaacgctgatagacgacgaatttgtgggcgcttttatggaaaaagccaaagcatacgaacgtcttaaaaattatgaaaaagcggttgaaagttacagcagaactattgagttagatgatgcaacttcttatgcgctattgcgaatgggaaaatgtcatgaaaaactgggcaataccgctctagcactcaaatattataatcaaactgtacatgaagatcctttactagataaaggctggattgccataactgatttttatgttcgtcaaaaaaactatcaaaaagcactctattttgtaaacaaagcccttgctattgacaaccaaaacaaattgtattggaaacgatttgcaagcatcaacaaaaaaatgggctattttgaagaagcaacctttggctacaaaaaagcagttgaatatggagaaacaagccttgatgtttggcttttttgggtagatattttacaatttcaaggagagtttatggcagctgttcaaacacttttgcaggctaccgaatattatcctgaagaaaacgaaattgaataccgattagctggtttatattatttactaaacgatacaacgaaggcaaaatttcatttgagtaatgctttacgactcaatgccgccaattcaaagttattaaaaaattctttcccatctgtttgggagaaaaaatcagtgcaaaaccacatcaaaaaatatacgggtacaaatgacggagagtaatacaagacgttttgggttagtaggacgtaacatcagttattctttttctaaaaaatattttactgagaaatttgctgcggcaggttttgaaggttgtacttatgaaaattttgacattcaagacattcaagattttccaacaattaggtttgaaaacaaagatatacaaggacttaatgtaaccattccatacaaagaaacggttattccttatctagattccttatccaaaaaagctgcgcttataggtgcagtaaataccatacgcgttacaaaaaaaggcaaactaaaaggatacaatactgattattttggctttaaaaaatccctgatacccttactgcaacctcatcacaagaaagccttgattttaggcacaggtggagcttctaaaggcgttgcttttgctcttgatgagcttgacattccgtatgtatttgtatcaagagaagctactgaaacaagcataagttatgacagaattaatgctacaacatttgataattaccacattattattaatgctacgccagtaggtacaagcccaaatactgatgctttcccactactgccctattcgttttttacagagaagcacattgcctacgatttaatttacaaccccgcagaaacacaatttttgaaaaaagctgctgctcaaggcgctcaaacaaaaaatggcttagacatgcttatttttcaagctgaaaaagcttggaaaatttggaataagtaaaccttgaaaataattgcaaaatccctcaaataaacaattcatttgagggattttttattccttgaaactactgcttaaatagaccaataaattttaaaattataccattgaaaaagcgacccttgtgaggccgctttaaatgttttcacaacggaataatccttattgtgaattgcttcaaaattgtcttacaatattacgaaatatttttttaatgcaaataaggtttttcgtaaaatcaatagtttatttttcgtaagtttatgactataataaataggatgaaacatgaagaaaatattagggttggatttggggacaaatagcattggatgggctttaacaaacaatgatttcgagaataaaatgggaaatattgaaggactaggaagtagcataattcctatgagtcaagatgttttaggcaaatttgatagtggtgtttctatttcgcaaactgccgaaagaacaaaatatagaggaacaagaagattggtacaacgctttttattaagaagagaacgactgcatagagttttaaatattcttgattttctacctcaacattatgctgaagcgattgattttgagaaaaaatttggccaatttaaacctgaaaaagaagaaaaattatctttttataaaaatgaaagtggtaaaaatcagtttttatttttagaaagtcaccaagaaatgcttgctgaatttcaattaactaatcctgatttaaaacaagttccgtatgattggactatatattatttgagaaaaaaagctttaactcaaaaaatttataaagaagaattggcttggatagtattaaattttaatcaaaaaagagggtattatcaattgcgtggtgaggaaattgacagcgataagaatataacatttgaaacgcttaaaattgaacgagttgaagatagtggttcaaaaataaaaggaacagaagatgctttgtttgatatttattttgaaaatggatggaaatatgacaaacaaactacaaaacctcaagactggttagggaaaattagagagtttattgtttcaacaagtatattgtcaaatggagaaagtaaacgtacctataaaaaagtagattctgaaaaagattggatagcaataaaaagcaaaaccgaacaaaccattaatcaaagtgaaaaatcggttggtacttttatttatgatgcacttttaaaaaatcccaatcaaaaaataaaaggcgagttggtaagaaccatcgaaagaaaattttataaggatgaattatcaaaaattctaaaagcccaaattgcatttcataatgaaatttttggagacagaaatctttatacaaaatgtattgatgaattgtacaaacacaatgattcacacaaaaacaacatcaaagacaaaagttttgagtacttatttttagaagatattattttatatcaacgtccgcttaaaagtaaaacctcattaattagtgattgtagtttagaatttgttcctattaaagacaaaaaaggggctttggtaaaagatagcaatggcaatcaagttgtaaaacctttgaaatgtattgcaaaatcaaatcctatttttcaggaatttagattgttacaatttgttaaaaaccttaaaatatacagaaaagaaattgtaaatgatgttgatgtaacccatgattatttaaaaactgaagaagatttagtcgaactttttaattttcttaatgacaggaaagaaatagatcaaatttcatttatcaaacatttactaaagcctttaaaattaaaaggtaaattattagatgcggaagttgcaaaatacagatggaattttgtagaagacaaaatctatccttgtaacgaaacaagaaatcaatttttgaatgccgttgcaaaaattgatctggataaatctttttttgatgccaaaaacacccaagatttatggcatattttatattctgttacggataaaatcgaaataacaaaagcaataaccacttttgccaaacgacataatttgtctgatgaatttataaccaatttttctaaactaaaaccttataaaaaagattatggatctttttctgaaaaagccataaaaaaattattgccattaatgcgttttgggagctattgggatgaaaaaaatatagacgccaaaacattggctagaattgacaaaattcaaaccggagaatttgacgaaaatatgagaactcgtgttcgagaaaaagcaattcatttaagtaaaacaaatgattttcaaggtttgcctttgtggttagcatcgtatattatttatgaccgacacagtgaagcgagtgatgtttcaaaatggaaaactcccgcagatatagcatggtttttaaatcctaaaaacaaatctggcttcaaacaacactcactccgcaatccaattgtggaacaagtaattacagaaacattgcgagttgtaaaagatatttggcaaaattatggcgagggaaaagaaaatttctttaacgaaattcatattgagttaggtcgagaaatgaagaatgacaaagccactcgtgaaagaatgactaaaaaaatatcagaaaacgaaaatacaaaccttcgaatcaaagccattttaacagaattaaaaaatgatggtgttgatgacattcgtccttattcgccaagccagcaagagattctgaaaatttatgaagaaggtgtttatagtaatgaaattaaaaaagaaaagttagaagaaattgataaaatcagaaagaatgccaaaccaacatcttctgaaattatcaaatacaaactttggttggaacaaggttatatttcaccatacactggaaagttaattccattaagtgatttatttacaactaaatatcaaattgaacatattatcccgcaatccagattatttgatgattcgttatcaaataaagttatttgtgaatctgaagtgaatgaattaaaaggtaatatgactgcgtatgagtttattaaaagtgataaacccagaataatccctaaaaataacggcggtagtattaaaatatttacaacatttgaatatgagcaacacataactgcttattataacaaaaataaaaacaagcaaaaacgattattgagcgaagaaattcctgaaaaatttattgaaagacaattaaacgataccaaatacataagtaaaatcataaaaaacttattaagcaaaatagttcgagaagatgatgagcaggaagtaacctcaaaacatattgtttctttaaatggttccatcacatcaagaatgaaacaagattggggcttgaatgatgtttggaacaacataatcacaccacgttttgaacgtttgaatgccttaacaaactctagtgattttgggaaaatagaactcaaaaaagatgaatttggaaacaaaggcaaacaagtttttcaaaccacagtacccgatgcacttgccaaaggttttacaaaaaaaagaattgaccaccgccatcacgcattggatgctttggtaattgcttgtgtaacaaaagaccatattaattatttaaactcaatcaactctgaaagaaccaattattctttagtttctaaactacgtagaactgaagaaattgtaataaataaaaaaagacaaaaaattgcaaaagaattccataaaccttgggataattttacaaaaaaagcagaagatcaattggatcgaaccattatcagtttcaaacaaaacacccgtgttattaacaaaacagttaataaatatcaggcttggaaagaagaagatggtgcaatgaaaaaagtcaccctaaaacaaacaaaaggcgataattgggcaattagaaaaccaatgcacgcagaaaccgtcagcggaaaagtatttttgaaacgaattaaacaaagtcatattactattgcaaatgctattgagcaaatagaattaattgttgataaggaagttaaaaaacaattgacggaaaaaattaaacaatatccaaacaatttggtaggtttaaaaaaacacatcaaagcttttccggtaatgattgatggtaaagcaattgacaaagttcagatttatgaaactatagaagccacagccacaagaaaaacacttgacaattcttttgatgaaaagaaaattgaaaaaataaccgatacaggaatacaaaaaattctattaaaccatttgaaacaagaaatgtatcaaaatgcgatggatgaaaatggtaaaaaaatccctacacatgaaattgctttttctgaaaatggtttagatgaattaaataaaaatataacagtactaaataatggcaaaaatcatcaaccaataaaaaaagttagagtttttgaagagggcggtaaatttagtctcggaaatacaggaaataaaacaactaaatatgtggaagctgccaaaggaacaaacttattttttgcaatttatcaggatgaaaaaggaaaacgaaattataaaacgattccattcaacgaggtaatagaaagacaaaaacaaggattaagtgctgctttagaaactgatgaaaacataaatcgccttttattcacgctatccccaaatgatttggtttatatcccaacaaacgaagaaaaagaaaacttaacaacagttaattttgataaattatcaaaagagcaaacagaacgcatatacaaatttgtaagttgtactggtggagaaggacattttgtttctaataattattcaaaagagataatttctaatgaaaatggttcaaataataaaaatgaacgaatgcttgattttaaaaattccaatactatttatgatgaaaaagaaaaaccaataatgataaaatctgtttgctggaaactcgaaattgataggcttgggaaaattaaaaaaataatccgatgataaaatataaatgcaaaaatcaataggaatgggttttaacccattctataatataaaacaatccaaataaggctttagccaaatatattttggctaaagcctattcaagataaataatcttatcccctccagctaaagctggaggcaattcaaaagctggaggcaattcaaaagctggaggcaatttaaaagctggaagaaattcaaaaatgagaaattgagaaatttggaataaatttataattcaggaagatttaaattcaataagaatgagtttttatacattcaattacaatcaataggattgggttttaacccaatcgagaatatcgaatatttaagattggctttagccaaaatatcgacaacataaacaataaattatgccatacatcaaaacctatattcattttgtttggagtacaaaaaacagaattccttttctggacaacaaagaattaagacaaaaagtttggcatcacatcaaagaaaacgccaaagacaaaggaatatttgttgattttgtgaatggatattctgatcattgtcattgtctggtttctttaggggccgatcaaactattcaaaagacaatgcaactcattaaaggagaatcatccttttggattaacaaaaacaaattgtgtttagacaaatttgaatggcaagacgaatattttgcagtttcggtttcggaatctatgattgataaagttcggaattacattaagaaacaagaggaacatcacagcaaacaaagctttcaagaagaatatgatgaattcatagctaaatatcaatttcaaaaagaatagaattagactaaagctatgcaaccttctttttattatatccctcctgctaaagcaggaggcaattcaaaagcaggaggcaattcaaaagcgggaggcaattaaataggaaaaagaaatttaaaacaaaaatcaattgaaaatctgggctgtaattcaaaagcagaatacatttgaaaattaaataaatgctttacattcccaaaatcaattggattgggctttagcccattcaaaataaaaaaatcacattataattggctttagccaaaatattttatagtcattttttaatccaaaaaaataatgataaaaagaaccctattcttcggtaatcctgcttatttgagtactaaaaacgagcaaatagtaatctcttatcccgacaaggaacaagaaaccaaaaccgtggccatcgaagacataggcgtaattgttctagaaaaccaacaaatcacgataaccaatggtttgctagaaaaactaaccaataataatgtggcattaattaattgtgatcaataccacatgcccattggcctattaatgccgcttagtggtcataccgaacaaacggagcgttttaaaaaccaaattaacgcttcggttccgctcaaaaagaatttatggcagcaaaccattagctctaaaatatcaaaccaagcaggattgctcaaagaaaaaagaattccgtgccggaaaatggaactttggtcaaaagaagtcacatcgggggatgcgctcaatcatgaatcgagagcagccgtattttattggcaaaacctaatcaaaattgaaaatttcactagaggacaaaagggaattgctcccaataacttattgaattatggatatgcaattttaagagctattacagcaagagcgcttgttagctctggaatgttacctactcttggcatctttcatcgcaacaaatacaatgcttattgccttgcggatgacattatggagccttatcgtccctatgttgatcttattgtttgtcacattatggaaacggaagacagctatgacgaactgactattgaaattaaaaaacaattgttaagtattgcaaccatcgatgtcttaatagacggaaaaaatagtccgttgatggttgccatgagcagaacaacccattccttacaagaatgttttgaaggaaccgcaaggaaaattttatatcctgtttatgtatgacgaacactacacccgattaaaccaatatagaagtttgtggatattagtattttttgatctgcccaccgaaacacgcaacgagcgtaaaattgctagtattttagccccttaatagttcggagtgatattttaaatttcaaatagtacatttgatatatgaaatacaagaaatggagtttagaagaaaagctagaaatcctatccttttcagaagaattaggagttgttgaaacgtgccgtaaatacagcgttagcactggcactttgtatagctggaagaagaaacacgagaagcagggagaagctggtttaaaagtaacttatgacactagtagtaaagagctaaagcaagctgaggaagaaaacagaattctacgcaaattattagctaacaaggaaatcgaattagaaattgggcgtgaacttttaaaaaaaaagtttgggacatccgatccaagaaagatttagtagatagtatttatagtaaacataagattagtaaaaccaaaattattactatagtaggaatggttcaaagtagttattaccgaagaccaagctcaaataaaaaaggtattaaacctagtgaatttacttttaataaatctaaaggatatgtaagtcaagacgcggttattaaatcgat

SEQ ID NO: 1385 - DNA, 15403 bp, synthetic construct
  misc_feature 1..15403: note = Synthetic
  source 1..15403: mol_type = other DNA
tacacatccttataaaaacccttaggtatataggcgtttgtccttaacttcctatatctttctccttaaactccctgagtattttattattaataaaggaggaaagtgtaatatttccggttcttaattaggatttcaacactttacgaatgactttccgacaatgtttcaagtctttttcttttaggggatttgtttttgtcccacctctttccacagaagcaatcactttaaaaccgctccatttaagaatctctttcaaggctttcactacacctcttgtctggttaaagaggatattgaaaggatacatcgtagtgcaagtacttacaagaatagccttctttcctttatgcaaaggaattggtattccacgcggactttcgcccatcataccatacactatgcggtcgaacagaactttcagttgtccgggcagattaccccaataacaaggtgctccaataataaataaatcacagtcctctatctttcggagagtctcttgtgcaccgtcctcgggaaacacacacttcagcgccttgcggcaactcatgcaacccatgcagggttttacctgcaaactgtctacacgcactacctgaacggtagcgcccgccttttcagcttcttccctcatgctttccagcatttgcgaaatactcccgttcttccggggacttccatttaagataagtatgttcattcttttgttgaaataaataaaaaaagcccccgataaaggacgagggcaacctagatgttttcacaacggaataatccttattgtgattagcttcaaattagtatggcaaaactaaagaaataaaataggaaacacaatagtttttaaatattatttataattttggaggaataacttaatagaaacataaaatgaaaagaattttaggtctcgacttggggacaaacagcatagggtgggccgttgttaacgcaacacccaaaaaagacgaaagagagaaaattcatggcatagaagctttgggttgccgcattatccccatggacgcggctattttaggagatttcgacagaggtaattcaatatctcagacagcagaaaggaccagattacgcggcatccggcatttagttgagcgacatctacttcgtagagaacgattgcatcgtgttcttgacattttaggttttatacctccacattatgcacaagaacttgaccgatatggaaaaatattgaaagataaagagcctaaacttccctggcgtaaaaacgaatcaggacagtacgaatttatctttcaagagtcctttaacgaaatgttggaggatttcaggaagaactatccggaacttgccgcaaatcaaagaaaagtgccttatgactggacgctctattatcttcgaaaaaaagcattaaaagagaagattactaaagaagagttagcttggattcttttgaatttcaaccaaaagcggggatattatcaattgcgaggtgaagaagaagaggaaaatgagagcaaaaaggtagaattctatgcactgaaggtggttgcggtagaagataccggaaaagtaaaaggaaaagaacattggtataatgttcgattggagaatggatggatatatagcagaaccagtgaactcccactcgattgggttgggcagacaaaggaatttattgttacaaccgatttagaaactgacggaacccctaagaaagataaagagggaaatgtaaaacgctcattccgtgcaccgaaagaagatgattggaatttaataaagaaaaaagccgaaaaagatattgaacagactggtaacacagtgggtacttatatctatgatacaatcttacaaaacccgactcaaaaggttcggggcggattggtaagaaccattgaacgcaaatattataaggaagaactagaactgatacttaataaacaatgtgagtttcatccggaattgcaagattcggaattatatgcaacttgtgtagaagctttatatgctaccaatgaggcacatcgtaacaatattgctaatcgggattttacttatttgtttttaaatgacattctattctaccaacgtcctttaaaaagcaaaaaatcccagataagtaactgtccttatgaagaaaacagttgcatagacccagcaaccggagaaataaaacatttccccgttaagtgtataaccaaatcacatcctttgtttcaagagttccgcttatggcaattcttctcaaacttgcgcatttataaaagagaagatgcagaggatgtagacgtaacccacgaactgctgaaaacagaagatgattacatcgctctgtttgaatggttaaatgatagaaaagaaatagaccagaaagcctttttaaaatatcccgcgtttggactgaaaaagaatgccgtgttttatcgctggaactatgtagaagataaatcctatccatgtaacgaaacccgcacctctatattatccagactagaaaaatccggaattcctaaagagtttctgaccagggagaacgaagaagctttatggcatattctgtattccgttgaggataaacaagaaatagcaaaagctttgaactcttttgccactaaacacggtttaaaagaggattttgttactgtcttccaaaaaatgcctccgtttaaaaaggaatatgcgtcttattcggcaaaagccatcaagaaattgttgcctttgatgcgtataggcaaatattggagtgaagatgccatagacgcctccacacgaaatcgaattgagaacatcctaacgggcgaatttgatgagagtatcaaatatcgagtaagagaaaaagccatcaacctgaccgatatatcagactttaaaggattaccggtgtggctggcttgctacattgtttataaccgccattcagaagctaaggatattagaaagtggaaatctccggatgatatagatgcctatttaagctcattcaaacaacactctttacggaatccaatcgtagaacaagtgataacagagaccctgcgaacggttcgcgatatatggaagcaagtaggaactattgatgaaatacacgtagagttagggcgtgaaatgaaaaatccggcaaacaaacgtgctaaaatgacacagcaggctttagagaatgaaaatgccaatctgcgtattaaatatctgttgacggaattcatgaatccggagtttgagattgagaatgtccgtccccattcacccagccaacaagatatattacgcatttatgagagaggagtcttggatagcgtctcagaattgccggacgaaattgggaacatactgaagaagtttaatgaaagagatgaaaaaaagcgcccgacaaagtcggaagtcttacgttacaagctgtggctggaacaaaaatattgctcaccttataccggtaatgtaataccattagggaaactgttcacatctgcttacgaaatagagcatgtaattcctcaatcacgctatttcgatgattctttcaataataaggttatttgcgaagcagaggtaaataaattgaaaggaaatcttttagggcatgaatttatcgagaaatatcatgggcagatagtattagggggaaaaggaaagattttctcagtaacagaatacgaaaagtttgtgaaagaccattactactcgcatgcaaacaaaaaaatgaagagactcttaatgaacgatattcctgaaactttcatagctcgccaattaaatgatagccgatatataagtaaggtaatcaaaacattattgtcaaacattgttcgggaagaagaggaagaagaagccatttctaaaaatgtcattacctgtacaggtgaaataacaaaccgtttgaaaaacgattggggagctaataatgtgtggaataagataatcttgcctcgtttcaggagactgaataagttaacaggcaaaaacaattttataacaacaaatgccgagagccatgagattccggttgtgccgcttaagatgcagaaaggctttaataaaaaaaggatagaccaccgtcatcatatattggatgccattttgattgcctgctccaatagaaatatagtcaattatttgaataatgaatctgctagtgacaaggcgaaaatctctcgttacgatttacagaaacttttatgcgacaagaaagacacggatgataaaggcaattataaatgggttgtgaaaaaaccatgggattcatttaaccaagatgtttttacagcgttagagagtgttgtcgttagtttcaaacaaaacttacgggtcatcaataaagctactaatcgctatctacattacaatgaagagggaaagaaagaatatgtgaagcaggtaaaaggtgacaattgggccatacgcaaacctatgcacaaagatactgtttttggagaggtaaacttacgcaaaataaaagaagtatctttaagcgaggctattaaaagccctcaaagtattgtttccaaacgttttaagaagaagctgttgtcgcttttggatgaaggtgccgatataaagaaaatcaaaaaatatttcgaagaaaacaaggacacctggcacgacatcaagctatctaaaataaaggtctattattttacaaaggatacaaatgaacgattctttgctaccagaaaaccattagatacaagctttgataaaaagaaaatagaaaatagcgttacggatagcgggattcaacaaatcttactgcgtcatttagaattgaaggataacaatcccgacattgctttctccccggatggcattgacgagatgaaccgtaatctaattcaattgaacaatggtaaaaagcatcagcctatcatcaaggttcgtgtttacgaaaaagcggataagtttcctgttggagagactggtaacaaatcttctaaatttgtggaagcagcaaaaggcacaaacttattcttcgctatctatgaatccgaaacggtggatgagaaaacaaatgctattacaaagaaaagaacctatgccacgattcccttaaatgtggcaatagaacgtcagaaacaaggtctgcccgctgcaccagaagatgaaaatgggaataagcctatttttgttttatctccaaacgacttggtttatttgcctactaaagatgaattagcgaatggaataatagctcagcctatagataaaaataggatatataaaatggtcagttcttccggacatcaatgcttctttataaagcatacagtagcagcgcctatctttgataagtttgaattctctgtaatgaataaaatggaacgggctttaacgaacgaaatgataaaggaaatttgtgttccgctaaaagtaaaccgattaggttctatattacgaattgggaatttagatgtttagcaaaaaaaaataaataaggagaagtttataagacacaggtgcagaatgtcataagttccagaaacaagtgattcataagaaaatacagaatgttaatactcccggtcagcaattagaactgttttagaatagcaaatcccgtctttaaacgggatttgttactagaaacatgcttcttttttcttttctaattcttcttgtaattcattgaaaatcaactaacagtaaagagtctactgttttcaatgattcaaagatactaatttgaaagcaactcgttcacacgaattttaggaaaaagaaaatctgtacttgtctgctttttatatggagactatggctatgtatttattccccggatggaatcttgaaatagctgtcggcacaatgaaagaaacacgggcctcacaaagattcttcatcttgtaaagcccgtgcagaggagataaattagtcaatcatctctctctttatttcggccggcagagagataaaaccggaaatataccacttttgaatatagagtcttgattctatagatttccgggaggagcaagccttggcatgctgagcaaacgtagaagtttttatcactctattttccggccgaaaaggtgtttgtgtttatttggatgagtaagcgcacaacatccaaaccatcttttcctgctctttcaggtaatcgctcattagagcaacagtagcttcgtcgcctgcttgtgaagcaatagccaacagtttgcgttcttctgcaatgaaataactgtaagtttccagaatattcttcaatgcctcgtcgccacagcttacaccttctacctcctgtacattagaaactttcaggtaatcgctgaatttgttcttaggcacaccacccaacatcaggatgcgttctgccagttcgtctgctttttcggcagcgttatcgtacagttcttcaaacttgctgtgcaatacgaagaaaccatgtcctttgatgttccaatggaaaccgcgtaagtttgcataaaatacttggtagtctgccaataattgttgcaatgaatctactacctttgctgctgctactgaatctaacttgatgtaatctaaagtcttcataattttattgttttaattggttattaattttttcttttctctgatgcaaagatatgtcagaaagtaatacgtgtcaaactgataatttctatctttgtatagacaaaatctatcaagctaagaaacgatgaatctgcaacaattggaatatgtgcttgccgtggacgaactacgccattttgcgaaggcggccgagtattgtaatgtaacccagcccaccctgagtgccatgatacagaagctggaagaagaactgaatgtgaaaatcttcgaccgcacattacagcccgtgcaacctaccccggtagggaagaaaatcatagagcaagcccggagtactttgcaacaagcctcgcttattaaagaattggttagggaagaagagcattccgtgagtggcaccttccgtatcgccgtgttgcctaccatagccccttacttgcttccccgtttctttccggaactgatggaagcctatccgcagttggatatccggatgatggaaatgaaaacaaaaaactgtctggtcgcattgcaggcgggaggtttggaggctgcaatcattgccggagaggcagaaggaaaggaatttcactctatacctctttattatgaatcgttctatggctatgtctcgccaaaggagccgatatataagaaggaactaatccgttcttccgaaattagtggcgagaaactttggttgttggatgaaggacactgttttcgcgaccagttgatgcgcttttgtcaattggagtcggcccgttcctgtcagatagcctataagttaggtagtatggaaaccttcatgcggatggtagagagcggcaaagggatgacatttattcccggtttggctcttctgcaactcagtgaggaacaaaagaagttagtacgtccttttgcgataccccgtcctacgcgtcaaatccatctcatcacccgcaccgactttatacgccattccatcctttccattttaatagagaagatacgtgcagccgtacctccggaaatgttgactttgcaaaacggacaaaaagtggtgtagttattttttatggttatctttgaaccattggaaacaactgtggaaaatccgaagcgatggcctgctagttgggtttagctctcaaattagtatctttaattcacaggaaacaacagaataaaatcagagcatgaatgtagtaatgttgtgtttagcttttccggtagtctcattgagagtacgagtgtaacaatgctttccaaaaaagattctctgccgaaaatgcgttcattgtctcggtagggaacaagtgcaacagtgctcccctcgaaaagtagtcctcaaagaatactttttataaacaaaactatccgctattcaatttcttctttgtacatttacaagcactatgaacaacatagcggaatgtataaccaacacttctgctaacaaaacaagctattacaatgagattcacgagaaacagttgggttatcagcttacttgcaagcgttttatggggagcttgcagcctcgacgacacgacagaaggcaatggtaaagaacttgtatctttagaaaaaacggaactgacagtgcccatagagggaggaacttacaccattcccatacataaggaactgcctgtggaactttccttaaaagagcctccaaccagaccggatggcagtgtcccggctatcgattctagagaatactactactctgaccctattcaatacactccggtacttgataagcaggcacttcatttgacggtacaaccgacttccgccagagtgatgactcctgccacaattcgtctttatgacatgcaaggcaactgcagagctaccttgcttcttcgacaaaccggaaaggcaaacggtcccattctaaaagaaaatggggttaagagtgtaagttccgtcatggcaaatgttgtcaaagcaatggtctctataaataacctggatgcagaatatactctgcaagaccgaacacatccattcgaccctctttctgaaattagtgatggtcaattactcgattgctggaaaaagttctttaaaacgataaatacaattaactttattcggaagtttgatgaagactatcattacaatatactgctggctcccttatatacgttaggttcactatgttattctcaagcaattgctttttggggagatatgccttatctcagtgtacatccgtctgaggtgggttcaaacgagatagaacttactccggtcgattccattttcaagtcactcaccagccgtttggaaatagctattgaaactttagatgagaaaggaggcggttacacagaagataaagaagaattcatcttcttttcgaaagacattccccgtttagtgcttgctcagatttacatgtaccaaaacaattacaaggaagcgtggactttactccgaaagatagaatccggaaagcattatcaattagagaacacgctggaatatacggaagagaacaaagaaataatgttaggcataaagagcaatgttatcgtacagggcaaatatgatattgttccggtgctgacttattcggatgtgattctatcgttagccgaatgtgcttatcacctaaatgagatggatgcggcagaaggatatttaaagcagattgcggaaaagaaaaacctctcttattcttcttccgatttgctgatagccattaaagaggtgcgtaaccaggcactatgcaaacaaggtgggtactttgctttcttaaaacgcaacggattagcacagtctgaattagggttgaaagattctcaactattattgccctatccgcccggattttcttttgtacagagtgttgaataagaaagaatttacagataaaacagagtgaattatttgcaaagaagcctgtccgtccggacgggcttctttcttattcgaatcagaagccctaatacatttcataagatgaatgtagttagctgaattacttcttctttcacttacttgataagtaagcttgactatatgttggtggaattaagttagaacatgcttcacacagtatgttacaaacagctgtctaagtgcaagttattcgttctatagggcataggttagtccaatcatattgcgtaggcgtatggaaggtcgttagctaggcctgcggtatgggtacttcgtaggcctagccaacaacattgcgtaggttagtccaataaaacgccataggttatccacttttacagtcgataacagcctcattccatcgaaccatacacgtttcaactaaatcgaagaaaaagcaatgagttctgtactattacaagttcatgccaagctatgtgtcacacttatgccacgctgttggcatggttgtgacagcttagtgtggcacacctgtgccaacagcgtggcatcacccggagaatagagcacgctggtaacgttatcgcgcactcacaataatgcctccgcctaatacaatgtcttctttataaaacgcggcggcttgtccgggagcaacagaagtaaggggttcgtgcagttgcacatgcaacagattgtcgggagtgagtgtaaccgtacaatgattggcttgcttacggtagcgtatcttcacaatgatatcgttttgcccaaacagcagggcgggattggttatattccagtctttcagcaccatctcgttcttttccagtgccgacaaaggggctaccactaccttattctcttccggaataatctctttcacaaacacggcccggttcagatgttgcagccccaagcctctacgctgaccgatagtgtagaacgggaagccttcgtgacggccgacaacagtccccgtttcatcgtaaaagtatccgggagttataaccggatgctgctttcctcctttttcttcctgtgatagtcccaagtcctcagacaaagacgaaaccggagtttgcgtggtgaatgaaaaaggggacaacatcgatggaagagattgccgggtcgacaaaggaacttgcaaggctaatgaagaagatattggctccgaagaggagacttgcgtcgcctgattgtcaagcgtatcatccagtatagaatctgttggcggaagcatagaggcaacttccgaagaaggccttaaagaagaagtttcggcaaccacttttctcaagaacccgcggtaatccatcggacagaagcaaacacctaagctgtccttctttccggctactttatggaatccccgttctgccgccaattgccggacttccactttcgttatatctcccatagggagcaacatccgccggagaatttcctgaggcagtccccacagaaagaaagactggtccttatccctgtctcttccacaagtaatgtgataatggtcgccaatcagacgtttgtttacataatgtccggtagccagatgataaatagcccgctcatccgccacctgtttaagtaaaggccatttcaggtaattgttgcaaagggtgcagggaacaggcgtgcgaccatgcaggtattccgaaacaaagtaatcgataatagtagattgaaataaacggcgtgcatcatagataagatgttctattcccaaccggtcggccaaagcacgggcgtcttccaaatattccgtagaaccgttcagctcgtagaaacgaaaagtaatgccggtcacttcgtaaccggcttcttgaagcagcagggcagccaccgaactgtccgtccctccgctcatgcctaataacacgcggttgtttttctccatttccgcaatatgaaacaatctcctccctacgccttttgtgcctctttcgccttaaaagccagcgcatacatacgcatctgctttaccatagagagcaatccgttactgcgggtaggcgacagatgttctttcagacctatcttctcaatgaagtaaaggtcggcattcagtatttcatcgggagtatggtcggaaaccacctttatcaataaagcaatgatgccttttacaatcagcgcgtcgctctcggcctggaagtgcaccttaccgtccactaaatcggcctgtaaccacacacggctttgacatccctctatcaagttttgctccgtcttcgatttctcatccaaaggctcctgctcattgcctaaatcaataagcaattgatatctatccatccagtcatcgaagtcgctgaactcttcaatcacttcatcctgtaattcgttaattgttgccatatctatttctcattatatataacttccatcacggtttgtcccaccgcttgaagcgtatttttatcgattacatccatattatcgtttaccgtatgccagaaagagccgaaactggagagttcgcagccttcgtcacaaggaatgatgtctacacacggaatctttgccacttggttcacaggcacatggtcgtccgttacatagccgcccgaacgtttggggaaataggttccgaaacctatctcatccgccttcttccatatcttctttactaccgaagaggcataatccctcgaataaccttcctgcaaaaacgtagcgcccttgccacctaccatatccagcaagatgccaaaacgggcattgtaatggggaacgtgttgcacgcgcgaccaatactgagagcctaagcaccaggagtcttcatcatgttttcctgtaaattgcggcatcccgtaatcttccgcatcaaaaagaacaatatcgatgcctatctccggcgccttccgctgtatctggcgggcaatctccaacaatacacctaccccgctggctccatcgttcgctcccaagataggagtatgatgattcttttcatccgggtcgttgtccgcccacggacggctgtcccaatgagagcaaagcatcacccgcttccgtgcatccggattgaatgcgccgattatattacgggctttataagtcgttccatcataaatggttgcatcgaattcctgctgatagactttggctccgaacgaagccaacttggcacttaaaaagtcgccgcattcacgatgcgctttactgccaagtacccggggaccaaaatcaacctgttgctttacatacagataggcactatccgcattcatatccggagctttcactacaattactttttcttcggccgttttatctttcttactgcttccgcacgaaacggaaagcaatgccgtagcggccacacacaaactgatataatatcttattttcatcttcatcctccttattattaaatcgctccctttattttcaacggaacagattctttgtatttccattctacccaacgcatcttgtttcctgtttttcccttgaaacaaaacattccgtcttttccattcatctcctgaaacaaaacgttctcaaataaacacggagctagactcttctcaacactactcttccaacgaaaagtatttcccgaaacgaattaccctgcactcacctctccccgcttctgcacttcgctcattacacggaggaagtttccgccccaaatcttccggatatcagattccgaatatctttccaacaacaaacggcgggtaaaattaatcagttcggaagccgatgcacaaccgcaaatgccgccgtccccatcgaaatccgtaccaatgcccacatggtctatccccatgacacttaccatgtggttcaaatgattgatagcatccagaatcgttgccggagcttcttttctcagaaagccgctatacaggcacacttgcatcactccgccacggtgagccagcgctttcatctgttcatccgtcaggttgcgcggatggtcgcaaagtgatttgcaagaggagtgggaacaaacaatcggcgtctcactcagttccagcgcatcatagaaactcttttccgaagcatgtgataagtccaccatcatacccgtacggttcatttctttaatcacctcgcgtcccaaagcacttaccccgttatgctcgtcattaccgcgtgccgaatcacaaatatcattgtcgccattgtggcaaagcgtcatatacaccacacccctccggcgaaaccgttctacattccgtaagtcctttcctatggcataaccgttttctatgcccaacatgatagcttttttcccttcctgtttcagacgaagcaaatcgtccggcgtataagcaatatccacatgcgaacagttggcatgcaccattgcttctatttcattcaagatacggtcggccttggccgtagccgccaacaacgcgtcgtccgtccgttccagctgtttcaggtaagccaccataatggtagcgtccagccgtccttctttcatcttatgaaggtctaccagaatcctcgggtcgcgtgtatgaaattgtatttgttggtcgaaaaacatcggggtatcacaatgagaatccaaggtcaagatacgttcgtgcaaagctttagcctccgcaaacgaagttgcctcacgcacaagccatgcaaacaaaggcatcatactttcgtctccccgaagaatcatacattcgggatgccactgtaccccaatcatcgatttatattccgtggactccacagcctccacaatgccatcggttgcccgtgcgcagaccctgaatccgggtaccacttccttcactgcctgatgatgaaaggagttcaccggcagtttgtcggtttggaatatcttatatagagtagaatccacatcaatagacacggtatgcgaaggaaagcttctgtctaaagcctggtcgtgctttatcaatttgttttccgtttgggaatagatatcctgataaagttttccaccaagggccgccatcatgatttgaataccgcggcaaatgcccaataccggtatttgtctgtccgccgccagacgggtgagcagcaattcctgcctatcgcgacggtaattgatggagtgaagttcatctaccggttcttcccctaaaaacaatggattaatatctccccctccggttaagaggatgccgtctacatgctccaacgtattgagtaaggctccttcctcttcgtatggaggaatgataaacggaacaccaccggctttcagaatagaagtacaatagccgtccgctaaacaacaattcccgtcactgaagtttgctgtaactccaatgacgggctgttttctatatccgggatacgaagcattcagttcctcatatcctttctgtatatcaaaataaggattctccaacataaacacgcctcatcaaaacttatatgtgcgtttagggttcttagggaaccagcctttacgtacccgctcttcctgttcaaagagctctttgattgtccagaacgaagaaaaagcaaatactcccaataaagacgaccatagcacctggcttatcaatagagaacagcccgtagctacaatgcccaacaacaagaatacccaccaatactttgttccgaagtaatattcgcacttgaccactaccggatgaaacaatccgataattagaaaggtacaaatgcctataatcaatccggagaaatagagtccgttgaaaaagtccatccgttctccttcttatttattgctgataggaatctctttctttatgctttgttccagtgaaatcaacgtttcggttgctgttacaccgggaatctcctgcatcttgctattcaacagttccatcaaatgttcgttatcccgtgcatacagcttggtcaacattgtatacgggcctgttgtaaaatgacattcaacaatttcaggaattttcatcagctctttcactgcatccttatacatagagcctttttcaagcttaatacctacgtatgtgcaagtgctataacccaaactcttcggattaacatgataacctgaacctacaattacgcccaagtctataagtcgttgaac

SEQ ID NO: 1386 - DNA, 15394 bp, synthetic construct
  misc_feature 1..15394: note = Synthetic
  source 1..15394: mol_type = other DNA
acaactcgttacgctgattttggcggagagagagggattcgaacccccggtaccttgcagtacgccggttttcaagaccggtgcattcgaccactctgccatctctccatgcaaactatggtcgtcttttcgtgtttgcgagtgcaaaggtaagtattatttcataatttgccaaacatttgacaggctatttttgaacgatgattgcgaaaaccagcgaaaaccaagcgaaactaataaggaactagcgaaatattagaatttatatatcggtataatgacagtggaagctattaaagaaaaccccaccgttaaaggacgatgggggaggacctaaagttttcacaacggaataatccttattgtgatttgctagaattttactgcaaaaatacagcattccttttaagtaccaaaggatatagaattttttttatgccatgtaggaacaaaatataaacaaagcatcttgtgttactcagagtgtataaataaatgctatctctgtgtacgtcaagtctgaatgcgattctcagaagtctaattttgaggggtgagcattaactatgaactcaaatatgcaactattgtgatgaaagggcatgttaataggacaagaaatgtcgcggagttgactttatattctcgcttttatagcccgtcttaagtaaatggtattagtttttatctcgattggcttataactcgaaatttatatgtagatttgtcaagataatgtgttgttcaatgttgataaactataacgggagatgtgacaatctgtttctaacttgtataaaataatcaactttcataatactttgaaaccatgagtacaaagcatatacttggacttgatcttggcaccaatagtatagggtgggccgtagtcaaaagcaatgatactgaaacccaacagtgcgttctttcaggtatagtagatgccgggagccgtataattccgatggatgcagccatgcagagtgattttgcaaaggggaataccatatcgcaaacaaaggatcgaacacaatatagaggtacaagacgtttgcgtgagcgttatttgttgcgtcgtgaacgtctacatcgtgttttactgcagatgggtttcctgcctctgcattatgccaattcgttgacacgttacggcaagtttaaggatggggctgaatgtaagttgccttggaaaaaaatagaaggtagcgaaatacaaaggttcctcttcaaaagatcatatgatgagatgttgcaaatgttttggaccgctcagcccgaattgatggcgaaggggatgaaagtgccttatgattggacgctgtactatctccgccagaaagcgcttcatgagccaatcacaggatatgaactcgcttggatactacttaactttaatcaaaagcgcggttattatcaaatccgtggtgaggaaaatgatgttgacaatacaaaagacgaaaaataccatgctctgaaggtcgtaagcgttgttgatagtggcgaaaagtttggtataatgtttttttagagaatggtatggtgtatcatcgtctggcttccgaggctcccgactgggtgggcaaggtaaaggactttattgtcaccaccaatctaaatgaagatggtacgcctaaaactgataaagatggtcatataaaacgtttaataagtatgcccaaggagaccgactggggattaatcaagataaagaccgaaaacgacatacgtacatcaggactctcggttggcgagtatatattcaatgctttacttcataatccaaaacaaaagatcaagggacagttggtgcgtaccatagaacgcgatttttataaagaagaattgcgtcagatattaaataaacaaaaagagtttattcctcaactgtgcgatgccaatttgtatgcagattgcattaacgaactttattctcagaacgaggccttcagacactcaattgcaaccaaagactttacatatcttttgcttgacaacataatattctaccaacgtccgctaaagagcaaaaagtcaacgatagcagagtgtccgtacgaatatcacgagtgtttggatacgaatggtgtcagagtaaaaaaatatgtcaagtgcatatcaaagtcccaacctctgtatcaagagtttcgtttgtggcaatttgtaggtaacctctgcatctacaagtccggatatgatcaagagggacgtcttgtcgactcaattgatgtaacctccgatttccttcctgatgaagaaagtcgtgcccaattattcgattggctcaacgaccggccaagtatcaaggcagatgaaatgttcaaaaggtacttcggaataggcaagttaggctccaagactgttggtatgtcgtatagttggaattacgtgcgcgacaaggcttatccttgtaacgaaactagaggcggaatattggtatctctgtccaaggcgggagttgacacctcctttcttaacgataaagtcttagaacatcagttgtggcacattttgtatagtgtcagtgaccgtacagaacttcgtacggctcttggtaggtttgccaataaacatgcgcttggcagtgcttttgttgaggtcatgaccaaatatccgccgttcgaggccgattatggtgcctattcagctaaggccattaaaaggctactgccgcttatgcgtatgggacatcattggtgtgccaataatatagattccggcaccaaggaacgcatacaaaaaattatcgacggtgaggtggacgaaacaatctccaagcgtacccgcgagaaagctttgaccttggatagtattgaccatttccgagccttgccattgtggcttgcttgctatgtcgtgtacaatcgtcacagcgagtcgggcgatattcgcaagtggcattcacccaacgatatagacgactatttagcgcatttcaagcagcattctctgcgtaatcctgtggtcgaacaggtcgtaaccgaaacccttcgcgtggtgcgtgacgtatggcgggcacaaggtcacattgacgagatacatgttgagttaggtcgcgacatgaaagcatcagcagacaaacgtgcccaaatgacggagcgcgctctgcgcaatgagatggccaatttgcgagtcaaagccttgcttgcagagttgaaaaatcccgagtttggcattcaaaatgtgcgtccttactctccaagccagcaagagctgctgcgtatatatgaggataccgccctcaacagtgtaggcgagccagatgattacatcagagagatacttaaaaagttctccgatgctaaaaatgctcctacaacttccgacatcaaacgatatatattgtggctcgaacagcactacatatcaccctacactgggcagcacattccgttgtcgcgactttttaccaccgactacgaaatagaacacgtcataccgcagtcacgctatttcgatgattccatgaccaataaggtgatttgtgaggcagaggttaacaaactcaagtcaaatgcccttggatatgagtttataaagcagcatcatggtcagagagtcgtgctcaatggcgggcgcattgtaagtgtgctcgaacccgatagctattgcgaattagtgcaaaaaatgtatggcaagaacaatcgcgccaagttgcgcaagcttctcctcgatgagctgccagccgaattcatcgaacggcaaatgaacgatagccgctacattagcaaattggttaagaccctgttgtcaaacatcgtgcgtgacgaggatgagcaagaggccacctccaagcatgttatagtatgtacgggagctgtaactgataggttgaagcgcgaatggggtgtaaatgatgtgtggaaccgtttaatcctaccgcgtttccagcgcatgaacagcttgaccaattccagcaaatttaccgccattagtgctacgggccacttaattcccgctatgccgcttgagctgcaaaagggttttaacaaaaagcggatcgatcaccgccaccatgccatggacgccatcattatagcctgtgctacgcgcaatcacgtcaaccttttgagcaacgaggctgctttgcctaaaaaccagagcacccgtcatcagttgtcgcacaagttgcgccgttacgagacgattgtggttaatcgcgatggcaagcttcaacagttgtccgtggcccgagagtttttattgccatgggccacatttccggccgatgttgagcatgtgcttagtcaaattatagtcagttttaagcaaaatctgcgtgtcgtcaataaaacgtccaatcatgctctacgcatcgtcaacggtcgaaaacaacttgtgccccaaacctcgggtgattgttgggctatacgaaagtctatgcacaaggagaccgtctttggcgaaatcaatctaaaacgtcaaaaagcatttgcgctcaaagaagccctgctgcgtcctcagcgcatagtcaatcgcgacctgcgtgccaaaatcatcgagttgctcagcaagcactacactgaaaagcaaataaaggtatattttgcaaacaatgccgatgcttggcaggacgtcaatattaagaaagtcgaaatgtattatttcacaagcgaaaccgcagaccggtattttgccacgcgcaaaagtatcgataccactttcgatcgcaagtgcataaaagagaaagtggccgacacggctatacagaaaattatgttgcgccaccttgagcgttatgcagacaatcccaagctcgctttctcgcccgatggtatcgatgagatgaatcgccacattgtagtgcttaacaatggcaagcatcaccagcccatctataaggtgcgtgtatacgaaaaggccgacaagtttgccgtagggcagacaggcaacaagcgattcaaattcgtagaggcagccaagggtaccaatttgttctttgccatttacgagaacgaggtgattaataagcagacggggcatcttgttcggaaacgcacctatcgtaccattccgctaaatgaggccatcggcaagttaaagcagaggctgccacttgacagccaggccgcattcatactttcacccaacgatcttgtatacgttcccaccgaggaggagcgaattacgggtaaagtaaacaaaccgttggacaaaagtcgggtatataagcttgtgagcataagcggaagtgtggcagatttcgtgccatgttctgcagcttcaatcatattctcagtgtcaaaaatcgaatctgcaaattattcaggtgtacagaacgaatttggtttgggtagcccgaaatcaaaaaatgagcgtgccaccaccaatgagatgattaaagaagtttgtatccccataaaggtagacaggcttggtcacatcgtcgaaaactaaattatagcaaaaatggcttgaaggctttgcaccagcaacagcctccaagttctttgcgtatttgtgccatattcatttcctgactcctaaatatctcaacaggcttatgataaagaaaaccctttacttcagtactcctgcctacctatcgttacgtatggggcaagtggtcatcaaaatgcccgaagtcgaaaagcaaagagatctgtctgagcatataaggcagcaatctgtggtcacacgtcctatcgaagatgtaggtttggtcatactcgaccacaagcaaatcaccctgacccaaggcttgatagaggcattgcttgccaataattgtgccctaatcacctgtaacagccagagtatgcccgttggcctgatgctccctctgagtggcaacaccacgcagagtgagcgctttcagtgtcaaatagccgcatcactcccactgcgcaagcaactgtggcaacaaactatcaaggccaaaatacgcaaccaggccatggtgctctctacttgtgcccaagtcgaggtgggttgcatgcagcattgggccgagcaggttaggagcggagaccccgacaatcttgaggctcgtgctgcagcctattattggcacaaccttttttcgagtattgccggactaacctcattcacgcgccatcgcgaaggcatgcctcccaataatttgctcaactatggttatgccattttgcgcgccgtagtggcgcgagccttagttagtagcggattattgcccacattgggcatacatcatcacaatcgttacaacgcctattgtcttgccgacgacattatggagcctttccgcccctatgttgacgaattagtttattgtattgtacgtgaatctggtacaaacaacctagaattgaccaaagatgttaaagctcggttgctcgctattcccaccctcgatgtagtcatttcgggcaagcgtagtccgcttatggttggagtagtacaaaccaccgcctctttcagcaagtgctatagtggcgaagttaggcgcatagcatatcctgaacgttaacaccagttagtagttatggacaaattaagtgcctatagagttatgtggatattggtattctttgatttacccacagattcaaaacaagacaagcaggcgtatgtcctgtttcgtaagcagctgcaaatggacggtttcaccatgtttcaatactccgtctatatccgtcattgtgctagtatggccaatgccgatgtgcacatcaaacgtgtcaaaagttttatgccagaacatggtagtgtggcggtcatgtgtatcaccgataagcagtttggcgatattcaggtgtttcatggctcgagaattgaaaaggctcgaatgcagccgcagcagttagagttgttttaatttgtagtgcttggcgtgcgtgtttcgtattggtccgtcgtgacaaccatgtgtggaagcttcgcacattttctccgtgtttagatgtcggaactacaaactcaatatttcgcttattgccaattatatcgtctgaaatccatctgttttatcatttctaattgtaaacgtaaacacctgattatgaggagataactcataatcaggtgtttgtgaccttacaaaggtatggaatttctagcaaatcacaacaagttttaaggtataccctactatattgaggtgtttgtgaccttacaaaggtatggaatttctagcaaatcacaactagcggctatgctggtgatggtaacaccgggtgtttgtgaccttacaaaggtatggaatttctagcaaatcacaactaattctgatgttcctaaaggtacactaatggtgtttgtgaccttacaaaggtatggaatttctagcaaatcacaacaatcggagatgcgaggaatatagacaccaggtgtttgtgaccttacaaaggtatggaatttctagcaaatcacaacagttgcttatcagcatggtgtgaaagagcaggtgtttgtgaccttacaaaggtatggaatttctagcaaatcacaacctttgtttcttaattacaatgcaaagatacggtgtttgtgaccttacaaaggtatggaatttctagcaaatcacaacacggagtagatgttgcttttggtaagtatgggtgtttgtgaccttacaaaggtatgggatttctagcaaatcacaacgcattgcggctaagagcgtccacagcagcaggtgtttgtgaccttacaaaggtatggattttctagcaaatcacaactacgagatgcccaacatctttgttggctgcggtgtttgtgaccttacaatggtatggaacttctagcaaatcacaacaaattgttagaagatggcgaataaacctaggtgtttgtgaccttacaaaagtatgtattttctagcaaatcacaactaatccgtcacacaaggcttaaactgcaaaggtgtttgtgaccttacaaaagtatgtattttctagtaaatcacaaccgtatccgcaccaccttgcgtctcatgtctggtgtttgtgaccttacaaaggtatgtattttctagcaaatcacaactacattcttttcaaatccacagaagtatatggtgtttgtgaccttacaaaggtatggattttctagtaaattacaactgatgttaataccattattatctaaattagactcgtaatcttactaatgtataaattccctatcaagttgcccccaattacgaaatggtcaaattcgtaattgggggcttgcttttgctcacaatgatattgaatgttctggcaagtcacggctgtaagctgtgcgccacaaaacagggggaggaatgcgtgcaagaaaattatctgctgccgctgcgaatggcgtaggtattggctacacaaagcagggctacacccgtatcggccaaaacggcggcccacaaactggcataccccaacgcaccagccaacataaccgctaccttgatgccaagcgccaaggcaatgttgtaacgcaccaggctgcgcgtgcgccgaccaatcataatggcatcggccacacgcgagggattgtcactctgtatcaccacatcggccgtttcaaccgcggcatcgctgccagcacctcccatggcaaatcccacgtcgctcatggccaatactggtgcatcgttaatgccgtcgcccacaaaggccaccttgcccgtgtcagcacactgctgcttgatgcgctgcatctgctccaccttgccctcaggcagcaagtcggcgtgccactcgtcaacgccaagcgtctgcgccaaacgttccacagccgcgctgcggtcgcccgacaatacacaggtgcgcttgatgcccaatgcgtgcagccgttcaatgcccttggcagcctcgggacgcggttggtcgcccaacgcaatcatgcccgcatagtgtccgtccatgccgcaatacaccatggtgtcgccagtggtcgtcttcgtcttgccagtgtcaatgccgtgcgcctcaagcagtgccgcctttcccaccagcagctcgtggccggccaccatgccccgcagtccgaggcccggttcctcctccaccatgtcggccaccaaagcgttggcagcgttggcctgtgtatcccccttgctgtcggccgcagccacaatggcacgggccaccgggtgcgtacttttgcgttcaacggcagccaccattctcagcaagttgtcagccccaacggtctccccctcggcacacgtcacctggctcaccacaaactgtccggtagtgagcgttcccgtcttgtcaaacaccacatggctcaggcgcgccaccgcatcaaggtagtttccccctttgaacagtatgcccatgcgcgaggccaccccgatgcccctgaagtaggccagcggcacactcaccaccaaggcacacggacacgaaataaccaaaaacaccagggcgcggtacagccacacggcccaccccgtgccccccgccagcagtggcggcacaagcgctatcaaggccgcgagcgcaataaccacaggcgtgtacacacgtgcaaagcgtcggataaacatctcggcgtgcgacttgcgcgaagcagcgtcctccaccatcgtcatgatgcgttgcaaggcactcttggcataagggcgcaacacccttaccctcaccacgcgtccaatggcaatcatgccggccgccacctcgtctcccgcatcaatgctgcgcggttcggcctcgccagtgagtgctgcggtgtcaaagtcggcccgttcagtcagcagtgtgccgtcgagcggcacacgttcgccggccaccacttcaatcacgctgcccacctccacggcttcgggcttcacattggtgcgtcggccgtcatggtcaatcacggtagctgtgtcgggacgcaggttgacgagcgactgaatgtcgcgtctggcgcgtcccacagcacggtcttgaaaatattcgcccaccgagtaaaacagcagcactgccaccgcctcgggatattcgccaatggcaaaagccccgacagtggccagcatcatcagtgtaaactcgttgaatatgtcgcctttggctatctcctcgcccgcctccttcagtatgggcagccccacgggcagatatgccagcacaaacacagcccaaggccatgcaggcagcggattggccacaatgcccacaatgagcagcagggcagccaccgccatgggcagcagtgcgcgccacatgggggcttcgttttcttcgtgatggtggtgacagccacagccgcagctaccgtcgttatcatggcagtggccatgttcgtgatgatgtttgttgcacataatgttgtgtgtatttagttgaaattatgctgcaaaggtacgtcccgcgggctgcaacccggttgcaaaagcggggtgggggagtgtgccatgtgcctgcttcagcgtaagtgttacacgcccatttgcgcgcccaatccctccgtcagagcactttttatgcgctgtcatgcactaacctcggcaataaatagtaactttgcacctctaagcgggcgttcaaaataatatgaagcgcctgcttacacagtaacacctcaatttgttatgactgacaacaaaacaaaccaaaataatccgaatgaggagagcttggtggttgatggccgcaaactctccattgaggaatatcttgaccaggacgaaaagaaagacctcttgcgcctgctcaccgccggttcggtggacgacggcaagtcaaccctcataggccgcttgctcttcgactccaaaaaactctacgaagaccagctctcggctctcgagcgcgactcaaagcgcgtgggcaatgccggtgcgggccaaatagactatgccctgttgtgcgatggtttgaaggccgagcgcgagcaaggcatcaccatcgatgtggcctatcgctacttctcaaccaacaagcgcaagttcatcatagccgacaccccgggacacgagcagtacacccgcaacatgataactggtggttcaacagccaacctggccatcattctggttgatgcacgcactggtgtgattacgcaaacacgccgccacaccttcctgtgctcgttgttgggcatcaaacatttggtgctggctgtcaacaagatggaccttgtcaacttcgacgagcaggtgttccgcaaaattgtggccgacttcgaggcctttatcaagcccttcggcatacccgatgtgcgctgtatccccctttcggctcttgagggcgacaatgtggtaacgcgcagccagcgcaccccgtggtatgatggccccgccctgctcgagttcctcgaaacggtgcacattggcaacgaccacaacctcaaggacttccgctatcctgtgcagtatgtagtgcgtcccgacctggacttccgcggtttctgcggcaaaatagccagcggcgtagtgcgcaagggcgacgaggtaatggctctgccctcgggcaagcgcagccgtgtaaagcgcatcgtcacctacgatggcgacctcgactatgccttcccgccccagtgtgtcaccctgcagcttgaggacgaaatagacatttcgcgtggcgagatgattgtacaccccgacaatgtgcccaacgtaggtcgccatttcgaggccatgctggtgtggatggacgagcagcccatggacgtgcgcaagtcgttctatctcaagcagaccaccaacaccacgcgctgccgcatcgaccacttcgactacaaggtggacgtcaacaccctcgaaaagagtgaggtggaccacctcgaacttaacgagataggccgtgctgtgattgtcagtgccaaagaactcttcttcgacgcctacaaggacaacaagcccactggcgccttcatattgatagatcccattaccaacaatacctcgtgtgtgggcatgatactcggccctgtggccgagaacgacctgcactccgacgatgcccttcccacgctcgacttgcccaaactcggtattgctcccgagcactacgaggccatcgacaaggctgtgaaggaactcagccgtcaaggtattgaggtgaaggttaagaaataatacatgctgatatgctaatgtgccaacattgcagatggccatgtcgtctgcatgtcggcgcattagcatatattgtatttttgggggaggacgagttggcaagttgatgagttaacaaataagtaggttatgtgctacttattatgttaaagtcataaggataaggaacttgtccaacttaccttttttccccctcgttcccctgtcaacttgtttacaaattccgccaccgcgttagtagtgcataacattagcacattagcgagcatggcgagcgggtcatattagcatattagcacattatatataataagtaagtcatgaaagcccttaaagaacgtattctgcgcgacggcaaatgctttgaaggaggcattttgaaagtcgataactttatcaaccatcagatggaccccatcttgatgaaatcaatggctgtagagtttgtacgccgttttgccagcaccgacatcaacaaaattatcaccgtcgaggccagcggtatagcccccgccatcatggtaggctatctgctcgaactgcccgtagtgtttgccaagaaaaagactcccagcaccatggagcatatgcttgccaccaaggtattctcgtttaccaaacagcgctcttacgatgtgtgcgtgagcagcgactacctgtgcaagggcgacaaggtgctcttcatcgacgacttcctggccaatggcaatgccgccaagggcatactcgaattggtagatcaggccggtgccgaactcgtgggcatgggcttcttgatagaaaaagccttccagcacggcggcgacgaactgcgccacatgggcattcatgtagagtcgcttgccattattgaaagtcttgacaactgcgaaattaaaataaaggacgatggctacgacagataacacaacaacccagcagaccgaagtggccaagagcggtttgatatacggactcaacgaccgtccgcccttgcgcgagacactctttgccgccgcccagcacctgttggccatatttgtggccattgtcaccccgccgctcattatagccagcgcgctcaaactcgacaccgacaccaccagtttccttgtgtccatgtcgctcatggtgtcgggtgtggccaccttcattcagtgccgccgcataggccccgtaggttgcggtctgctttgcatacaaggcaccagcttttcattcatcggccccatcatagccgcaggcttggctggcggactacccgccgtgtttggtgccacagtggccggttcggtggtcgagatgtttgtgagccgcatactcaagtatgcccgccgcgtcatcaccccattggtcagcggcatagtggtcacactcataggcatgtcgctcatcaaggtgggcatcagcgcctgtggtggtggcgaggcagccaaggctgccggtacctttggctcagttgaaaatgtaggcatcgcagcccttgtgcttgtgctcattgtctttttcaatcgcagcagcaaccgctacttgcgcatggggtccatcgtcatcggtctcgtcgtgggttatgccgtgtcgtggagtctcggcatggtcgactttggatcggtgcagagctatggcggctttaactaccccaaccccttcaagtatggttttagtttcgacatctcgtccatcataggtttgggcttggtatatctcatcacctccatcgaggcttatggcgacataacagccaattcgctcatatcgggcgagcctgttgagggcgaaaccttcatgcgccgtgcccagggcggcatcttggccgatggcttcaactccatgttagccggcttggccttctgctcattccccaacagtatctttgcccagaacaatggcatgatacagctcacgggtgtggccagtcgctatgtaggctacttcatagccggcatgttagtgctgctgggcgtgttccccgctgtaggcatcgtgttctcgctcatgccttcgcccgtgttgggtggtgccaccttgcttatgtttggcacagttgctgcggccggcatacgtatcatagcctcgcaaacaatcaaccgcaaggctaccttggtcatggccatcagcttctcgctgggtctgagtgttgagcttgtacccgaaattctcagccagttgcccagcacggtgcagagcattttctcatcgggcattaccacgggcggcctggcggctatcatctctaatttggtgatacgaattaaggagtgacgccgcgttcgcagatgtgcagatgcgtgcatacactgcttaaatgtattattttgaaaaatgtctgcactctgcactaattggctctaagtcgtttgtaatcaagcatttaagccgtgcagacacatctgcactttgtctgcactgcaagttgtgtgcaagcgcggttcgccacaagtgcacgggattgtgcagcttgtgtgcaagtatggcagatttgctgtaacgggaggtaggaaaatacgtcgctccgactgttttttcgccctcccgttgctgttttcccgccctcccgttgccctcgcaaacgcaccgctgcttactgtagtgtagatggtagtgtagataaaaacagaggctgtgtacacgctttgctgcgttgattatcaaagcgttacacgcaaaagtgcagagtgcagacaaattgcacaaaaaataattgtagtggccattcatgcagtgtagtacgtgttgtgtgcacacgcgtgttgccgttcaagttccatacgtacatatttatgattaaagccatgcgtaatatattgatgtcccttctgtcggtgctgcttgtttgcacgtcgtgcagcaacgaggccgacgatgcttatgcccatgagcgcgccttcttaaagtttccgtatgccaacgacgtggcgcccctgttcaccgcgttgaacaacagtggccaatggtgctgcatagagttgggcacgagtggtttcgttttcaaaacattcacgcagtcgggttcatacccttacacgtccgaaatcaagaactatggtcagccacagtgcgtggcgggttttgtggtgggcaagtcatcgctgcccgacatgaacatgcagtaccccgtaatagcctacgacctggcttgtcccgtgtgttacagtcaacaccttatcacgcgcaaactcaccctgagtgcgcccgaacagctcacctgtacaaagtgcaagcacaccttcgacctctcaaacagcggtttgagcagcgacggcaaccgtttgttgcgttaccgcacggcgctttacagtccgtcgggcagcggcatgctggtggtgatgaattagtttgctcgctgcggccgtgaatgtgctgatatgcacaacaaataggcttattacaagcataccatccagactatgcacaagaaatcgtgttttcttgtgcatagtc

SEQ ID NO: 1387 - DNA, 15357 bp, synthetic construct
  source 1..15357: mol_type = other DNA
  misc_feature 1..15357: note = Synthetic
acctcttaccattccgaacagagcagttaaaccttttagcgcagatggtactacgaaagtgggagagtatgtcgccgccttcttataaaaagagcaatctatttatttagattgctctttttttattgtaaattttaatagataagcaagatatgagagtagtaattcaaaaagtaacacaggcttcagtaagtatagaaaatcaaatagtggcctctatagataaaggcttacttgtgttagtaggtatagaagatggcgatacgaatgaagatatagcgtggctatcgtctaaaatagtcaatttgcgtgtttttgacgatgataatggggtgatgaacctctctgtaaaagaagtggagggagaggtgcttattgtgtcgcaatttaccttgcacgcttctactaaaaaaggcaatcgtcctagctatataaaggctgctcgtccagaggtagcaatacctatttatgaagcttttataaagcaagtagaaagtctgttaggcaaaagagtacctacagggcaatttggagcaatgatgcaggtcagtctatgcaatgatggaccggttaccattcttatagacacaaagaataaggaataaaaaagaaccctatcgttgggatagggctcctttaagtgttttcacaacggaataatccttattgtgaattgctttcaaattctgcgacaaaggtaagtataatattttttataagcaaatttttcttaacatttttttgtttttatttcttttttattatttttgtctcaccaaaatataaaaagaatgaaacgtatattaggattagatttgggctcaaactctattggttgggctttcgtacaaaaagattttgaaaacaaacaaggaaaaattattgctgctggtagtaggattatccctatcgatcagaaaatgttaagtaactttgaggaagggactacagtttctcaaactgccgaaagaactacttatcgcagtatgcgtcgcctacgagaacggcatttacttcgccgtgagcgacttcatagagtacttcacatattaggctttttgcctcctcactacgattcacaaatagatttcagcaaaagatatggtaagtttatagatgatgctgaacccaaaatagcttataacaaagggaattttatttttatggatagtttcaatgagatgattgaggatttcaaaaaacaccaacctcagttattctataagaaatctaatggcgaagagagtaaaatcccttatgattggacaatttattaccttcgcaaaaaagcactctcgcaaaaaattacccaacaagaattagcttggcttatacttcatttcaatcagaaaagagggtattaccagttacgaggggaagaagaaacagaaggaaatgatatggaaattatttcttctaaggtattatctgtgataaaaaaaaataaagataaaaaatatgataagtattggtatgatataactttagagaatggtttagtgtataaagcagctttttacaatgatttagtatatagttggattggtcaagaaagagaatttgtagtaaaacgaactcttttaaaaaatggagatgaaaaaatagagctttcatatttacctacttttgatgaaattgctaaaatggacaaaaagcaacaagacaaattttatcaaaaaataaaagttaagacagaaagtagtattggaaataaaactgtaggtacttatatttacgaccacttgttgcaaaaccctaatcagaaaattaaaggaaaattagttcgtactattgaaagaaagtactataaagatgaattaaaagctattttagccaaacaaatagcgcttcaaccagaattcttcaccgaaaacctattggcggactgtataagagaattataccgcaaaaaccagacgcaacagcaaaatttattatcaaaagattttcttcatctgtttgtagaagatattattttctaccaacgtccattgcgtagcaaaaaatctactattgccaattgtcccttagaaaaacgttcgtatatagataaggaaactaatgaacgcaaagatgttcctataaaagtatgtgccaaatctaatccttactaccaagagtttagagtgctacaatggctacaaaacttgagaatttacgaaatagaaaccgaccgtgaggtaacagctgagtttatcgaaacagcccaagactatgaggctctcttcaacttcttgatgtctcaaaaagaaatagataatgaagggttactgaaatactttttacttgcaaaaaatcctcaaattaaagacaaagtagctaaaagcgagcttaaaaaatggcttactacttatcgctggaactatgtgtatgatgccgcggataactcttccaaaaaataccctatgaatgaaacaggctatgaccttcagcggtatttgcagaaagtagaaagactccccgccaattttctaacttttgatacagcatatcaattgtggcatttgttatattcggtgaaagacaaagttgaatttgaaaaagcattaaagaaatttgctcaaaaatatcaattagacgaagcatcgtttgtagatagtttcaagaacttcaaaccctatcctaatgagtatggtagtttctccgaaaaagctattaaaaaaatgcttcctctgatgcgttttagcaactattggaatttcaagaatattgatgtacatactcaaaaacgtatagacgaccttattaatggagtggcaaatgaggatatccgtaccatcattagagaaaaagcagagaaatatcagctcaatagtgagacctgttttcaaggcttacctctttggttggctcagtatatagtctataatcgtcacgccgaagctactaatatagaaaaatggacttcagtgagtgatttagaagcatatttagaagatttcaagcaacattcactaagaaatcctatagtggagcaagtagttaccgaaactttacgcgtagtaagagatatttggcaacaatacggcggcggacaagctaatttctttgatgaaatacacatagagctcggcagagaacttaaaaatacttctaaggaaagagaaagactttctaaacaaaatcaggaaaatgaaaataccaacctacgcattaaaaaattactcgctgaattaaaagaagatgcaaacatacagaatgtgcgtccgtattcgcttgtacaacaagaactgcttaaaatctatgaagaaggtgtcttcagtagtacagatgaaatagaggaagatattcagaaaattcgcaaaaaagctgaacctaccacccctgagatacaacgctataagctttggttagaacaaaagtataaatcgccctatacaggagaggtgatttcacttacaaaactattcacagaggagtatgaaatagaacatatcattccacaaagccgttattacgacgatagtttatctaataaagtaatatgcgaatcagctgtaaataagctaaaaacaaatcaattaggattggaatttatccagaatcaccatggcgagaaagtgcgtatagcgggtaataaagaagttactatcttcacagaagagcagtacaaagagtttgtgaagaaatactatgccaacaatttacctaaacagcaaaagctccttttgaatgacatacctgaaaaaatggtggctcgtcaaatgaatgacactcgctacatcagtaagtatgtttcagagatactttctaagatagtgcgttcagatgaaaaagatgagggcgtaaactctaaaaatataataccttgtacaggtaaaattactactgccctcaaacaagattggggacttaatgatgtctggaacgagcttattcttcctcgttttgagcgaatgaaccaacttacccaaacacagctatttacttcatataacgacagacttcaaaaaaatctccctactgttccaatagaatacagtcaaggtttccaaaagaaacgcatagaccaccgtcatcacgctatggacgccttagtgattgcttgtgctacgagagagcacatcaattatatgaataaccaacacgcattggataagagtaaggataaaaaagaaaaacaacaatctcgcatagaccttcgtactatcctctgtgagaaaaagaataataactggcagttcaagaaaccttggaggactttcactcaagaagccaaagaagccctcgaacatatagtagtaagttttaaacaaaacctaagagtgattaataaggctaccaactattatgaaaaatgggaagagaagaatggtgtacttgtaaaaaagaaagtaaaacaagaggggactaattgggctatacgcaaaaaacttcatgaagattttccttatggaaaagtaaaatatcaagtgaatttcttaaaaatatccgagaatatttctaaaatagatcttatagtagatgaatttatcaaaaggcagttggaaaagatctatgttgagaatcatcgtaaagttaatctaacgaagaaatatttaaaagaaaatcctataagagaccaaaaaggggaagaagtcattagtacagatttcagagaagaaaatattaaatacagaaagagaaaaccaatatcggtactttcagatagaaatagaaaaacaggaataacttctattgaaaaaatgcttaaaacgattgctaaagtagctgataatgttctaaaaagagaattatttttgtatttagaagaatgtaataatgatattgatgtagctttttctcctgaaggaattgagcaattcaactctaaaaggaagatacctgtgtatagattacctttttttgaagaaggagaaaaaaagaatgaattgggtaataaaggaaagtatgtagaagcagccaaaggaacaaatctcttcttcggaatatatcaaggcaaagaaaaacgcacttatgcaactattcctctcaacgaagtaattgaacgacaaaaacaaggactcccttctgtccccgagcgcaatgaaaaaggagaaccattgttgtttagtctttcgcctaacgatttggtatatgtgcctatggtaggagaagccacagagacaatagatttcagtaatttcagtaaagaacagaaagaaagaatttataaaacagtgagttttacaggaaacgaatgtcattttgtaaaatctactatagcttctctcataaaatcctatgatgctaaatcaaagataggagaattaggaagtttgaataagttagaggttactattagtggagatagtagaataaaagaagtctgtatcaaactgaaagtagaccgcctaggaaacattaccaaagcatagaactctttttaagaataggaaagagaaaacctcctcttctgccttatgagcaaaggcaaaagaggaggtttttcagtactgtttttcgatactaaaacctttaaaagattgaggttgttatcaatcataaaactacaaaatttgaaagcaattcacaacgcagttgcttattgtgtcgctatattcgttgttgttatcaatcacaaaactacaaaatttgaaagcaattcacaacggtaacccccgaaagcctacaagccagccagttgttatcaatcacaaaactacaaaatttgaaagcaattcacaactttggcgcgcaacaccattgccaatacagggttgttatcaattacaaaattacaaaatttgaaagcaattcacaacctccaacgcctttgcatatcgcttgttcctgttgttatcaatcacaaaactacaaaatttgaaatcaattcacaacttcttcaagacggctacgtaacttacaagggttgttatcaatcacaaaattacaaaatttgaaagcaattcacaacaataattttgcactatcaatcagtcgttaggttgttatcaatcacaaaactacaaaatttgaaagcaattcacaactaggcactttgagtttgtcttccaatttttgttgttatcaattacaaaactacaaaatttgaaagcaattcacaacacaagtgctgctcttgattacgcgatgcaagttgttattaatcacaaaactacaaaatttgaaagcaattcacaactaggttgcttttctttcttctgccataatagttgttatcaatcacaaaactacaaaatttaaaagcaattcacaacgcttcaatcataatttgcgcgccattactcgttgttatcaatcacaaaactacagaatttgaaagcaattcacaacctacggctgtctgcacatcggcatctaatcgttgttatcaatcacaaaactacaaaatttgaaagcaattcacaacaggcttctatatcatacactttgttaaactgttgttatcaatcacaaaactacaaaatttgaaagcaattcacaacataaatgtttaatctatcaaatagttcaacaataaagcgcaaagatacaaaaaaatattttataagtaacaaagcataaaaaaggttgcccagacttctgagcaacctctttctatattctattagatgattaacttcctaaggtataccaatgtacgcctatcaaatattgaaactccgctgaaaacgacaaccgtacggcaactaccagcagaaaagtcaataccgataagcctatcttctggtacgtcttgctcacggtggcaatgagcattcctaataaaaaagctgcccctgtgctcacaatataaatcagagctaaactgaaatgtgcatcaggcagactccctgcaataagcattaaccccgtaaacggaagaacaatgcgtaaggcactttgtaggcattcttggggtctctctcttacaaagagataactcataatcactacccctgttaagtacaagggtagggttaccaaatgatctccataggctattgaatttataaacaagtaaagtgcaatagctgagataagttctaaaaagatttgtactgactttttcataattaaatattttatgagttttacgacaaagttataagatattctcttctctgtcaagtaagttgaaaaagtttaagattgttttaacttttaattgtagactttgtattgtttttaacaaattctaaataacaacctttaagaataaaatgctaatgccttcctctctctcctctgatcactgcctcaaactccttaactaatgcaggctgccgcccagcgatattgtgtctctcagcagggtctacgctcaggtcgtagagctgaggagcgccctcaaagccttaaacgatgtgttgttatcaatcgcaaaactataaaaattgaaagcaattcacaactggctcaacctcaataaacttgctttcagggttgttatcaatcattaaactacaaaatttgaaagcaattcacaacgggttggtttaaaaactcgtcagtgcgccggttgttatcaatcacaaaactacaaaatttgaaaacaattcacaactgcttatccaatcagtagtagctactgggggttgttatcaatcataaaactacaaaatttgaaagcaattcacaacgccagtttcactgttttttggtgtaataaagttgttatcaatcataaaactacaaaatttgaaagcaattcacaacatgtgctgttgcttgttcatatattaagatgttgttatcaatcacaaaactacaaaatttgaaagcaattcacaatgggcttgtttgtttagtgccataatgcattgttgttatcaatcacaaaactacaaaatttgaaagcaattcacaactataccaaatataaagagaccaaaagcaacgttgttatcaatcacaaaactacaaaatttgaaagcaattcacaacatgttaggttatgtgtgtgtttagaggcgtgttgttatcaatcacaaaactacaaaattagaaagcaattcacaactggtgttattatctgcggctatcagtaaaggttgttatcaatcacaaaattacaaaatatgaaagcaattcacaacgtatggttttagcattgttgtaggtagatggttgttatcaatcacaaaactacaaaatttgaaagtaattcacaaccgactggctacgcttacaccacaccgccgggttgttatcaatcacaaaactacaaaaattgaaagcaattcacaactgagctgtatggcttgctcctgtaggcagtgttgttatcaatcacaaaactacaaaatttgaaaggaattcacaacaagcgaggtatcaaagagcctccaactgatgttgttatcaatcacaaaattacaaaatttgaaagcaattcacaactgccagccttgtagcatatagatagcgttagatgttatcaatcacaaaactacaaaatttgaaagcaattcacaaccacgatgttggtcaaattccaatctcacctgttgttatcaatcgcaaagtcacaaaatttaaaagcaattcacaactattgtgctctggggtgcgataaccgctgggttgttatcaatcacaaaactacaaaatttgaaagcaattcacaacggcacttgggtaggtacatacgatattatcgttgttatcaatcacaaaactacaaaatttgaaagcaattcacaacaacagtttagcgacttgctcaggtcggggtgatgttatcaatcacaaaactacaaaatttgaaagcaattcacaacagtacttagcgatactgccctaaccggttagttgttatcaatcacaaaactacaaaatttgaaagcaattcacaacttttttgcataaaagagttttaatttgttttattatataataattcttatctttgtgctttaatttaaattttaaacttatgggaattattacaacacttattattggtgccatcgcaggatggttaggaggaactatctacaaaggtagtgggttaggtcttatcgggaatatcattattggtattcttgggagtagcgtggggtattggcttctaggaagtgtattacacatctctcttggagaaggattgattggttctatcttaacaggagctattggagctattgttattttatttttaataaatttgatatttaaaaagaagtaataagtaaataacacaaaaataaaaacccccgaaaatatctaatattttcgggggtttttagtatacgttttttcagaattacctttttgcgttagcaatccaggtctttccatctgtagtatacaagatgttcaatgaagatgcgtttattctaattacttttaaaccatcttgcaaatctacatttactaaagtgttatctccttgttttttgaaactaacaccttttaggtcttcaataccatctgaaaaacggaaataataatcattccctgttttcacaactgttactgaaccattttcaacagattttttttcttttccttttaggaaagaaatttcacctttataggttcctacaaaaaggtcattgtctgctgggtcatcattcttgctgcaagatatgcaagaaaaagctactagtgataaacaaaccactgttactaaagcaaagatttttttcatttttggttgaatttaaaaattaatattaaagttagatgcaaaaaatatattattggaatacttaatgatatttttaacattttaaaggttagatttctttgatattatagaaaacacaccttttaacagacatttttatttatctatttttgtttaaatatctttttgctaaaaattgcataccatagcccaaagctatatttatccatcttttgttactaaataaaagagatgcccaagtgttagctaataaattcttaggggtcagactttctgctgaagctgatacttgttgcgatagagacagcctatcaatctctttttctaatcgaagtagtctaatctcattatcaatttcttcaaatgatgaataagtcttattgttcatcttcatcttctgggtcagatttaaaatagatttctgatagtttttgcaatagcgacctctcaattagtttcttgcgaaacaataaaactactaacgataacaatatatagaacgctcctacaatagcaaaccctaaaccattactacctaaagcttcacctatagcataagcagcggcaagtgataggaaaaataatattaataagcaggcaaaagcataaacaaaaaaagttataagcccatacgaagacttagctataaacctgaaaagtatcattttatagtaagcaaattgcgaattaaaggctgtgtttgcttttgtagggacttctacaaacgtttctttaatagaataaatcgccataaaattacttcttaattttagcggcttcttctttcaatgacgctaatttcttttctagaatagcaatcatatcttcagatttattacttgcttttgagaaaagtctatctactttttcttctaatgaacctttcagttccaaagatttctcacgcacgctctctgtaagattatctaattgttctttaaattcatcagacttgtctctaagagagtctttaatttttttacgtgtgtttttaccttcgtctggcgcaaaaagaatgcccaaacctactcctatagcagtacctactgctaagcctaatacgacatttgttgtttttgacatagtgttcaaatttaatgttattaaattagttatataaattaagtatgaggcaaaggtacaaataaactttaaaggattttgttttcaataatactttttaactataggctataaagaaaaattatcattactttttatatatttgtttttaaggcgcttatatgtttcttttaaattcgtttttccgttcttaatctataagttatgcagggtataaaatcattgcgatagcccaaatgattgccagaaatatgatccaaggcaaacaacctgaaaacatatggtataaggcactaaacgtttcaaatataatattatttttcataacaataatcggtattatcacggcgctaagcgctctattttccaatcgtagtcttcggtgagggtgtagcgcagacggtcgtgcaggcggttagggcgtccttgccaaaactctatgctctgaggacgcactaagtagcccccccaatgcgcaggacgcggtacttccttgccttcgtattgggcttctaaggcgtgtagtcgctcttctaagtactcgcgcgtgggtattacctcgctctgtggcgatactatagctcctaatctactccctaaagggcgcgattcaaaataaccatcagaggtattggcaggcactcgctctgctatccctttgatgatgatttgtcgctcaatagaaggccaaaagaatgacaaacacagatgcggattagcttctattgctctgcccttttcgctgtggtagttggtgtagaagataaacccttcgtaggtgtattgtttgagcagtactacgcgcgttttagggaagccatcaagtccaatagtgctgactgacatagcattggcttcgtctatactatccgtttcatcagcttcgtaaaaccacgtctgaaaaagttgcatagggttttcaggagcatctttctctaaaagctctcgtttattataggtttttcgataattacttaagtccatttgttttcttatagcgtttttctttaatatctttagttgttacacatatatcatatcccatctctttcaacccattaataagtttgaagtcgcaagtccaaattttgtgtcctttttctaaatgaagcgctataaaaggaaagtcatcagggtctatagattgcgctatttcttctgctttgtctacatatttctgaggaatatcatctactttgaaaaaagtaatgtttttggtaaattctttcagaagagcattagcttctgctttagttaggttattgtcttccataatttcaggtaaatgctcttttacttcattcaaaagataatcaggagctatgaactggatacttttctttttatcatttaagatagtagcaattaccccttttctgctgtaaaaacagctataaataatgttggtgtcagaaataactatcatatcgcttctttctctctctttttagctaaatcttctctccagcgccttgcaatgttcttgttagactctttagacattgccataatcttattgtggtatttgataggaataccatattcatcttcctctaaatcgtctatcggagttactgtttctttaaaatctttatttttagtaacttttacgaagtcaagttttttggcatattgcacaaaggctaatgcctgaggattattatcagtgatagtaagtgtataaggcatatcttctttttttcgcaaatatactaataatttataaatcggcaattaataaaataaaaataagaggtaataagcactcacttattacctcttattttattacttatcagtcgtttctattaatagaaagcacttatgttttctttgatagtagcgctgttttcaagcgatttgagtatgccttgtccagcacgctctgtgcgtagcttctcaatagtctctgcatacgttttgtaatcattagtagcaggcgctactgatactgatgatacttgtattacatacacagcattctcaccatctataggtttagagatagcaccttgcttaagtccgaaagcagccccgattactttaggctcgcgtccttctcctataaggatagggttgttcatcgttagtccggtagcggtttttacttctgttttgttagccgaagcaattgctgctaaactgttgcctttagctttctcttttagtatagcggcttttttctcgcgtataagtataggttttacaaatggcgctacgtcttgtacgtcgctaagcccttcttctccttgtttcactaattgagctactatatagttacctccgttagtgaatttcttaaggtctcctacttttgtttctttgttgaacaaccattgtactatttggcggttagcgccaagtccgataatttggtcgtcgtttttgtgtaggttatctgcgcgaagcacagtcaagtctgatgatttagcgatgttagaaaaatctttaggattttgactcgctttcatctcaaaattgctcactttagagaaaagttcgttgagggtagcttcagaaggctcaaccttgcgggtgatagtagccaattgtacagtaggcgctttatcagttacttttactacgtggtaaccaaagtcagtttctacaatacctatagtacctacagggttagcgaaaacgaattgctcaaaaggttttaccatagccccgcgtttgaagaatccgaggtcgcctccgcgatagttagcgcctggttcgtcagaattttcgcttgccaatgcggcaaagtcagcacctgctgctttagcctcagccaaaagcgactcagcttttgctttagcttcctctttagtgcgagtagtattaggagtagcggcttggctacctgtgtaagcgataagtatatggcttgcttttacagctccgttagggtctttagctatcatacggcttagttttaggttgccgtcttcttcataaggaccgaatactttgcctacaggtagggcgaaaagagtatcggcataagcagaacgcaaatcttctttgcttacgaaaagggtatcgtaaggagtatcagagtggcggtctacgaactcttttacgtttttagtttgagcgaaaccagcgatagtatcgttggcgtgtgtttggttgttaaacacgatttctggctgaagcaatttgttgatagcttctttttcagcttgtgtatcggcagccgaaggtttttcgtttaccactatatattgtatattgcggtaagcctcttgtttaaattgtttttcgtgttttttgatataatcttttatttcgctatcgctaacatttatgtttttatcgtcaatactgctgtattgtagcgcaacatagctaatgtcagccatatctttttcttggtgataagctatttcagcttcagcattggttactcctaaaccagcgcgtataaggctaaaatacatttgctgtttagccccttctatgatagcgtcttcttgcattttccactgcgcgtaggcttgcggattgttgcttttgagggtattgaggtaagcggtaaatttagaagggtcaaatacaccatattcgtttacgaactgagggttttgagcaagaggtgttttagcgagtatagagatgatttggtctttctccacgctgagtcctaatttctcaatttgctgattgagaagtatttgctgaacgttttgctcccacacatactttgcagcttctatgctacttgcctgaccgttagcctgatgcacggcattttctacctgtagacggaaagcgtcgataggtacatcttcaccgtttaccgtacctatttcggtaggttgatggttactaaagcgccctttgccaataaagtctgagatgataaaagcaaagagagcgagcccgataattgcaatcaagaatacggttttacttctgattttttcaagtactgccattgtttataatcgtttataaaaagtataaatttgtttggtgttattaatcaaacggcaaaagtaatcctttttattgaaatacaaaaataattagcaaaaaaaatgtcgattggttaatttgccgatttgtcaatttgctaattttcccatgagatgattaatggaggagaaaaaaggcaagcgagatggagtgtagtatgttttgctgctttttgggtaatgattagttatttatactttgctcttctttcgataatccttcgctcaagctaaagggtaggtatatctaaagtaaagggaaagtatagaagaaaaaaaatctaattaatggagctctgggagatttgagcgttatgtgttcattggcaaattgccaaatcaataaagtttgctaattatcaaatttttactatctttgcgctttgaaatatctaaaaaatgcctaccactatctataaaacttatgtatgtatccttttctttgcgctacaactctgctttgcccaaaaaggggaggaggcactgtttatcaaagaaggtacgctactcaaatgtgagaacagccgcattcctgctgacggtcgtatagagttaccacgtacagttaaagccattgcccctgaggcatttaaggattgctcccgactcaaatctatcaacataggggggagcgtgactctcataggcgaccgtgctttctacggatgtaatacccttactaaagctgagttcctgcccaatacggttaccgctataggcgaacaagccttt

SEQ ID NO: 1388 - DNA, 15303 bp, synthetic construct
  misc_feature 1..15303: note = Synthetic
  source 1..15303: mol_type = other DNA
atatacgtttttatttttatgatgaaatatttggagatgaacataaaaagcaaaatcttgcttatggcgcaatatgcgccgcgatttggaaacaaatacacgaaaaattaagccaaatatattcaaatatgcaagagaacaacaacccatgtcaattatcaacaaaaccattcgcgataagtatcttatatcgaactcacgttatcataatatcgctttttttatggccgactaattagttcctcataatcagtccctcgtaattccttgtaattagaattagaaacaattagcaattagattgtttcagtatagttttagtagatgaaaaacttgcattttccggtaacacaaacaatacgcattctgtatgccgtttgcgcatagacactttggtttcctataacaaaaaagggcgagacaacgtcccaccctaaatgtttacacaacggaataatccttattgtgtatatcactcaaatgttcggcaaaggtagtactttattttgaataatgcaaaaatattctactttttttgcattattcgttatttttctgtatctttgcgccaaagtgatttctattaaactatgcaaacacgtaaaattctcggattggacttaggaaccaatagtataggttgggctgtcgttaatgataatgaagaaagcaagtctatagcatctgccggtagtaggattattccgatggatgcagcgcagatgggcgattttgaaagcggaaatagtgtttcgcagactgccaatcgtacagcggcacggggtgcacgtcggttatatgagcgcagagcattgcgccgtgaacgtcttaatcgtgttttgtctatcttgggatttcttccgccacactatgcaaaagaactgaatcgttatgggcaactcaataagggagcagagcctaagttggcgtggtcgacagaaaatgggaaatcggtatttttgtttcagccatcattcgtggagatgacgcgtgagtttgctattgcgcaaccacaattggttgcgaatggaaagaagattgcatacgattggacgatttattatcttcgcaaaaaggctcttactcaacctgttacaaaacacgagttggcgtggatactactgcagtttaaccagaaacgtggttacaatcaagcacgcggggaagaagatgaaaccaaagcgaatgagaaaaaagaactgaagactctcaaggtcgtagaggtgcgagacacgggtgaagtttccaaagggcgcatatggtatgaggttgtgcttgagaatggggatatatacaaacgccaaagtgcttatccgcttgattgggtagggaaagtcaaagattttattgttactaccaaactcaatgaggacggctctgaggcaactgacaaggacggaaaggtaaagcgtagtttcagtgcaccccaagaagatgattggggattgcgtaagataaaaacggaacatgacattgctcaaagtggtaaaacggtgggtgagtttatctatgatgcgctcttacacaaccctgaacaaaagatattggggcagttggtgcgtgtagtagataggaaattttataaagaagaattgcgccgtattttagaaatacaaaaacaatttatccccgaattgcaagatgctgacctatatcagcaatgtatcgaatccctctatccgcagaacgaggcttatcgcaatagcattgcgaataaggattttacctatctgttgctacaagacattattttctatcagcgtccgttgaggagcaaaaaatcgcttatcaacgaatgcccttacgagtttcatatatataaggacaagaatggagaatggcgcagacggtatctcaaatgtatatctaagtctcatccgttgtatgaagagttccgcttatggcagtttgtggagaacctgcatatctacaaaactgcagagaatggtgtcagtaaatctgattgcacggcagaatatatcccaaacaaagcggagttggtaaagtggttgctcactcaaaaagaggtaacagaacaatcgcttttgaaatgtattgtggataaagaactaaaaggtctgtatttatcatggaataatcggaagggtaagaaatttagtgccatcaaatctttttcctctcttgaagattcttgttttttgaagttagtagaagatttgcatatttaccaagttgtagataatgttgattgtacggagcaatatattcataataagatggaaataagagaatggttgttgcgtactgatgaaaataagataactcaagatgctttgttgacatatattgtaacatgtaggttatcatggaattatgtaagcgacaaaaagtatccgatggctcctgttacagcaacaatatcttcggtgttggaagaggcaggaggaaaagttagtgctgaagcattagtacacatctggcacatactctattctgtttccgacaaagaacaactctctcaagcactttcgcactatgcagaggcgcatcatttgttatcgctgtttgtggaaaaactgggcaaacaaaagccttttgctgccgaatacggagcatacagcgagaaggccattcgcaaattgcttagtctgatgcgttgtggaaattattggaaagaggaatctattaacgataagaccaaagaacgcatagaacatcttttaacgggagaagtggacgacaatatcagcgaccgggtgcgcgaaaaactgaaagagatgaatcatatctctgattttcaggggctacctctttggcttgcggagtatgttgtctatgatgttcgcaagaatgataccaaatgggaaactcccgaagatattgacaactacctgcaatctttccgactccattctctcaacaatcctattgtggaacaggtggttatggagagcctgcgtactgttcgcgatatatggaaacaagaggggcatatcgatgagattcacatcgagatggggcgtgagttgaagcaaaatgcagagcaacgcaaaaacactctcgcacggcaagcggataacgaaaaagccaatcttcgtgccaaactcctattgcaagagtttatgaatccggaggcgaatatagaaggagtgcgtgcttactctccgagccagttggaactatttcgcatttatgaagacggtgtcctgaacaatcctaaatcggaaaaggatgaggatatccaacgtattatcaaggaattatccgaattgaaacaaccatctgccgcagatgtacggaaatatcgtttgtggttagatcaaaagtatatctctccatatacaggacaacctattcctttggcaaaactgttcacatctgcttatcagattgaacacgtgattccgcaatcgcgtttcttcgatgattcaatgtcaaacaaggtgatttgtgaagcagaagtaaatgctcgcaaggatagactgttagcacatgagtttatttccaaatgtggaggtgagaaaatcacgctatcaggcggtaaagtcgtaactatcttaatgaaagatgcttacgaagaattggtgcgcgatatctacaaaaccaatccgcataaacaggaaaaactgatgttggacgatatacctgagaaattcacatcccgccaaatgaatgatagtcgctatatcagccgtctgatgttgggattattgagcaatatcgtccgtaaaaagaacactaaaggagagtatgaacccgaagtgaccagcaagaatgtgattgtctgcaatggtgccaccactacaaggctgaagaaagattggggcattaacgacgtgtggaaccacatcattttgccgcgttttgagcgactcaaccaactacagaataccactatttttacaaccaagacggtcaacgggcataccattcccgctttgccgttggagttgagcaagaacttcgagaaaaagcgtattgaccatcgccaccatgcaatggatgcaatggttattgcgttcacaacacgcaaccatgtcaatctcttgagcaatgaagcagcattggaagcagataaggacgcgcgttacgatttgcagatgaaattgcgcaaacatgagatttggacaacagcggatggtaaacaacatacaaagttcaccgatttcattgcaccttacgaaggtttccaagaggatgtcagaaccacgctggagaatataattgtcagtttcaagcagaacctgcgcgttattaacaaaagcaacaaccacaacatacgctttgtggatggtaaaaagaatagtgtcaagcagaccaagggcgacaactgggctatccgaaaatccctgcacaaggcaacggttttcggaaaggttaatctccagttcaaaaagaccgccacactcaaatacgcattggagcatttgaatgatattgtggatattgatttgcgtcataagttgcgtgaattgatagcacaagggtatgacgaaaaacagattaaaaagtatttctctacgggaaaagatatttgggcagatatcaacctgcaaaagatagaggtgtactactacaccaatgatacgccttataactactatgcaacacgtactgcactgggagattggttagacgaaaagagcatccgcgaaaaggtaacagacatgggtatccaaaagattctattggcacatctggcacaatacaacggagacgctaaagaggcgttttcggcagacggtatcgaaaagatgaaccagaatatcgtagccctaaatggtggagttcctcacaaacctatctgcaaggtgcgcaaatacgagaaagccgataagtttgcagtcggagaaaccggctccaaagccaagaaatatgtagaagcagacaaaggaacgaatttattctttgctatctatgtaatgaaagacaatgatggaaaagaagtacgctcgtatgcaactattccgttgaaagttattattgattgtcagaaacagggtaagcaggaatggaaactgttgctcgaccaatgggtacatgagaataatatagtacctgccaatgctactttgaaatatatcctctcaccgggcgaccttgtgtatgttcctaaggaggcaaatatggacttagataagactcgtatctataaaatggtatccggttcaagtaccgattggtattttactccttgtaccacagcgagcattattttggacaaaaaggaatatggacttcttaataaattatcacgtgccctcaccggtgaaatgattaaagaaacctgcgttcctattcatattgaccgtttaggcaacataatctcccttgagtcatgattaagcgtattctctgtttcactaaccccgcctatttgagtctgcacctcaaacaactcgttgtggagcagacgcaggcggataaaacagagaccatcaagcataccatttccattgaggacattggcgtagtgataatggagagtccgcaaatcactatcacacaggcacttatagcggctttgcttgataataattgtgctgtcatcacgtgcgattcgcatcatcttcccgccggattgttgctcccgttggacaatcataatctgcaaaatgagcgatttagggagcaaattaatgcttccgaaccgcttcgcaaacagatgtggcaacagaccattgtctccaaaatcaatagtcaagcctacgtcctacgccggcagaatatcgaatgtcgaaatatggagatgtgggcaaaatctgtccgttccggcgattccgacaaccttgaggggagggcggctgcctactattggcgcaatatctttggcgattccgatttcgtgcgcgggcagttcggcgatatgcccaatggactgctcaattatgggtattccatcgtgcgtgcgatgatggcacgtgctttggtggctgcgggattgttgcccacgctgggcatacaccaccatagtcgatacgatgcctattgtctggcagatgatattatggaaccctatcgcgcctttgtagatttacaggtgctggatatgtggaaacgctatggcgatgtggaagaactgtcgcccgcgttgaaaaaagaactgctttcgttagccaccatagatgtacagatagaggcacatcgcagtccgatgatgattgccatgcaaaccactgccaatagtgtacaacgctgtttttcaggtgcttcccgcaaaattgtttatcccgactggtagtgcttttgcagtagggtggggatatggtgcgaaacaagaggaaaaatggtggaaatctctgcacacgggaaatagaatacgtttgttggggaaagatgtctcgatttagcgaatatagaatcatgtgggtacttgtcctttttgacctgccaaccgacaccaagaaggcacgaaaagagtatgctcaatttcgaaaacaactcttgcaagacgggtttacgatgtttcagttctcaatctatttgcgtcattgccccagtgcggaaaatgccgatgtgcatatccaacgtgtgaaacgatttctacccccatcggggaaaataggggtcttgagaatcaccgacaagcaatttggtgatatggagattttcgattgtcggaaagaaaccatactctcccaaccggttcaacaattagaacttttctaataacgtcagttcgatataagatattttcatcgaatagtttttgttgataattgatttttgtttttgttctcttgtatatttgagtttttgtttcctttatatatttgtctatatttggtttaatttttcgtgtttttgtttccaaaacgcagcgcacattgcgcatgaacaagagacaatgttctattttgccatattccacatagccatttttacttctttatgccttacttctccatacctcacttttccatgctttatttgccccaaacaaccaatagcacgataacataataaaatcaggcttaaaatcattgcttaaacactgcctgataccggtatcgaatgaaacagcactatacaaatatattatcaaaatagaaatactatcaaatagaagatgtgtcaataaaacatactacaactaaaaagcatctgaaaaaacaactaaaaaagcacctgacatacataaaaatgcgactcgcctgagccgcatttttattttctaaaacaatgtgtaagttgttgattttctttgcattccaaagaatatgttgttttagattgcaaagttataaaatttgagtgatatacacaacttcttcgtcatttattccaagccacgatttgttgttttagattgcaaagttataaaatttgagtgatatacacaaccacttgcgacggagtcgccgcttgctgcttgttgttttagattgcaaagttataaaatttgagtgatatacacaacaacttgctgtaaatcagcgatgcaaaatgtgttgttttagattgcaaagttataaaatttgagtgatatacacaacattgtccatcctctatactcatagcagcaggttgttttagattgcaaagttataaaatttgagtgatatacacaacgcataattactttgtatttgttaggttgttgttgttttagattgcaaagttataaaatttgagtgatatacacaactggtaaccacgcataacacgttcagcaccagttgttttagattgcaaagttataaaatttgagtgatatacacaactactatacaggtcgttatattgcgctcttgttgttttagattgcaaagttataaaatttgagtgatatacacaacactatgctgtgattggttcacgttgcacacgttgttttagattgcaaagttataaaatttgagtgatatacacaacatgtaacagtaggatctgatataagcaactgttgttttagattgcaaagttataaaatttgagtgatatacacaacaaacaaaaatatacacacgtacataaagtgttgttttagattgcaaagctacaaaatttgagtgatatacacaactgcagtactgcacgacacacaaccaagcgtgttgttttagattgcaaagctacaaaatttgagtgatatacacaacagacggctattgcgagcagcggaacatctgttgttttagattgcaaagttacaaaatttgagtgatatatgtaatgctacgagaatgattattagaaaaatgcagtaaagttatattttgtcggtagaaaaattgcataacacaaaaaatatgagtaattttgcatattgataaataattcttaagacttgtgtacagataccgatatatgtgcttgttcagtgtattatatatatgtatggccctatctgcaaatacccatatagttcatacaacttctattgaaaaaacaaaagaggtgataatatcttgccctttctattccacttcaattctactttctgattctccacaaggtataacatctgtttccgatatggatgcaaatggaattactcgtcgtccacggcgcattgccggtggggacaaggatagttttggagaaggagaggatggggaaaaactgccggaggtaactaatcaagaacagaataagaataccccaataggagatattcctacaggttttatggttctgctgtgtactttatatattggttatctttctgtaaaaaaacggtggcacaaaaaagagactgcctaatcagttaggacagactcttttttatgggtacgcagattagaaattatctacatgcaattcgaaataagattgcggatgagcgcaagtaggacaaacttccggtgcctttgtgccaaccacaatatgaccgcagttgcgacattcccatactttcacttcacttttctcaaaaacggtagcggtttcaatgttcttcaataacgcacgataacgctcctcatgatgtttttcgatagcggccaccagacggaatttgtgtgctaagtcggtaaatccctcttcctcggctgtttttgcaaagccatcatacatatctgtccattcatagttttcactctcggctgcgtcttttaggttttctgccgttgagccgatgccatcgtggagttctttgtaccacaacttagcatgttctttctcgttgtctgccgtcttgagaaataactctgctatttgctcaaaaccatcttttttggcctttgatgcaaaataggtgtatttattacgtgcttgactttcaccagcaaatgctgcttccaaatttttctcggtttgggtaccggtgtacttgtttgccatagttttattatatttgatttgttaaataagccctgcaaaagtactacatattttttgtatttgcaaataggggacgaaaaaaggttgcataggtcgaattgagaatgatggaaagaggaaacctaaaaaacggaatagagaagttctatgcgggttatttgcagggtattgtccttttgtctttgtaaatgtaatgatcgtgtaatgggtcattttttctttgagaatgctaatctgcgtgtaattggacgttaattttttgaacatataatttgccatataattggaccattaatgcaacacgtcaaggaaacaaatacacgaaaaaattaaatcaaatatagacaaatatggaacaaatatatttgaataatttttggttgtatttggagagacaacatcaatcggcgacataactatgcgctataaatattttatagaacagacattaaaataaatttgcatgcctgcaaatttattcgtatctttgcgatgtaaaactcccccggacggagtaaatacttgtctgcgtgtcggtggacaatcaaaactatcggcacaatgcaaagactcacgcggtgggctttctattttactatatagaagtctgcgctttttgtatgcccatatatgaatacagcattgtggacaaatgctgctcataccggaataaccacgcgagtgcccatagcaatgtaatagttgtacccgacacgtatcagggaaggagtatgaaacgaaaattattctctatgtgtttactgctatcggtagccgcagggctattggcgtacgattttaaggtaggggatttgtgctacaacatcaccagtgatacccatgctccatatagtgtagaagttacgtatgaaaatgggaacgcatgggaggttgatgcttattctaatcagccaagcagtgtgctcattccggaatctgttacctataatgagaataattataatgtaacgggtattggagggctcgctttctataattgcacaaaacttacctctctcactatcccgaatagtgtaacgagtattggagagtatgcttttgcttattgcacggggcttacttctatcactatcccaagtagtgtaacgtggattggagggtatgctttcaaaaggacaccgtggcttgagaatcaaagtggtctcatttatattggaagcgttttatatgcatacagaggtgaaatgcccgaaaacacaagtattgtggtaaaagatggtgtaacgtctattggacagtatgctttcgacactgccacgaggctctcctccattactatcccaaatagtgtaacaaggattggggagggggccttcgccggttgcagggggcttacttctgttaccattggcaatagtgtaacaagtattggagaaagggctttctatggttgcgcggggcttacttctattactatccccaatagtgtaacaagtattgaagagggtactttctatgattgctcggggcttacttctgttactatcccaaatagtgtaacgaagattggatagtatgctttctccggttgcacgaggcttacttctgttaccattggcaatagtgtaacaagtattggagagtctgttttctatgattgcacggggcttacttctatcattgttgaaagtagtaatacagtgtatgatagtcgaaataattgtaatgccattatagaaacggcaaccaatactttaatacaaggttgtaaaacaactatcatcccgaatagtgtaacgagtattagaggttgggctttcgaaggttgtacgggtcttatctctgttaccattggcaatagtgtaacgcgtattggagatggggctttctataattgtacggggcttacttctatcactatcccgaatactgtaacgagtattggaactaatgctttttatggttgcacaaatcttacctctattactattccgaatagtgtaacaagtatcgagcctgatgctttttatggttgtacaggtctcacttctatcactattccaaacagtataacgagtattgaatcgggaattttcatgtactgcacagggcttacttccgttaccattggcaatagtgtaacaagtattggagaatgtgctttctttggttgcaagggtcttacatctatcactattcccgacagcgtaatgcgcattggctataatgctttttcccattgcacgggactaacctctataacatcacttgccactacaccgccgactataaataccgacgcattttcggacgtttctgttgatattcctgtgcatatcccttgtgggacaaaggaagcctattcggcggcaaagggatggaatttgtttaccaactacaaggagcaactaaccgccatcgtaaccatcacaagtcaagatgagagcaaaggcacgattacgataaccaaacaggcgacctcctgcgaggataacgaatgtacatttgtagcaacgcccaaagcggattattgttttgtacaatggagcgatgggaatactgataacccgcgtaccatcatggttacggaggatattactctgaccgccaagtttgaggcgacatccgcagatgcaattgaagaagtagcagataatcaacctgctacaacgcagaagattgtacataacgggcaagtttacattctccgcgatggcaagacttacactgttgtcggacaacgtgctattgacaagtaacaatgtatgcaagagatatataggctgctcggaatgggcagcctatatgttgtttgtgggttatccactcggtatggactcggtatgaggtcggatttctgttgttagagggaagaattaagaaaaagcgcgctcgctgacgctcacaaagcagtgctttgcgctttttctttttttggggggtgtaacctatgcggcttatttgttggtgatgttaacgtccatgtgcgggaatgcaaagttgaaaccgcgttgcgggagttcggtataaaatcggagattcaggtcgtagaatacatcccagtagtcctctttgtgcacccaggcacggacaacaaacgagatgtcgttctcgttgagcgaagcgagtgccacaaacgggtccggaatcggcagtccgtcggtattcaccgccgagcgtgagtttgtcttcgggcgttggtccgccgaggtaaggatacgcttgtcggagcgcacaatctcctgaatagcctccatacacttctctgcgtcggacccgtattccacacttaccgtccaatttacacgtcgcaagggttgcgcggacacgttctcgatattgctactaaacaatgcaccgttgggcagcacgacgacacgattgtcgggcgtcagcaccttggtagagacgatagtaacctccatcaccgtccccgaaacgccggaggcagtaacgaaatcgcccgccttgaatggtctgaatatcagcaacataataccgccggcgaagttctgcaccgtccctgacaatgccatacctattgccatacctccggcagtgagcagggcggcaaacgaggtggtatctacgccgagcgtgccgatggtggcaagcacaagaagcaccgtgagcgtgatactgacaagggacgagataaacgtcgccaaggtccgctccgtgtgtctgcgctcaaagacgcgcaccaacagtctcttcacgcgcttgatgagccatgcgcctatcaggtagatgacaaacgcgacaagcactttcaaaccaaaatgaatcgcactatccaagaccccatgccagaacgactcggggtcggtggtcgcctgcttgatgatattctccgttaccgcacggatagagtcggaaggcgggatagtgggtgtgggtacctctatatcaagaaaaagcatggttctgattaggaattatgaattaagaattatgaattaagagattgcattcatcatcatctcaggcggtcggcagcacggacgagagcctcgtctttgagtatgcggcgggtagccattagcgacagaaccacgttgataagcggtatgcctgcccatacattcagataccagtcggcgtcctccaacagcataccgtggataggttcgttgcctttcacgatataggcgatatagagtgcgagcagggcatagtatccaaggcacaacaccacgttcaccacattgattcgcgcctgcaacagtcggcgtttgaacaggaaaatgttcaccaatgcgatgaccggcacggctatcgtaagcaccgccaacggccatttttggaaggtggtcagtgcgatatattccgtacccgtcgggggcaggaactgtaccggcgcaaagaaacaaagcagtgtgccaagcactactaccaaaaacaaatagacagtttgaatacgttgtatcataattatatttatttatctgattatcagtcgtgtaggagcatagagtactatcctccattaagaccccacaaatgaaccattaaaacaggtgccattgattagcgttggtcctccattgacgaccgctaactctcacgcttctgccggttggacgacaccgtctttcaagcggtatctttcgcctgtggcggggcaggtggcgaggccttgttcgtcgaaggtgagtctctcgccattacggctcacccacccgatacggcgggcgggattgcccaccatcagggcgtaggcggggacatctttcgttaccaccgaccccgcgccaatcaggcagtactcgccgagtgtgtgtccgcagacgatggtcgcgttggcaccgaccgatgcgccctgtttgagaatcgtcgggcgatattccgccttgcgactcaccgccgcccgcgggttgatgacattggtgaacaccatactcggaccgaggaacacatcgtcctcgcagcgcacgcccgtatagaccgacacattattctgaatcttacagttgcgccccagcaccacatcgggcgagataaccacattctgcccgatattgcagtcctcgcctatccggcaccccgacataatatgcgaaaagtgccaaatcttcgttccgcgaccgatattgcacccctcgtccacataggacgattcatgcacaaaataactacgagactccgactccccctcattccccctcaaagagggggatgtacagagcgggttatgtgtattttctatgctcattgcttgttcgattttggttgtttacgggtagcctataaggagttctactcagtccaccgggcttcgtttcgttccgatgctcagtgcacatagtgcacccgtcagtcgcttcacccttgctcatcccttgcttatcccttgctcatcccttgctgagtgctcactcttttccccgactctttttcgcgggtcgattagaagaacgctttgaagatatcgtttccgttggcgaatatcagcaacgccagcagcaaccagaatcctatcgtgttcgcaatctccagaaatttgtcgctcggtttgcggcgtgtgatgatttcccagagcaggaacaagatatatccaccatcgagtgcgggtatgggcaagaagttcataaacgccagaatcagactcaagaaagcggtcatataccagaatgactgccagtcccaaatactcgggaacatgtttccgatggcgccgaaaccgcccaacgactgtgccccctctttggtgaataccaatcggaactgcttgacgtagttgcccaacaggtcccatccatagcagacgcccgccggtatcgcctcccagaaagtgtagtcggtatgctcaatcttgaagaacgcatatttcgatttctgatagacgcccaatcggcactggtcgccgataaacaggtgcgcagtcatcggttcgcccgcgcgatagaagtccagcgtgatactgtcgcaggggtgtttttgcaactcctcggttaccaacaccgcacaaggcgttgccacgccgtccactgccaccacgctgtcgcccgccttcatacccgcgaggtcggcagcattgttcggcatgacggaatctaccacaaacggcacaaactccgtgatgaggatataggg

SEQ ID NO: 1389 - DNA, 15288 bp, synthetic construct
  misc_feature 1..15288: note = Synthetic
  source 1..15288: mol_type = other DNA
acgaaggcttgtggtccgtccctccgtgtactgggaaacaatgctttccttcagtgcgtcacgatccgatgtcggaaggcggttcaaaaggctgtaaaacgccgagtaattctcgggcttgtttaaccgtttacgggtgttgatgtctatctgcatggtaatgttatttcttttttaaaagtttaccgcatctgatacaatactctcgataatgtttagtgtgatatttattaatatgcttacttcgcttttgaccaccttttctcttcattctgatatataaagtattattccatgtaactcgataaggcatgtgtccacaaaagaagcatacaatacgtccccaaatattcatttttgttctgatttgagccatacggcagtttaggcctgccgcatggcagaatattaatcaactataaattcggttatgttgggaattacttgaatcccttccattacctctacacttgtaggagtgacaattgcagttacatgaggatgatagttttcgcaaagatactttatcaatggctttgccgcctctttcagttcttcaaacttccttttgttttcttgaatatcagtttccatatttcgtatttatgggttttacaaagccgcccaaggctcatttcttatttgatttgaattaataacactttacgcaaaataacccccttggagtattataacatccttcgcctgattcaaacaccttaccacatttcttacatcttggacgggtgtctattggtttcagtgcttcatggtagggtaagcttccggtgttgggtatgccttcaacaaatatctcttcaaggctgatacccttttctttggctttatcacctgctgctattacaatatctttccacgagttaaatgacttggttaaatctccttcatcgtaaccataccaacgttcagggtctttatctatttctgtttgagtaatagagcggtaaagttctatatcatcaccagctattatttgtaacgtcccataaaaatgtatagcttcgaagctaattcctctaaatgtagttatatttacaattgctttcatgatttaacttctttcgattttgcgccacattcatcagttcatactcaaatctccactgaacggaatagtattaatgtcagcctttctcgtgtaggcctgcataagccccacggaaagcagcatataggcattcttattcgctttggcaaccccagaaatagagccgataatatgttcagtcttgccggtaatgattgagcaggctatctgctcaagtccgtccggatggtcctcactggcggcaacgctcataaagacactaagattattttctttacaaaagttttccacgtacaagcagagttcctttactgcctctttctgtttttctgtaatcatttcagttaaattttaatggttgataatatgttatttttcaagaatataatcgcactcaagaactttgacaccaccgtaaaatgtcactttggacgtatcagtgataccaaaatgttctttatccgcaaaaatcatatttttcacaccggacttcattttccggataatgtccttagcccttttatcagtccagccgtgagcagcaaaaccggccttgaactggtaagtggtcgttacggcaccgttctgaatcctggtggaaacactaacggtacccacacaattttctataactttcttctttcccataatttatatatttgaaggtttccaatccactgttataatcgcataccttgttttacgctaatctttaaaagttaattctccattcataagaagcggcagcatcgaatctctaagttcggaaagaagcctattctcttcattatttaggtaataaatatgctgcttatacatattcataaagaaaggcatgatgcttgacaatatttccttatcagtattctcaatacaaaatactttactattggaagattgaatatacttattctcaataattttctcttttacttcgtaattcttgaatgatgcaaaactttcattcatagctttcactacttcattggatgattcgcaatcttttataatttctgtaagtccaagacgttcagcccataccttattaactgtcaccttaataacattacgttctctgatgacacggttaatatctgatattatagcgttgaagtctcgatgaatagttccttttaattctatcggcagatatgagccaatagtaagattgtatcccttttgctccagttcttcgattgaaagccttttagagaatgaatcctgttcttttactgtaagttcgcatatagcagcaatctgttcatctgaaaaagtattaaattcctttttatagatgcggttgtaatgagaagcgccaccttctccacgttgttctcttacttcaacagatttcattccctccgcattaatcagcatcacatctttactcgttttcttcttatcaaacaaaagtatgcaagtcgctacagaggtagactcaaacatcttttccggcaaagaaatagcagcttgcagccatcccttctcaataaagtatctcctgcactctttctcttctttgcttgtaagcacacctctgggaagaatcaacgcacatctttcactcctttgcaggcaatgcgccacgaaagcaaaattacaagtgtatttctgaggtaaagctttgattatttcttcagatacaggaacttttaaattaaatggcgggttggaaatgcctacatcagcttttagaaattctgtttccggaaacatcggacgctgtataactccatatattgaacctctgattaccttatatgaaccgataatatcaccagtgagaatattcttgtttaccactgtcgcatcaatattgcgaatacaaagattaaacagaaggataggcaatacattcgtatccaattcttcgcaaacaaactttaaatccggattagtgcaccacttttgaatagtcagagaaccggaaccagcgcaacaatcgtacacaactttctcgcatggtgtatagctaagaaaagcaaccagcttagaaagagatacaggtgtataatcttgtttcttttcctttctgtctgcgtggtagaactgatataccctttgcatccaatctacagtcaaatcagggcataactctttgtacttctcaaaatacaaagtgggattctgagaaaacaaagcaaacataaccttatcaggcagtgtagtaatgctgctacatccgaagatgtcacatatctttaatgtcaattcttttaattccatttgattcctttctattctataatattcctttctcatggctcacttgtttgaaggtttccagtccactgttataatcgcatccagctcaccgctgccgccacacaccgggcaggatacatgcacgtcctcgcggctgccctcttccgttccccagaaccagccgttgcccttgcagtaaccacacttgtggccggtactgacgaagttctcacggttaggccccttacacatataggcgggaggacaaatctccagctgtttctttatcctgctcatgcctggcctcctttctgtttcggtcccgccacattccaatagtcataggcgcccttctcccagattgtgtattcaccagtggccccctgataacgtcccttactgaaggcgacgtagccctctacccatatcttcaggtcggcatcatacatcacgctcgtggccgcatcacctttaggattcttgccgcgggcatggctgatgaaaataaacagcttgtccggaaactcctccttcaactggatatagtcacggtacgtcatctgtgtgtattgaaagctgtcaatgatcacgatgttaaagcttttatggcggcgaagcctgagcttcaaagtggggatgtcctccttgatgaacgccaggtggcggctcacctcggccataccaaagcgtcgcaggttgttctggactgtcagagaagtaccttcctccagggagttgaacgccacacggtcatacttgcagagttccttgcagagctgcatcacgaaagaggtcttgccgttaccactgttgccccacacgaaccagcagccccggacttccggagtgtcgaaggcatccttccatttcccctcgaaaggaaacacgtcatacttcttgttcagaatgtccctgacattcaaggcacgcctcatgccggcctttttattattctttttctcttcttccatggtcaaaacagttttaattgccggatattgtcaattcggtcaagcacggcctgccgtgcagcaccccgcatcttcttatggcagagcatccagccgagtgcccacagaagggcattctcacgggtggagaactgtccccatttacgtcccggattgaaaccggcaccggaactgttcacctgcatgtgtacaccggcaacccaccagccgtcctgctgtcccacaagggcgtccaggtagtcgcgaccattccggtaaacggtcaccgtctcgtattccctcaagactgggtaatcgctccagggagcgggaagctgctcgcgaccgtcgatctttaagtattcaaatttgttttccatatccttaaaattacgtttgaacggcatttgaacgggagtcattcccccgtcatccgttttaccttatgaatggatttcttgacgcggcgcaggtcaaaatcacaggcggaagcctctttcatgacataatcgatgcctttcctgtcagtcaccccgttggccgaacagatggcgtacacatcccgctcgtcagtgggctccagtgtatagaacttacgtccgatacggctgtaaaattccttgtaacccggtttctggtatttaagcccgttgctgatgcgcttggctatatagtcggtactcaggaagaccacgccgcatttttcctccagcttgttgtacaggctgataaagtagtggaataccggttcggtaagcttgtcggcttcgtcaaatacaaggagcggagcgtccatctggataatgtcgtcaaggataaggctccagacctcacggatattgcagccctccgtgcgtatgccgaccgtgcgggctatctcacggacgaaatcaccttttttcatgtcctcggaacaaaggatatagaaaacttccctgtgttcctgaagataactgcgggcggcggtactcttgccgcaaccggcttcccccgtcacccaggtgacattgcgccagcgctgcgcatcggcaagcactccggtgatctcctgataggcaccggtctccacaatctgccagccggtaggattgacgctcccgacctgtgaggctatattgcggaacatctcatcgctgatattctcataacgtccgttcagaatgttgctcaccgttccgacacttgtgttcttaaggctgccggccgctttggtctggctcggatattttgccacataagccctcagactctcgctgatggcatccttgtcttctcttttcaattcactcatatttttcttatttaaaatttcctgctataattttcctaccactttgcgcacactcacttctttcttcccgagctggtcccaggtaatgttactgattacctttgtggaacgtcccaggacaacctcttccggaggccggctgtatttctttgtgcggcggtctatctggcgctgcacctcggccgtgacacctttcaggttggggctgcgcagcccgtgctgttcaggcgcaaccccatgctcgtattcgatggacttggctgcgacctgacgttcgatgcggtcatggacgttggcctcctgttcccggcgtatgaacgccgcctcaccctcggtctggtcttggattgcgcgatgaaccaccatgtacggttcggcaacgcgttcgaagcggagagcaccgcccttgtctttccagtacagccggacgctgctgaaatcataagggtcatacttgacatagaactgcctgtaggtattacggcgacgccactcatggtcaggaacaccgggggaggaatagacctcgtaggtgcgcggcctgccgccgacagtgaactctatgccggcagaggtgaaagtgctcggccgggaggtcataacccagaagatgtccaccatgtcacgggcggtcaccacttccgtgtcctcgtttacacttgtatcgtacatctctatccgggggatgccggtaacaggatgcttcatttcgttccactcccggcgtgcctcgacatattttgccttcagctcgtcgagagtatagagccggtccctgttggcctcgatgaactcaaggttcggacggctggaatcttttctggcagtgatattctgtccggtaaagccccagtatttgtgcaggacctggctctgaaaacgcccgaaagcggattctatcgtcttggactgcccgctgtaaggggcggtgggacggtggatatggctgatcttgtcaagcagaccgtcggagacacgttcaagcttcttatgaccgccctggttgtcatggaccagctcgtaaggcttgtgcccgcttgtctggagcgccatgcggtaagcatgatactgcgcctcataatcctcgttctcgctgatatggaagccgagcaggacttcactgtaggcatccatgacctcgtacaccccgatggtgcggaccttgccgccctcatcccggtaataaaggttcagtttggtaccgtcaccgtaccacaggctgtcacggcggctggggagttcggtcttatgcttgcggccgtaacgctggtgggccttcatttcaccgtaaaccgcatcataccataaaggctctatgcgggggctgctgaaccatgaacggagactgcgcgggcttttcagggccttccacccgcgtgcgggggctacccggttgtattcctcgaaaatctgcatgtcggtatagaccggaacacggctgcgtttcaaggcgacaaggaaacgcccgggttcctcatctattttcagggtgttgctgtttccatatttgccgctcacaagtacactgtagttgtcggggcggaacttgtttatcagggccttcaaccggcccacacttcccggaaggctatgcccgtacaccggacgccactcctcactcgtgacaagcagaagctcccaaaggttgcggcggaaaccggtcagcttgttattggatgaactcaaacgtttgaactcttccatcagcgcgttcagtaccgaagcgttccaggtgtattctttcttcacatcctcgggaagggcgaccagctcaccgttcttgtcataacggtactcctcgaaaaagttctcggccttttcgtctctcttcactatgttacggataatttcttctcgcatctgtttctcgggctcgccatggcgttcaacccaacgtttcttgtacttctcgggaagggaggaataagaatacagggctacgttgccttcaccaccgccacggttgacgcattcgatgtgtttccgggctacattttgccgcaaggtagtagcttttatcactggatcatctcctgatgtaagctcttcgcgggttacgcatagtatattgtctacatattccatcttcctttcagattatcagttctccaaatcacccagcgggacatgcttcttcagcaaccgcacggagttcccgaagttcagcaccaggaaaagctccggcaacggatggatgaaaaagacagtaagcagagctgcaaaactcagacagaagtagagcacgcaaaggcactgcttacggctcagaccggcgaacttgcgcagctcgtcaccgaatatgtctaacaggtcattcttcatggccgtccgtatttttaggggcaccgcccaccttgataccaccacggtcgagcgcgagcttgcggatggaacgcgctaatttgctgttcttgcggaaagcaagggaatgacttaccatttcacgggtacagcccatgaggacggacaacttggtgatctcgccccgttctgttactattcgctctttcataatttgataaagtgattattgttggggacggtcgcggactcgaaccgcggaccatggcctctcccttaaggagtctggcgtgttctaccgactgaactaaccgtccggaaatctatttaagctcttctatcgtaggagtgccccggtaatcaaagcaggaacggcaataagccaggccgcactcgttctcgcagaccacgatgccggtcagcgcatcaacctgataagcgaaaatgctttcgtcatcattcaactctttaagagtggcagcaaacagatctgcttctgcccaatcgacggtaacttttaatgctttcattttcttctttattatatttctcattgtcacatcaagccttttttgtagctttgaggcggcgttcacattttgaatacgctgcaaacatagtatattattgcgacactcgcaagattttgagcaataaaatgcgattaaattagcaatataatgcgattatggagaaaaaatcagctatttcagaaagaatacagatgttgatcacagaattttgtgatggaaagaacctgccttttgctaaggctattgggatcaatgaatccaatattagaagttatatagctggtacacaaccaaggtttgatgtgttagctgctatcgctaataaattcgcaataaattgcgaatggcttttaacaggtaagggagaaatgagaaaaacgaacctgtcaacatcagtagagcacatgcacacgaactatgcttctaaaaataaagacgatgaaagattcggtaataaccaaggtctttctcctgaaatatttgataaacttctatctactataaaagaacagcagataacaataaaagaacaagcagaagaaataggaacacttaaacaagtgattgcacagctcaaacaggacaagtcggggcatgcttcagatgcaaacgattctatgattgccaatgccatctaaaatgtattttgtggggtgaaggggataataaacgataaagcgctgattttaagtaagtaatataaaaatacatggtagtaaataaatattattaatatatcgtttaccccctacaatagtctaaaaacaaacaaaacgacgctatatttatacaacacatgcaagcaaatcaatagaaataacacgaaaaatgtaactcctattgtaactcctttcgatacgtttcgtttttgcaataaggaaaatgtaactcctattgtaactcctattgtaactccttcccatttttccgaccgttcaaaccgttcaaatgagaagcagattcttgtcaatgtactatcagaatatgtaccgatgcctatacaacaaaaaaagccgcaagaagcggctttatagggcgttctaaggcggttttagccctttctggtagtctttatcaggtgtgactggataatcatcgcacgtttcgtgtattttacggctccatcagtcaaaccggcatgcaacagactgcttttggtgatgccaacccggttctcagtcaaagtatcaaatatggcagaaatactgccgaaatagaggtttttcttctcgtaaatcaagtgcacatggataactttagtcataattatatagcatttatttgactacaaatataccaaatattatttatatggaataatttagataaaataaaaaaggaagtgcattacgcatctccccgcttacttgcataaatcagtttatttgactatctttatggtcagaaaagaatcatggggaacaatctgtaataacacttccgaaatatctcctatctcacctttaatgtaaagtaattcatttgaacggcgttcaaacaaggctcaaatgtaagcccaatgtaaagcaatgtaaacgtttggtttttccagcccgttctgctctattcaaccataacattttgaataccaaagcaatcagccattttcaggctaaccacatattgatacgtttcgtttttccccccttatgtggatgtgacagcggaatttttgagaacagaagatgattatgtagctttatttgattggttgaattctcgaaaggaaatagatcagaaagcttttctgaaatatccaaaatttggattgaaaaaggaaatcgataattatcgttggaattatgttgaggataagttgtatccatgtaatgagacgagatatgcgattctttcccgtttggagaaagtcggcgttagtattgattttttgtcagatgagaaagaaacagtcttgtggcatattttatattctgtaagtgataagcaggaaatagagaaagccttacggacctttgcagttaagaacggattaaatgaatcttttgtagaagtattcaaaaaatttcctccttttaaatctgaatatggagcatattctgccaaggcaataaagaaattgttgcctttgatgagatgtggaaagtattgggatacatctttgattgatgatgcgacgagagataggatagaaaggataataacaggtgagtatgataggaatatagctgctaaggttagagaaaaggcgataaacttgtcggatatatattgttttaagagacttccgctatggttggcttgctatgttgtatataatcgtcattctgaaaataaagaaattgctaaatgggaaactccggcggatattgatgcttatttggcttctttcaaacaacattcactacgcaatcctattgtagaacaggtgataacagaaacactgagggttgttagggatatttggaaacaggttgggaaaattgatgaaattcatattgaattaggacgtgagatgaagagtcctgcggacaaacgaaaaagaatgactgcacaaattcaagagaatgaaaaagctaatctacgtataaagacattacttgttgaatttatgaatccggaatatgaggttgagaatattcgtccctattcaccaagtcagcaagaaatattgcgaatttatgaggatacggttttgaaaagagaagaaccgattccggaagatatagatgcaatattgaaaaaattcaataatagcaaattaccgacaaaatcagagtttttacgttataaattatggctggagcagaagtatcgttcgccttataccggtgagttgatacctttaggaaaattgttcacgactgcgtatgagatagaacatataattcctcagtctcgctattttgatgattctttttctaacaaagtgatatgtgaatctgctgtgaataaactgaaagataatcaattggggtatgagtttattaagaatcatcatgggcagaaagttgaagtgggttttgggaaaaaggtagaaattctttctgtggatagttacgaacgatttgtaaaagaacaatatgctaaatcaagcgtgaaaatgaagaaattgttgatggatgatattcccgaacaatttattgaacgccaattgaacgatagtcggtatatcagtaaggttgtcaaagggcttttatcgaatattgttcgtgaaaagaatgataatgatggatatgaaccagaggctgtttcaagaaatgtgttagtttgtacgggaaacgtgacggacaggttgaaaaaggattggggaatgaatgatgtttggaactgtattgtatatcctcgttttgaacgtttaaacgctttgactggaacacagtgctttggacattgggagaataaagatggaaaaaaagtttttcagacggaattaccccttgaatatcagaaagggtttagcaagaagcgtattgaccataggcatcatgctatggatgcaatagtgatagcttgcgctacgcggaatcatgtgaattatttgagtaatgagtctgcaagccggaataccaatatttcccgttatgatttgcagagattgttgtgtgataagaatagagtagatggtggtggtaattatagatgggttataaagaagccatggaatacttttacgcaagatacaagggaggcattggataaaatagtgattagtttaaagcagaatttacgtataataaataaaacaactaatatttatcaacattttgatataacaggaaatcgtatttataaaaaacaggaaattggtgataattgggctgttcgtaagccaatgcataaggatacagtttttggggcggtgaatttgcgaaaagtaaaaagggtacggttgtctgtagctttggatactcctactatgattgttgataagagagtgaaaggtaaggttcttgaattgttatcatataaatatgataagaagaaaattgaaaaatatttcaaagagaatgttttcttttggaaagatttggacatagctgaagttgcagtctattattttacagaaaatacttctgaacctttggtcgcagtacgtaaatcacttgattcaactttcaatgagaagaaaataaaagaatcagtaacggacactggcatacagaaaattcttttgaatcatttatctgtaaaggggggaaaagcggattgggctttttctgcagaaggaatagaagaaatgaatcgtaatattttacagttgaatgatggaaaaaagcatcagccaatatataaggtgagagtgtatgaatcacgtggaaataaatttagcgttggtgtatcaggtaataaaggaactaaatgggtaggagctgctaaaggtactaatttattttttgctatttatgtaacagaaaatggaaaaaggacgtatgtgactgtccctttagacgtggctatagaacgtgagaaacaagggcttattcctgttcctgatagaaacgataaaggggataaactattgttttggttatctcctaatgatttggtgtatctgccaactgaagaagaacgggagttgggtaggataaatgaaccaatagatagggggaggatttataaaattgtaagttttacaggaaatcgtctgtatggagtcccttgtaatgttgctaatgtaatagttgataaattagaatattcttcattaaataaagtggaattgacagatgctaaagagtcaataaaagaaatatgtattcctataagagttgatagattggggcatataatagaagttaagtatagaataaatgaatagtataaagttatttcaagaaaagaaaatccgttctatgtggaatgaagaagaacaacagtggtacttttcagttgtttatgtagttggtgtgttggctgatatcgtgaattctacggactatttgaagaagatgcgaaaatgggatgaagaattggctacttatctggggacaaattgtccccaagtagaaatgttgacagatacagaaaaaaagaaaaactttggtaacaaatgtataggaaatagaaaattcggaattagttcaggagtgtatgaaagaactgtatgagcagaaaggttatccaaaggattggattgacaaacgtttgagaggacctaccattcatcagaatttgacggatgagtggaaagaaaggggagctatggaaaagtgactatgctattcttacgccagaaatatctaaggcaacgttgggattaagcccttcggattaaaatatataaaggactgacaaagaagaattagaacctttgtgactatatgctcgatttagaattgatattcgcgatgcttggcgaacacgtcactacggaaatttctcagaaagaaaaaccatatacatttactattgaaaagtaagttgtacagtgtggtggaaatgttgttgaagtagtgcgtgaacaagctgaaaaagaactaggtagaagtattattttttccgacaatttttgttggattcagataatcatgatgataccttaaaacttccttttgaggaaaacaacgaatgaataactttaaaatctgtatactatgattaagaaaacattttattttggaagtccagtttatctctctttgaaaaatgctcagttagtgattaaattaccagaggtcataaaaaacggtgctttgtccgagggtttcaagcaaatatctgaggtgactaagccgatagaggatattgggatagtggtattggataacaagcagataaccattacttcgggagtgttggaggctttacttgaaaagaattgtgcagttataacttgcgattctaaaagtatgccggttggtttgatgcttcctttgtatggaaatacgacacaaaatgagaggttccgacagcaaattggtgcttctttgccattaatgaaacaactttggcaacaaacggtaaaagctaaaatagaaaatcaggcagcggtattgaataaatgtgttggagaggaaataaagtgtatgaagatatgggctactgatgtgaaaagtggagatccggacaatttggaggctcgtgcagctgcttattattggaaaaaattgtttaagatagaaggttttacaagggatagggaaggtattccacctaataatctgttgaattatgggtatgctattttgcgggcagtcgttgcccgtggtttggttgcaagtggacttttgcccactttgggaatacatcatcacaaccgttataatgcttattgcctggcagatgatataatggagccttatcgcccctatgtggataggttggtatatgatatgattaagggaggagaaataaattgtagagaattggctaaagaacaaaaagtacaactgcttactattcctacgttggatactattatttcgggaaaacgtagtccgttgatggtagctgttgggcaaactacagcttctctgtataaatgtttcagcggtgagttgcgcagaatatcttatcctgagatgtaatggaacggtttagcgaatatcgtgttatgtgggtacttgtactatttgatttgccaaccgaaacaaagaaagataaaaaggcatatgcagattttagaaaaaatctgcaaaaagatggatttacaatgtttcaattttctatatatgttcgtcattgtgcaagtagtgaaaatgcggaggtacatataaaaagagtcaaatcgattttacctgaacatggaaatgttggaataatgtgtattacagacaaacaatttgggagtatagaacttttctatgggaaaaagactatagatgtgaatactcccggacaacagttagaattattctgaaaagaaaatcccgctatatggcgggatttttttgggggaaaccacatctttttttaattctaatcactactgtcccgtaaaagtggataaatagttctttgaaattattgaaatatagt

SEQ ID NO: 1390 - DNA, 15239 bp, synthetic construct
  source 1..15239: mol_type = other DNA
  misc_feature 1..15239: note = Synthetic
cgccccaattgaattaaatttgtgcaagcactccttctcttcgggcgggacgcttcgttcgacttgcatgtgttaggcacgccgcaagcgttcatcctgagccaggatcaaactctccattgtaaattttatgtctgcgacagaaaattcacgagactccgtcgtcgctcgggaatagaaagcacgctttcattccgctcgctcctaggagccttgtaaaatcttgtctgtcttgtctgttctcagaacgcctatccggtacaatcaacatttatcggctataaaggcacctgtacatattcccgacacaaagccgggatcgacggtttccattacaccagggacatcaggcaaaaaagcccgacaccccgcttcttgtactacttctctgtcttatgaaatctgtcaaagaactctttcttttcattcgcctcacctctgcgggatgaccccgtttcggaaaagcgagtgcaaaggtacgctttttatccgaaccgccaaaacttttcgcaatattttttcaaaaataatcgatttttcttaaatcacgacaaaacaaaaagaacgcaaaacactatataccttattatataatataaagcggaggatggtgggtggcaggtgatggatggcgaagaatcaatataggctctacggacttcttggactttaggatattatatcgatagaataatccttgcagtgattgacaaaagatgcatgacacaaaaagggcgagtccccccgcccatttgttttcacaacggaataatccttattgtgatttgcttaatttcgtactgcaaagaaacaaaaaaaatctctaaccagcaaatgttttaaagtttttttgtatatttgcgccatatatctaacgaactatctaacaagcactatcatgaaaaaaatattaggacttgatttgggaacaaatagcattggctgggcattaatagatggagaaaagaacacaatcattaaggcaggcagtaggattattccgatggacgcaaaagccatgagcgaatatgaaacaggaaacttgcagtcagcaacttccgtaagaactgatttcagaggaactcgtcgcctctacgaacgtgcagtcttgcgaagggaaagactcctaagagtgcttaatgtcctggggttcttgcctgaacatttcaagaatcaaatagattttgaaaagcatttaggtcaatttattaatcatggcgagccgttgttgccatataggagaacagaggataacaagaatgtctttatttttgcggattcattttacgagatgattgcagatttctccttgcatcatccagaactaacagagaatgggaagcgagtcccttacgactggacaatcttctatctccgtaaaaaggcactatcaaaaccgataaaaaaagaagagttggcatggttgattttgaatttcaacaccaaacgtggctattaccagttacgtggcatggaaaatgaaacgaaaaccaatgatggtgaagaatacaagattttaaaggtcatagacgttgaaaagacgaatgaggacaagaaacgcaagggaatattttggtacgaaataacttacgagaatggagccaagcaaagaaaatccggccctgtcgcccctaggaaaatcggcgatatggttgaagtcattgtaacaacttcttatgacaaagacggcaacatcaaaacagataaagaaggtaatcccaaaataagcataagtacgccatctgccgacgaatggaaacttctgaaaaagaaatcagagaatgccattaaggaaagcggcaaaaccgttggtgagtatatttacgatgagttacttgtcaaccccaatatcaaagtgaaagggaagttgataagggttatcgacagacctttctataaagatgaactaaaaagaattattgacaagcaatcggaattcattccagaattacgagatcggtccctttatgaaaaatgtattcgcgaattgtatcatcaaaacgaggctcacgtacaatccatcatggacaaatcttttacagatctttttgtggaagacattatattctatcaaagacccctaaagagcaagaagtcagaaattgccaactgtccatttgagaactaccactatattgacaaagaaagcggggagattgttaacaagcctatcaagtgtatcccaaaatcacatcctctgttccaagaattcagactcttacaattcacacaaaacctcaaaatattcaaacgggagaaagttgttaacggcaaactgaaaaccgacgttgatgtaacatcagactttctttccacattagaagattatgctgcgcttttcgagtggctaaataacaaaaaggacataaacgaaaaagaacttcttcggtacccgtcattcaatatagggaaaaatgtttctgaatatagatggaactatgttgaagacaagtcttatccatgcaatgagacacattatcttatcaacagacaacttgatgacgttggcacatctttaacccctgatcaagagtgtgctctttggcacatcttatattctgtagatgacattatcttactaaggaaagcgctcaaatcatttgctaagaaatacgatattaataccgaactctttgtgaaggcttttgagcacatcgaaccattcgacaatgactatggggcatattcagaaaaagcaataaaaaaacttttaccgtttatgcgaaaaggcatgagacttcatgatgcatgttacgaagtatatggaagattctcagaaactgcagatactgacaaatggactacacctgaggacattgaccgttatcttgaatttgagttcaagcaacattctcttcgcaaccctgtagtagagtcaattttgggagaaaccatgagagtagttcgtgacatatggaaaacttatggcgaaatctctgaagtacacgttgagatggggcgcgaccttaagaaaagcaatcaggagcgtagagatacgaccgacagaattcgaaaaaacgaacaaacaaacttgcgtattcgtttattacttcaggaattccttaatccagaatacaaaatcgatggcgtgcgtccccactctccttctcaacaagaaatattcaagatatttgaagaaaatgcgcttgcaaatattaacgaggatgcagaatctgacgacattcaaatgattgctgacaaccttgggaacccctccaaacatgttagccagtcggaaatcatgcgttatcgcctatggcttgaacaaaaatacaagtctccttatacaggacaaaccataccactttccaaactgttcacaacagcgtatgaaattgaacatgtcattcctcaatcacgctactttgacgactctctaagcaataaagtaatctgcgaaagtgaagtgaacaaactaaaagaccgtatgctcggctatgagtttataacaaaacatggtggggagattatacaaggaaatcttggaacgcaaattaaaattttggacaaagtccaatatgaagaatttgtgaaacagcattatgccagcaacaaggggaaaatgaagaagttgctgatggaggatattcccgacaattttatcgaacgtcaactaaatgatagcagatatattgcacggaagaccatttctattctttccaaacttgtcagggaagaaaacgaaacagaggctacttcaaagaatgtcatcgttacgactggaaatataacagatcgtctaaagaaagaatggggcgtaaatgctgtatggaacgacatcatagcacctcgtttcataaggcttaatacgattactggaacacataattacggagaaatgattaatcgtgaaggcaaacagtatttccaaatcaatgttccactggaaatatcacgaggatttagcaaaaaaagaatagatcatcgccaccatgccatggatgccatcgtaattgcatgtaccacccgaaaccatgtaaactatcttaacaacaaagcggcactttcctcagagaaagacttacgctatgacctacaacacaaactttgtacaaaagttaaaactgacgaccgagggaactacacttggcaattcaacaaaccttgggaatcgtttacgcaagatgttagaagagaattggcatctattattgtcagtttcaaacagaatttgcgtgttatcaacaaaatgacgaatttctattggcattatgaaaatgggaaaaaagtattaacaagacaaacaaaaggtgacggatgggcaattcgcaaatcattgcacaaagcaggcgtgtctggtactgtcaggctacaaacgaagaaaacagtaaagttatcagacgccctcaactgcgttagtatgattgttgacaaggaaatccgtaaggagataaaggatgttatttcaacctatggtaaactgtatgaaaagaaaacaattttaaagtatttcaaggacagggactacaaggttggcaagaaagacgttagccgtgtggaaatttactacaccccagaaatcgcagagttatctgcaaaacgcgtattgcttgacacttcttttgacgagaaaactatcaaatctataacagacacaggaatacaaaaaattctgctgaaacatcttgccaacaatggcaatgaccccaagattgctttcacgccagagggtattgccaacatgaacgaccacttgaaagaacttaatgatggaaaagagcacaagccgatactgagagttcgcaaaacagaatctttcggattgaaattccctgttggagaagtaggaaataaaagcaagaaattcgttgaagcagacaagggcacaaaccttttcttcgccatatatattgacgaggatggaaaccgtagttatgaaagtattccgttcaatgtagcagtagaaagattgaagatgggagcacaagttgcacaagaaataaacgaagaaggaaagaaactgttattcgttttatcacctggagatctggtatatatacccgatgaaggagagcatgtagatactataagcactacagatagaatttataaaatggtgtccacgaccaaaagagaatgccattttatcccacaatctatagccgctccgattattgatactattgaactaggtagcaacaacaagtcagaaaaaatgtgggatggtaagaacatcaaaaaaaattgtctaaaacttcaagttaatcgtcttggcattgtaacgaaaatcctccaatagcctatgataaagaaaacgttatatttcggcaatcctgcatatctatcactgaggaacaagcagttggtgataaaactgccagaggtggagaagaatgacctgcctgacgttatcaagaaagatagtgtcaggacaatacccattgaggacatcggtgtaatggtgcttgacaaccaacaaattaccatcactcaagggttaatggccgcactgctcgagaacactacggcaattattacatgtgatgcgaaacgaatgccatcgggactgctgctgccccttgaaggtcatacgttatataacgaacgattccgaaatcagatagacgcctcactgccactacgcaaacaactgtggcagcaaaccataagggcgaaaatagagaatcaggctttttgcctacagaaaaacaccactaagtcacacgccccactacatgtcatggctcgcgacgtgaaaagcggagacccagacaattacgaggcacaagcggctgtttactattggaaaaacatattcaaagacaaacccggtttcgtaagagcacaagaaggagaagtacctaacaacctgcttaattacggatatgctattctgcgcggagttgtcgcccgctcacttgtcgcaagcggcttgctccctgtttatggcatacatcaccataaccgttacaacgctttttgcctcgctgacgacatcatggaaccatatcgtccattcgttgataatcttgtcatcaatgtaatgtcgcgcatggatattggcgaagagttgacaactgaactgaaacgcgagatgcttagcatacctgttcttgatgttctgataaacggcaagcgcagccctcttatgattgcagtaagtcagacaactgcaagtctggcaaaatgctttaacggagaattgagaaaaatcagttatcctgagtttgtatgaatgaacgatttaaccagtaccgcattatgtgggttctcgtcatgtacgacttaccgaccgacactaagaaagagcgaaaggctgccgccaagttccgtaaagaaatcatgagcgacggcttcacaatgttccagttttcaacatacatccgtcattgtgccagtatggagaatgcacaggtacatataaaaagagttaaatcattgctgccagaaagcggaaacgttggaatcttgtgtataacagacaaacaattcggggacatacaaatcttctcatgcaagaaagagaaaaagccaagtgctccgtaccagcaattagaactattttaaaaatagagattccgcatttgattgcggaatctcatttttgataaacacatttttctattttctgattttctgcttaaacacctcgttatcaactatttgtatcattcaaggtgtttatcactctgcaaagatacgaaattttaagcaaatcacaacggcacattaacaagccatgttacaaagtatggtgtttatcactctgcaaagatacgaaattttaagcaaatcacaaccgaatactatgtctgtttggagactcatatggtgtttatcactctgcaaagatacgaaattttaagcaaatcacaactataaaactggttatgtttttggtcaaaagggtgtttatcactctgcaaagatacgaaattttaagcaaatcacaactttaaagattattcaacttttacgtaagtggtgtttatcactctgcaaagatacgaaattttaagcaaatcacaactcattggtgttccattagaagcgattacttggtgtttatcactctgcaaagatacgaaattttaagcaaatcacaacccttccacggtggtcgaatactattgttgcggtgtttatcactctgcaaagatacgaaattttaagcaaatcacaaccttaagccaacgtggtacaatagttctaagggtgtttatcactctgcaaagatacgaaattttaagcaaatcacaacggttgagcagactgacatttgttgtttgctggtgtttatcactctgcaaagatacgaaattttaagcaaatcacaacgggtcacatcgagaagcgcaactcgaaatgggtgtttatcactctgcaaagatacgaaattttaagcaaatcacaacatagatgtcgccgagcttctcgttagcaaggtgtttatcactctgcaaagatacgaaattttaagcaaatcacaactgtaggtctctacaagactatgtccttctggtgtttatcactctgcaaagatacgaaattttaagcaaatcacaactaaagtgaagagtgaagaatgaagaagggaggtgtttatcactctgcaaagatacgaaattttaagcaaatcacaacctttgtctcgcgcctgtaaagatgtggctaggtgtttatcactctgcaaagatacgaaattttaagcaaatcacaactatcctcttacttttgttgattacttgctggtgtttatcactctgcaaagatacgaaattttaagcaaatcacaactgcaaagggaaaacggaaatacttaataaaggtgtttatcactctgcaaagatacgaaattttaagcaaatcacaactcttatgatgcggctaaattattccccaaaggtgtttatcactctgcaaagatacgaaattttaagcaaatcacaacaaaaatagcactatgtttaaagaatatatggtgtttatcactctgcaaagatacgaaattttaagcaaatcacaacggggatgggggcattgttttttttaatcacacacgacttcttatatatcctttccatttcctcaatatcactgaccccacccctatccccaaggcctcacccctatcccctctccaaggggcgagggggacttcaggggcggggaatgaacgcgaacggcatcttttggaacacggtatcatttttcatgtccaactgtacaaagttccctataaagcgagcatatacatattagaaagcaagcactctatttgggaaatgcgttgttcctgaatatggctgacaaacgtttttttcaaaataaaaaagtaaatttcaacttcacaatttcacatacggcgtaacgaattgactaacaaagcattgcgtgtgatattgcaatttcacccaatttcacactccgtcacacctcttcccacgagacaggagattgttgttggccagtaacgaccttttgcgcttcaaagatatatgtttggcgagttcaggaagcacaagtgagggagtgattagggtctaatcactctccgtttaggcatcaattgcagagtgattagggtctaatcactctgcaatttggcacaagtgagaatgtaaggaggcacaagtgaatgtgtcacttgtgcctcctgagcagatgagtaatatgtttttcttatttcgtttgccacaggtcgctctccactatgcggcggagaccttcggcgagtgtggctcgcggacatgcgaggttgatgcgtataaaggagcgctggtgctcgccgtatgcctcgccatcggctatccatactttatctttatggtacagatggtcggcaatggctggcgaggggagtcctgctgcggtgcaatcgacccacgcgagatatgttccttcgtgtggtgccacccacagttggggcagtttctcggcgaagaggtcgcgcaggtatcggtagttgccgagcacatagtcgttgagttggtcgagccactctgccccgccgtcggtaaatgcagcctctgtagccactattccgaaaggattgacatcacacgtctcgaagatattgatagcgcggtcgatgcgatagcgcttgtcggggtcggcaacgatgatgtcagcgttctgcagtcctgcgatgttgaatgccttcgacgctgccacacatgtggcactgttctgaaggaactcctcaccgagcgacgagaacggcgtgtattgatagcctggcgccacgaactcgcaatggatttcgtcggagatgacgaagacattatggcggaaacatatctcgcccatgcgctggagttcctcgcgcgtccacaccctgccggcggggttatgagggttgcatagaaggaatatgcgcaccttggggtcggcacatgctcgctcgaatgcttcccaatcgatggtaaaggcgggggtggggttgagcgttgagcggagagcggagagcggagagggctgtgaggcttcgttgagaaggagggtaacctcctctgcgatgcacccttggttgcgtatgctcgagaagaagcagttataaacgggtgtgttgacgagcactttgtcgcccggcagcgtcagcgcatgtattatcgcggatattgcgggcaccacaccaatggttgtgatgaagtgttcacgctgccatccgcatgctccgtgacggtcgcggaaccagcgtatcacggcatcgtaataggtctgcggcacgagggaatatccaaacacaccgtgttcaacgcgcttgcgaagagcctctgtgatgcctggatatacatggaaatccatatctgccacccacaaggggatgatgttggggtcttctgcctcgtcccatttgatgcagttggaccctcgtcgagtgacgatttcatcgaaattgtaattcatagtttaaggtttaattattttcggtataacgtgatttcgttattacggcacaacgttattatgccccaggtcaatcgtcataacgtttgccgctctgttatcttgcagtcggctggctgcttgatgttctcgtcaatggtgatgcggccgatgtggtcggcgacgatggagcctgtgcggggatttttgatttctgttatcgagccgatgatggtggcgttgacgtcggaatcctcgaagatgcggtcgctgtcagcaccaaaagtgcagtcctcgagcaccagttgctcggcatagcacagcggttgctcgccagtgatgtggcatcttacgagtcgcacgttctttgagtgccatgcgagatactccccgttgagttcgctgtcgtaaatggttacgttctcaacctcccagaacgagtccttggttgtaatctttgcattgtgcacctcgacgttcttgcaatactggaacacatactttgagtcgctcaccagtccgtcaacaaagacgttctcgcagaacatgaaggggtaggtgccgtcgtgcagcgtgacattctttatcttcaggttcttcactttccagaacgtctcgtctgcatcgttgaaggtgacattctcaacggtcacgttgttcatttcgcggaacagtttcggtgcgtctattatggtgtcgcgcatcaccatgtcgttgctgtaccagatggcggaacgcgagcccacctcgaagtagcagttggtgatgagcgagccatcgacgtgccaccagggatatttcccaatgaagcggcatcggtctgcctcgatattagtgcagcactttatgcccgactcgccctcggtgatggttacattctcgagtcgggtgtcgtgaatcgcaaacagagggcgctcgcctccgaattgcttattgcttatgatattcatctttattaatttgttttcgctgcaaaggtacaacaaataatggagaaaagagttaccttttttacggataaatgttccttaataacgaaaataagcaaaagataatgctaaaaaagtataaaacggcgattgttcaaatagtttttattaattttgcggcactaatctaaaattcaaattgttaggaaaacataaacaaaagataaatctaaagaaatggaacaacaaaaagttaagcctgcagatggcaagttaggtattatggttgtcggctgcggtgccgtgtcaactacctttatcactggtgtacttatgactcgcaagggtctggcaaagcctgtcggctcgatgacccaatacgacaagattcgcattggacgcggagcagacaagaagtacatgagttatggcgacatcgttccactggcaaaactcgacgacatcgagtttgccacatgggacgtttacccacagaacgcctatcaggccgctatgtatgctgaagttttgaaagaaaaggacatcaatcctgtacgcgacgaacttgagaagattgtgcctatgaaggctgctttcgacaagaactacgccaagcgtctggacggtgacaacgtgaaagactgcaagacacgctgggagatggtagaggctctgcgcgaagatatccgcaagttcaaggcagagaagaactgcgcccgcatcgttgtcatctgggcagcatcgacagagatttatgttcccgttgacgagaacgttcacggcactctcgctgcgctggagaaggcaatgaaggacgacgaccgcgagcacatcgcaccgtctatgtgctatgcctatgcagccctttcagaaggtgcaccgttcatcatgggtgctccgaacaccaccgttgacatccccgcaatgtgggaactggcagagaagaccaagatgcctatcgccggcaaggacttcaagacaggccagacactggtgaagagcggtttcgctcctatcatcggcacccgctgtctgggtcttagcggatggttctcaaccaatatcctgggcaaccgcgacggtctggtgctcgacgagccggcaaacttccgcaccaaggaggtgtcgaaactctcaacactggagaccatactgaaagccgacgtgcagcccgacctttacaccgactactatcacaaggtgcgcatcaactactatcctccacgcaacgacaacaaggagggatgggacaacatcgacatcttcggatggatgggctacccgatgcagataaagattaacttcctctgccgcgactccatactggcagcaccgctgttgctcgacctctgtctgctcagcgacctcgctgctcgtgccggacgctacggcatacagcgtttcctcagtttctacctgaagtcgccaatgcacgactacaccgtaggcgaggaagctgtgaacaacctctaccagcagtacaccatgctgaagaacgccatccgcgagatgggcggctatgaggctgacgaggaaatcgactaaaagaaatgtctaaacgtaagaaacagaacccgcgacgtctgctcagatggttgtgggttcttttggtttttgtcgtggtgtcatggataggatggtactgcatgcccatgaccgcaagccagaaagagcgtaacaagactaccattgagtacaggagttgttacgcacttatgtctggcaaggatacattattatatattagagagctgaccaacgactggacacgcacccgactgtcgcctaacgacgagagcaaggtggagaaacgggagacattcggcggggcgtggcacaacaaatactggctggtgccgtcgtgcctgggccgcattgtgacatacaatcccgactatcgtgccgacagcgtgctcaagattgtcaacgacaccctgccgaaccttgtaaagcaacagcagcagatgcttgccgacaagagcaagacgctggagcggacactgtcggaactgcgctactatatgcgtgtgcatggtgtcaatgacgacggataccatgtcgtggcggctcactatgtggaagtggcagccgacaaggagcgcatagacactgccctgacggcacttcagaacattggcaacaaaccgctcagaatggaactggtgcagcactacaccgccatatacaaaaacaagagaggcaagacgcgccgccgcaactgccgtctgctgaagaccgaaagccctaccctgctgtgcaccatacagacgcgcaacagactgaaacctatcaacgcatacgccacctactcaagcgacccaggcccatacaccgcccccgagccgcagccctcatacacctatgacggcgagaaggcgcagggcaagcgcgaaggtcacggcatctacttcgacagtgcaggcaactactacgacggtttctgggccaacgacatgcgcgagggcttcggatgctcggttgactcggcaggtaacgtgcgcgtgggacaatggaaggaaaaccgtttccgcggcgaacgcctcaactacacgcccgaacgcatctacggaatagacatcgcccgctatcagcatgaggtggacggcggcgtttatcccatcatctggaagaacctgcgcataacaagtctcggtgtgaaaacgccaaagacgataacaggaacggtgagttaccccgtgtcgttcgtgttcatcaagtccaccgaaggcaccacggtgctcaacaaatggttcgcctccgactatgccgaggcgcgcaagaacggcatccgcgtgggtgcataccacttcttctcaaccaagagcgacccattggagcaggcacatcacttcctcaagaacaccaagttcagcagaggcgacctgccaccggtgcttgatgttgagccaagcgacgcacagatagaggcgatgggcggagcagagaagatgttcgagtggataagaacatggatgagagcggtggaaaaagccaccggtgtgcgcccgatactctacatcaaccagatgttcgtcaaccgctacatgccactggcacccgatgtggcagccgactacgaggtgtggatagcgcgttacaacgagttcaagcccgacatgcacctctctttctggcagttaggctacgacggacggctgtcaggcattcgcggcgatgttgacatcaatgtgttcaacggctatcaggacgagtggcaggcttacctcaagcgcagagcgttctgagaatgaagagttgcttagttaggagtttggaattacgaatgacaagttgtcgcgcatagcgcgatgaataatttataattaataattcttcattcgtaatcgccataggcgacaactcgtaactcgtaattcgacattcgtcattcctaactaatcaactcttcattcataatcgccgcaggcgaccactcgtcattcgtaattcctaattcctaactaatcaactcttcattcctaatcgccgcaggcgacaactcgtcattcgtaattccaaattcgtaactaatcaactcttcattcctaatcgccgcaggcgacaacttgtcattcgtaattccaaattcgtaactaaaaggatatgtataaacttgactttaagaaacgtatggcgctcgagatggcgcgcgtggtgaggaagaataagattctgaaccaccctctcagacaactgttctgggagtgcaccatgcgttgcaacatgcactgccgtcactgcggaagcgactgcaagaagataatggagcagaaggacatgccctgcgaagacttcttccgcgtgctcgacagcattgcgcagcgcaccgacgccagcaaggtgttcgtcatcgttaccggcggcgagcctctgatgcgcgacgatcttgaggagtgcggacgcggaatacacgagcgcggcttcacatggggcatggtgaccaacggattcctgctcacgccggagcgttatcgcagcctgtgcgatgccttcctatatactgtcgccatcagcatcgacggtcttgaggacgaccacaactggatgcgcggccaccgcgagggcttcgcacgggcatcgcaggcactcgacctgctggtcaacgacccgctgatgaggtttgacgttgtcacctgcgtgaacaaacgcaactatccccacctcagcgagatacgcgacttccttatctcgaagggcgtcagagagtggcgactcttcagcatcttccctgccggaagggctgccaacgacccgctgatgcgcctcagcaacgaggagtatcgcggcatgctcgacttcatcaagcagacacgacaagagggcaagatactcgcctcgtatggttgttcgggatttgtgggcaactacgagggcgaggttcgcgactatcctttctcctgtcaggcaggcatcacgataggttcggtgatgtccgacggtgccatcgctgcctgcgccagcatccgttcagactataatcaa

SEQ ID NO: 1391 - DNA, 15106 bp, synthetic construct
  source 1..15106: mol_type = other DNA
  misc_feature 1..15106: note = Synthetic
tgtgataaagaagcttacttagaggcaaccagttccatgctgctttgcagcttgttgtctttgtcgtaagtttcgctttttacagtgccaactccgggcgcataccaggtgatggtggtggtggtagattttatcttcatcacggtggcctgggcggtctgcgtcactttatgggatttataggtgccggcgggtacggttacatcctctatggccaggcatttgccgttggtaaggtttacctcggttttcattttaatgaaacccatattcatactcattaccatattggcatccttcaaggtctgacctacctgcaggttggtgggtatttcggtgggagctcctgttatctccattttaagttcacccatctggggctgatccttctgagcaggcatcatcgaatttaaatcgaaatacataattccgtcctttatatggatggttagcggaatagacatcttggcctcgccatccttgttctctttgtctattatttcgctcaggtagctgatggtcatgtcgttgcctccacccttgatgtctgttatggtctgccttacatacccttccaccttgcccttgttgttgagtgttgcataggtctgtacggagcctaccttggttgggaaaaagatattctgcgcttgtaatccggttacggaaagcataataagaatgataagtgtaatcttcttcatacgagtaaattttaatcgggttgtactaatttgttttgaatatcagttgcttgtgtgattcttaaaagtaaacggagttgacaaatatagctactaatatggctcccaaaaccatagaaacaacaatcatggatagcaggcatacaatgaagtagcccatcatcttatcttccggaacttttagcatgggcttcatcccggtgtacaatatgtaaagtccgtacagcccggcaatgggaaccagaaacgagagtgagggaatcaggtataacacgcctgccacacacatgggggtgtacgaataggccactaccttaaaggcaacgttgaagctgctggtagcttgaaacttgtccgccagaaagtcgattacaaaggccgaaatataggctccgccaacaatacccaggtaggtggagatggcgtgtctgaagccccagcctatggagccggaatggatgccgaatacatttaatccgataaagcccatgccgataaatcccgcaactgcaggtattaatgcgagcacaagcaggtaggtgagcacgtgactgctgtttacatcttcttcatcaatggattgccactctttggcaggtgccagcagcaggttttttgcgcgttgatagatgttcataaccgaatgtttttaaggtgtagataactaaataaatgtataaatgaggtgtggaagcaggttgtaaacacattttctacttgtggctttaatgtgtagataaggagccccggttacgggtatgaatacaggtctgaatgatgcaaatatagaatattaacaggttgtattactaaaaagtttctcctaaatttggttggttattgaaaataaggagcaactgcccaaattgtccgatttaagacaaccgattgtccaactacgcccttttagcaatcaaagagagcgcttcaggcatccttgtacagctcgatcaccaacgtagtggtaagcacaatcccgattcctacacaaacagctatcagcaaccagttgatgaattttgctttgggtttggtgtctttgtgcagatcggtaaggtaatactctttaaagaagaggtacaatgccggaaccgaagcactggccaatagaaagtcttccggaattttaaagaagtaggtcttcgataaaccgataagcgaccagtgacaaagcaacagtataatgaaaagattgctcttgcgggagaacagtaacaacaacccgattgtaaaggtaacgaccgagcagggcattaccggcgacgtgatacccggaaagctaagtccccttgccatggagaaaacaggatagataaaaggcatcagcaccaaaagatatcccagcacgttgtatttggggttacgctccaattgggtgtagccggccaatagatcccacagccaggcaatggccaggatagcccagaagatagacaatacattgttgtagcttctctccgaacagtagatatgatagtaaaccaccgatatccaggtataggtggcgataaagtaaatcttcatccctatctttacccaacgttgcgggttacgcagaagcatcagggtaagaaatacaccgatcagtacgataaagatctgatacatccaggtggcggagttgtactcggcaattgttttccagaaagtattcatagttgttttttatgtctggtaagagaataagcgcggtttggaaacaaaaacataggcagggtggtgcctacggcaagcagaaagatcaccgtacaggtaaccatggtgtttgaaaaaaacatctccatatacttagccctgtccaggggattatccatattctgcaaaaacatcagttgggcaaataccatgttgtaggcaaatttaccgggtaccataggcagcagagccggaatagaaagcaccgtcataggagaatgaatccttttccctagccagatgctgcccagaccgattacaagagcccccacaaaggaagccgatgcaatgttaatacccaccaaagtcatcaaacaataacgacaagcgtgaccggcggcagccagtaaggcgatgtaagggaacgagcgtaacgaaggatcggagattgctccgaatccgattcctgccacagcagcaaagaatccgtctataagaatatctgtaagtatcataacaagctgttttttaccagtaataatgtaaaggaaagtccgattgcaatgcatacgataagcagagccgcctgggtaagtcgggcaaacccggtaagcacatgcccttctacaatatcgatcacaccattgataagcggaacgccgggaaccaggtacagaacgctggtagccagggctatttcggaagtggtatcaaagataacggacgttgaggcgcacatggaggcaacaaaagccgatgcaataaaaattacaaagtgattgatccctttgccggccatctgctgtcttaaaaacaaccctgcaattgtagacgaaaacacgattccaacagaacaccagtcgccgccgaataacttgcagaaagaggcattggcaaaacccaccagaatcaatacaaacagcggattgatacggggagaggagacaatcttccggtacttttctttcaatgtgtcgagagacaaatgttcgtcgaaggtctcccaactcaacgcacttaattctgaattccgttcaaaactgatgggaagcgacgggatgtcgattacttcactgtaattttccctcgtttccagatcaagcagtgtaagaataatacttctctggagtacactgatcttaacagtatatccaaaagactcgccgatacgtttcgtactacgtatcacacgcgaagtatgtaccccacaccccatcatgtgtgcagcatattcggctacaaatacccctacctgcagcagaggttctttttcctgtttcataaaagaagactataccttaaataatctaaacaataacgaatgtcccgggaggactaatagagtgtcttcacgaaattaaatagagggtgaacaatgaaaaaaactgaatcggctgcaaaagtaaaaaaaagatttcagagaggaggcgatgccggcctatttttgagagataatctgcacatcgatgtcccatgtccacttgtcgaagtacagattgccccctttccattccacttcaccccgctggaagtccaccgtctcactgcgggtaaaatgcttttcgggaacaagcggagccgaaaagtcgtcgttcacaatcaaccggtaggcatcaattccgttggagaagaaatagcgggtatcattgtcctcggcaaaaggagggatgccgaacgactgatccacaggaacccatcccacaccctcgaaatatacttccgcccaatcgtgcagattcactccgcccggatgcaacataaacccgctttgccacttggcagggataccgttgagtcggcataaggtgataaacaacaacgacaccatgccgcaatcgccgtgcctgttatcaattacgtattcaggaatattgggaacggtggaatattcgcgtgcactcgcccaggggtaggcatcgtttatataggtaaatatcttacgaactttttgaaggggactgtccccgttgcctacaatatgaccggagagatgccgtatttccggcgtaaacagaacatgggcagcactctctgccgtatatttcttgtataagtcggattccgtatggtaaggacgcagctgttcctccttcaggtcgaaccactcggccgaagatgtaaaacggtaagcaaccgaaaactgggtaggcgtattcttttcggctcttttctccatatacaacgtacgatgcaaggcctcctcaggagcaatctgatagtcggcacaactggcggaaagcaattccacctcactctgtcgccggttatcttcgcgggggtagggaagccagcagcgtatcacctctccatcgggaacagcatccgccttaacagtcagcttataagtaacctcaaagcgtacaggcatcccctgggttgtatgcgacgaacgcaacgtattaatcacctccggcagatgcttttggtttaccagttcggaagccgacaaggaacggccctctttggcctctttcacctttttcgcctccggatcaatgcggaacaggttgggtgcagcctgattaaagtaacacttcttcccgtgcacatacatcacctcaagctccttggactcttcccaggcatccagcatactgtcggtaaccagcggatagtaattttgtatatacgccaccacgctctccttgtcttttcggaaatccagcgcgatacgcctgtgccgttccgtttccgaaatgcgtatggcatccggaacaacctccgtaaccaccttctgctgttggcaggccgttactcccaacaaggcaactatcccaacaatacactgtttcatggcagactgtattaaattttctcgataccgattcccggtaaatccgtaagcgtaattttacccttaaccacctgcatacctctgaacagatcgtttgagataagaagatttccatccaggtcggcaaaatccaccgcaggcgaaagctgggcggcggcagaaactgcacacgaagtctccgtcatacacccgatcataaccttcatccccagcgaccttcccaaggttaacatcttccacgcctcgcgcatgccggtacacttcatcagcttgatattaattcccgagaaggcacccttcaatctctccacatcggccagacgctgcagcgactcgtcggcaaagacgggcaggggactctgagccgtcacccaggcaatgtcgtccaactgctctttgggcatgggctgctcaaccataacacaaccctgctcacgcagccagtgaatcatatcaagcgcatgcgcccggtccttccatccctgattggcatcaatggcaatgggcaagttggatacagaacggatggcacgaatcatctccttgtcgttatccttgcccagttttaccttcaggatattgaactggcctgccacttcgcgtgttttttccttcaccacctcttccgtatctatcccgatggtgaacgtagtggagggagtcttatcccggttcagtccccatatcttataccagggtgcacccaacagcttccccaccagatcatgcagggcgatatctaccgaagctttggccgccgtattacccggagcaagtccgtctacatacagcaggatatcttccaactggaacggatctgcaaattgcgacagatttaccttactcagaaaggccacgaccgactccacagattcccccagatagggcggcatggaagcctctccatatccggttacaccttcgtaggttacttccacctgaacccccggagtggtagttctcgaataactggctaccgtaaacacatgcttaagctgaaggttgtacggacgaaatgatagtttcatattctttttgttctgaatgatcgccggaacacactgtatcccgttgtcggcttgtataaattgaaccgcagcggcactgccggcaagggcaagtgcactggtcttaataaaatctcttcttcctttttccataacaaacttattgaggttggtaaaaaggattggactggatcgtagagatcccctgcgttcctaccgctcccaaaatgcgggtggcacggaggaaacgcttcgtgttataatcgtcgtacaggtcactttcgggatcgaaactgccggtatgtacgttgttgatggaatgaataaaagtcttgtcgcccacatataaccccacatggatgatacgctcattcttatcggcggttgccttttcgccaaagaacaacagatcccccggctgcagattatcataaccggcagatatatccacgggaatacccgtgtgaacctgttgcgaggcatccctctgcaagatcagtccgtgtaaaaatgtaattgtctttataaacccgctgcaatccacccctttggaagaggtgccaccccacaggtaaggcgtaccgttcagggagtaggccgcattgatcagactttcggccgacagattaattcctttcagccattcatccacgggctttgcctcggtggtgcgcacatagcccgtccgtccgtcggggtagctcaccttataaaagctgccttcaacaccctccagtttaagcatacatccacttaccaggtcggatacgggtgtagacctaagatccggtttgctgtaagcagtaccgtaatgcgaaagaaaaatcaccttaggggcagtcatccaggcattgtacacctccctgctaacctgtttgatgtaacccgccacggtccacgcaatataattgtcggccatctgcacccgcagccacgaatccttttggaggatacgcaccggcataccgagcaaggcctgggtagacatctccgaactgaagcgcggtttcgaattcatgggaaccaccgaatgatttacaataccgtaaatggaacccaccaaagcagagtcgggcagaagcctgatactgtcggccacctgccacttaaattgcgcaaacaaattgagagtagcttcttttgccttcttgctggtggtaaccccttttaggataagcatactgtccgttaccacaggcactacatcaaatacatccgtacgcttgtcggggataatggaatcagacatcagagtaatcatagcttcagccatctcctttttctgttccggagagatgctgcaagcataaaatatgcaggacgccaaccctaagcatatacattttacataattcatacgatctaaagttagaagtaaatcaatttaaatttcaacaaagttattaaaatagattaatttacctctttttgagcataaaaaaagggtaataaactctttcaaatttattaccctcagattagtcgggataagaagactcgaacttccgacctccacgtcccgaacgtggcgcgctaccaactgtgctacatcccgctaattcaatacggctgcaaaggtacaaacattttcaaaacttcaaatatttagcactaaaatttttacttatgcagttaaattcccttggcccgaagccgatgtaaaaaaagatatatttattttaacagaaagtttggagatataaaaaaaacgcttacctttgcacccgtaatgaaaacgatggtgccatagctcagttggtagagcaaaggactgaaaatccttgtgtccccggttcgattcctggtggcaccactcaaaaagaagcagttatcaaacagatagctgcttcttttgttatgtccgggtgcatagaaccacctttccacgaaggtgattctttgcaaaactactagatagccaattcctttatttctctgatgtggaggtgcaggtgatccaggtagccatcaatcatctctttaagtgtaacttttgtcccttcaaaatcgcaccagtagctatccagcttcgatagatctacggaattaatcacctggacgatgtgaagattaaaaaacttccacagttgaatcaggttttcccaatcggcattttgataatcttgtaaagcgatccacaaatcattgtcctggcgatagtcgggaaagaaaagtaagtccttacaatattgcagcctaaccatacgctggtgattgttagaggcagaatctaccaggtgccccagtatctgtttgatggacctattctgtccgttccgcctgagggtaatcacatcaaccggcaaagcacttaagaatccctcttccgcatcaattacttttttaatgccgtcggttattactttaaaatcatttccttgcataacattcttaaattagtattaataattggtctttactcattcttgcatgctccgcactgtgttgccgttggagaaactgatccgtagttgcttgcaggttgctttaccatccaacgcattggcatctaccgaaacaacctcataagaagtggtaaatggagacccgggcgtttttccgaacatctgcgaagaaaacatctccagtatttccggacggcggatagactcccactgctttatagatttaatttgctttccttttgccgaaaccaggagcggcggcaactcataaacaggaactttggattcatcgtagttaggttcaatccgctgtgccaccatggatatgaagattccggtaagcaacaaagtagtcaaaatcagctttatcataacaaagtatttaattaaaaggatatgcaaatataggaaaaaactattgctatagtttctctcaagcgattaactattttatataaagattagtcggtacatttttgtgaaaaagtatatactttgtggatcatttaatatgagttttaaagttgaaagtcctcaatatttttcaggacggatcataaacttaaaaaatagcgaaaacatctgtcatccatcatttatagagcttaacagtcagtttatcagtgtgttaaaaaatgacagatgcctaaatcatctgtcattttatctttcatctatcatgccgcgaaaatcgaccctttaaacgaatttagactattattgtattgatatacaattgaatacaagaataaagaatgagcgtttaagaccaatcatttcctaattagaaaggtgcaaattacatttactattacagcatttatccccaacacaaaaggaaagtaatccaaatacagcgaagacgtatcattttgacttataatatctaatcgttggaccatggttcaacgatatctcaaccatggtccaacaataagtagaccatggtccaacgaaagattgaccaaggtccaacgattagttattcgtattgttagtaattaatcttcgtttatataatggttaaaggtaacaaggaatatgactataaattaggttgttgcaattgatctattacgtgaataatgcatcaaaagtgaaagataatttgtaaagtgaaacataaagtgaaggatattagttgaaaagtgaaggatatttattttaatatttaggataactgtctgtaatctagttggatgagtttgcgagtgaaggaagtgaaggatattttcgcaaacttattgagaatatgatacacaacaaaggcgagttgccccgccttagttgtaaacacaacggaataatccttattgtgattagcttaaattgtatgcagcaaaaataatgtttattatttaatttacaaataaatatggaaataatttgtaaaattaattctattgattagttttacaattgacactattattttgtaaaattaaattgaaaaccatgaataaaattttaggacttgatttaggaacaaacagtattggatgggctattgtgcagaaagatgagcaaggattttatgaaaaaattattaatgccggaagtcgtatcatacctatggatgcagaaaccatgaataatttcaataaaggaataaccaaatccccagcttcagaaagaaccaggtttcgtggtgcaagaagattgattgaacgttcattgttgagaagagaacgtatccatcgtctattaaatacgatgaactatcttcctccccattatgccgaaaagatagattttgtaaatagattaggaaagtttattggagaagaagagcctaaatatgcttataaggtggatgaacatggaaagttccaatttatattcaaagaatcttttaatgaaatgttgaaggattttcaggacaaacaaccagaactggttctcaataacaaaaaagttccttatgattggactatatactatttaaggaaaaaagcattgaatagggctatatccaaagaagagctagggtggattattctccaatttaacaataaaagaggttactaccaacttagaggtgaagaagatgaaacactcacggagggtcaaaaaaaagagtattttgccctaaaagtaattcgggtagaagcagatagctcttctgccgggaaaaaaggagaagtttggtataatgttcaattagaaaatggatggatatataggtgtaaaagtgaaattcctttagattgggaaggtaagattaaggagtttattgttacaacggaggtagatgaaaatgataatgtattaaaagataaagaaggtaaagaaaaaagaaaattaaagattcctgaagccggtgactggactttacttaaaaagaaaacagagtctgatttagataagagcggaaagaccgtcggtgcatacatttacgatacacttttaagtaacccggatcaaaaaattaaaggaggattaatccgtacaatagaacgtgaattatatagatctgaacttgaacaaattttggataagcaaaaagaattccatccggagttaaaagatggaaccctttacaataaatgtgtagaagaattatatagaagtaatgaatcacgaagaatctctttatcaaattatgactttacacgatttattacagaggatgttattttttatcaaaggccgcttaaaagcaaaaaatcactgattgacaactgttcatttgaaaggcgtaactatctgaacccaattacaaaagaattagcttatgcacctattaaatgtattgctaaatcacatccattgtttcaggaattcagactttggcagtttattaaaaatctacgaattatcgaacgtgaaaaaatagtaggagataagctgatgtttgaccaagatgtaactacagagtttctccctacccagaatgattatgttattctttttgattggttaaatgaacacaaggagattgatcaaaaggctttgctaaaatatccagcatttaatttaaagaagaatatagataagtatcgttggaattatgtggaaaataaatcatatccttgtaatgaaacccgtgccttattgaaggcaaaactaaataaagcaggtaatattccatctgattttttagataacgatacattagaatcattatggcatattctttattctgtggaagataaattcgaaattgaaaaagcattaaagtcatttgccactaaaaaagaattgagagaagagcagacggtagcttttgttaaacagttcattaatattcctcccttcaaaaaggaatacggatcttattctgctaaagcaattaagaaactacttcaacttatgcgtatgggaagtcgctggtccgaaaacgagatatcagattcaacaaaggatcggatccaaaagttgattgacggcgaatgggatgaatcaataaagacaagaacaagagataaagctataaagttaaatgaaataaatgattttcaaggtttaccactatggcttgccagctatattgtttacgatcgccattcggaatctggtgatgttatgaaatgggaaactcccgaagatattgattattacttaaaacatgtgttcaaacaacacggactccgaaatccgatagtagaggttgttgttgtagagacattaaaagtggtaaaagacttgtggaaaacttatgggtactttaatgaaattcatattgagttgggaagggaaatgaagaatccagccgataaacgtcggagtatgacaaacaaaaatatagaaaatgaaaatacgaatttacgaataaaagcactattagcagagcttgccaatcataaagacgttgaaggcgtaagaccctattctccttcacagcaagaaatccttaagatatatgaagaaggggtcttagatatgctaacaaaggaagatccggattatgaatccataagcaaaatatctaaaatggcgctaccgtcatcgtcagagcttataagatataaatgttggcttgaacaaaaatatcgctcaccttataccggacaggttattcctttggctcgtctgtttacttcagaatatgaaatagaacatattattccacaatcccgttattttgacgactcattttctaataaggtaatttgcgagtcggcagtgaataaagacaaagataatctgttggcatacgaatatattaagcaaaatgaaggcaaaataatagagattggtttagggaaaaaagtaaagctgtttactgcagattcatataccgagtttgtccaatctaattatgtgggttctgtggcgaaaaagaaaaagcttttaatggatacaattccagattctttcataaaaaggcaattaaatgacagtaggtatataagtcgtgaaataatgaaattattgtcgagcgtggtaagggaaaaagaggaagaagaggaagaagaggaagaagaggccatttcaaaaaatgtaattgtatgtacgggagcaataacagataagttgaaaagagaatggggtctgaatgatgtttggaatacaattatttacccacgttttgaaagattaaatcagctaacaaacagtgataaatttggacaatgggaaaataaacagggaaaaaaagtttttcagattgagatgcctttaaaattgcagaaaggattcaacaaaaagagaatcgaccacaggcatcatgctatggatgcaattgttattgcgtgtgcaacccagagtcatgtaaattatttgaataatgaatctgctcattcaaattcgaaagaaaaacggtactatttaagaagaaagctaagacgtatagagattttggaaaaacaggagctaaaggatggtgttactattacgaaaaagatcgaggttgcgaaagaatttaataagccttggcctacatttactcaagatgctcatgaagttcttcagtctattatagttagctttaaacaaaatctacgtgtagtgaataaagcgactaatagatatgcttgttttgtcaatggaaaaaaagaaattgtaaaacaatcaaaaggagagagttgggccataagaaaaccaatgcataaggatacggtatcggcagcagtatctttacgtaaaattaaaacggtaagtcttagccaagctattgatgattggacaaatattgttgataaatcattaaggaaagagatcggccttctttattctaaatatggacaaaacggtagtaaaaatattattaagtattttaaagatagggataataaacacaacggattggatgtgtcgaaagtcaatgtccattactttgataatgattatgctgcttctcgcgttgcactagatcataaatttaattctgccaaaataaaatctattacagacacaggcattcaaacgattttattaaaacacctggagtcctataatgagattaacggggataaaattattgagcatccggaacttgctttttctgcagatgggttagatattttgaatgctaatattactaaattaaataatggtaagtttcataaaccaattaaaaaagtgagaaagaccgaaacattgggcttaaaatttattgttggtcaaacaggcaataaaagaaaaaagtatgttgaagctgctgacggaactaatttattttttgctatctatgtatctgtcgatggtattagaagctataaaactatcccattaagggaagttgcagaaagattaaaagaaggtttaattcctgttcctgaaaagaatgataaagatgatcacttgttgttttggctttcacccggagatttagtatatgttccatcaatagaagaagaggggcgaattgttgagattgagaatattaagcaagatcgaatttataaggttgtttcatgcactgaaaatgaatgccattgtattcctcactttgtagcatcacctattgtaaagacggacgagcttggtgccaataacaaagctcagagagcttggagtggggaaatgattaaagaaacctgtataaaaattaagatgaatagattaggtcaaatagttaagatatgattaagaagacattgtactttggaaatccggcctatttaagtcttcgtaattctcagcttgtattacgattgcccgaaatagaaaagaatgatacggtctccgatttctttaagaaggaatcggaacgtaccattccaattgaagatattggtgtaattatattggaccatcaacaaatcacaattacccatggactgttagaaatgctacttgataataattgtgcaataataacatgtgactcttcacatcttccggttggactaatgttgcctctgtgtgcaaatacaacgcaaagtgagcgattcagagaacaaatagatgcctctattcctcttaaaaaacaactttggcaacaaacaatcaagtctaaaattgagaaccaagcttctcttttggaagaaaagagaaaggtgatagttaaaaatatgagaatatgggctaatgatgtaaaaagtggagatcctgataattatgaagcgagagcagcggtttatgggagtgtaatttaaactctgtctggttcatatt

SEQ ID NO: 1392 - DNA, 15100 bp, synthetic construct
  misc_feature 1..15100: note = Synthetic
  source 1..15100: mol_type = other DNA
actatcacatagcaggatattttatatctttattgcctatttataatcatgattggatacatatggacatagatttcgaatcatacatccgtggtagtgagcccgacaaaaaagaaaaggcttcagcttggaaaacagccattggtttacaagctgtagatggcttgcaaacatccgattatttaaaagatacagctataaagcatttgcgtagcatcggttttgacgtgaacaatgatctgtttgccgacaactcttggtactttcgcaatgcgctggttcgtgcgaattatagaaatgtgcgaaaagacgttgaaccggatatgagtttcttgatcgcatttttcagaaacttaatgatgggagaaaatcatgaccccacaacagctaaccgaacagttcagcgcaccgcttttagctatcgtaaaggctatcgggacagaacaatgttcattgaaagtaaaaagtgattacaaacaatttgcatagataaacgaagaatgaaaacatccatcaattaccttcccgaacagaaacgggatgacctcagaagaattgtagagtgcgtactggaagtacttcccgattgtgagatgatcattctctacggaagttatgcccggaatacatacgttgactacgaccaacgcatcgaatacggtatccgcacctgttttatgagcgattatgatattttggtagttaccagtacccgtttccaaagatatattatcaatcacatcttgagtaaggccaccgataattactacaaagggaagaacagatacgtatccaccaccgtacagtttatagacgaaagcatcgacgacttgaataaagccatcgataaaaaccgatatttctataccgatatcaagcgagaaggtatcatgctttacaacagcggccgttataagttggcccgccgtcgtaaactgaactatcgcgaaataaaagagttggcggaggagtattacaacgacaggtttgaacgtgcgaatagtttcttacgtagtgcccgatattcatacaaggatcaggattacaaaatagcatcgttccaccttcatcaagcttgtgagaattattacaacagcataatcttgacttttacattgtatagccccaaagagcatagcctaataacgttatccggcagagccaaaacgcattccctagaatcatccgaagcctttccccgggatacggaagaggagaaacgacttttcgacttgctgcaggacgcatacgttcaagctcgttataatttacacttccgcgtcactaaagaagatatcgaggcgcttatacccaaagtagaacggctccgggatatcacgcgacaatgttgcgaggagagaatcaaggtgtatgcggcaaaacaaagacaggtttgatgagattcccctcaatcgccacctttataaccccatccaacctgttttcgaagatacggtaagcctcctcaatctcgttcaatggaaacttatgggtaataagaggcgtcgtgtctatcttaccttcttctattaggttaagaatctcggcgcaatcgcagccatccaccccaccagtcttgaaagtcaagttcttgccatacatgtctggcaaaggaagaagctgaggtttatcatagagggctacgatggtgacaatggcgttcggacgggcacaatcccatgccaagcggaaggtatcctcactccccgcgacctccaatacgacatccgcaccgccatgatcgctgttacgaagaacaaattccttacagttttcgggatctgtcaccaagacttccggataacgctggcgaacgaaccgggccctttccggagacttctcgcaaacaataatacgtcgtggcttcttcaacaacacgcacaacaaagtacagatccccgtaggaccagcgccaataatgaaaaccgtatcctcctctgagatctccgagatgcgggcagcccaaaaacctgtcgctaacacatcaccgaccagcaaagcctgctcatcactgaccgtatctgggatatgattcaagcctcgatccgcataaggaacccggacatactccgcctgccccccatcgacacgacagcccaacgcccaaccgccattgggatcggtacaattattgacatatccacgccggcagaagaaacactctccgcaaaaggtctcgacattcacggtcaccctgtcacccggcttgactgcagtaacatcggcacccaccttttccaccacaccaaccatctcatgcccaacggttattccgggtaccgcacgtggtacgctaccgtgtttaatatgaagatcgctagaacaaatgctacccaaagtcactcgtacaatagcgtcccgtgaatcctttatttccggtatcggtttctcccgcaattcaaatttcccttgttcaatataagtgtacgcaagcatgatattttcttcttttagttaatcgccttacaaagataaggatcgtatcgctaaaaatatcagatatatctgtaatttgggtacaaactgtttcatttttctctcctatctttatcgccataaatacatagcattctcgtaatgaatataaaaacaacaaaaattcaagaagtatgaaacgaatcgtattattcatggtcatggtctcaatggtatgtatcgcctcttatgcgcaaaaggctgccgaagggacaaaagttttagtggcttacttctcggcaacgggaaatactgaaaaagcggcccaacaagtcgcatctattgtcagcggtgatcttcacaagatccaacctgagaaaagctatacctccgccgatctgaactggcgggataaatcctcacgcagcagcgtagagatggacgatccgacatcacgaccggccattatcgatgatttgaagaacctagcggagtatgacaccgtttacctaggatttcccatctggtggaatcaagctccaagactcatcaacacctttttggagaaatacgatctctcgggcaaaaccgttatcccattcgccacatcaggcagcagcaatatctcgaacgcagagagtgaattgcggaaagcctatccggatgtgaactggcaaaaagggaagttgatgaacggagcgacagaagaagatatcaagaattggactaaaaaataaatgattatgagaaagaattttggtgcgaagcctttgagctatccgcaacccgtatttattatcgccacgtatggagaagatggaactcccgatgcgatgaacgccgcttggggcggtatcagtgagatgaatgagatcagcatgtgtcttagcgccggtcacaagacagttaagaatatcctgaagcgtagagctttcacggtaagcatggcagatgccgatcatgtcgtggcttgtgattatgtaggcatcgtgtcgggcaataaagttaccgacaagtttgccaaagcaggatttcacgctacaaaatcagacttcgtagatgctccgttgatcgacgaattggccgtggctatcgaatgtaaattgaaagattacgatccggatacttgcatactccgtggcgagatcgtaaatgtcagtgttgacgagcgtgtacttgatgagaacggcaaggtgaatgtagctaaagccgctcccatcatctttgatccattcaacaacgactatttgagagtgggcgaaaaggtaggaaatgccttttccgatgggaagcaactgaaaacataaaagaaaagtctatctaaagttattatatatgtaaacttaatttatatttgcactatggaaaaaaaatgaatattatgcaagcaaatcctaagatcgggagtatggacgctgtattagataaattatacggcaaggttggctcaccagaaagagaggagtttcgcaaagaagcatattcttattgtgtggggcaaattattagtgacgcacggaagcaagagaaaatgacacaatccgagttggccgaaaaagtaggaactaataagacctatatatcaagaattgaaaaaggaatcatagaaccgggagttggtttatttttccgtattattgatgcgcttggccttaaaattgaaatcgtaaagcctatcatgtgagcaaaaggaactctctcagatcgcctctgttaagattgttttccaatatgagtaataaaaggggcaaaggcgtaatcactacggctttacccctttatacatcagctcatgaaatcaatttagagatatcatacccacgttccgttatcttccccagtaaatcttcccgaaccgcctccggtaagttcctctcacggctcaagatccagaggtatttatccgtgctgcttcctatcaccgcatattgataatccgcatcaagttctaagatataataatccgcatagaaccataagaagaaagccactttcaattttccgggattatttttagggtccggttgtttcgcacgaccggtggctttcttgtgaacgccgcctttatatccttcgttctccacacggatctttccgtccggaagcaacgtatacgtggccgtcacatccgtcatgcctctctcaaaatgattctcataacgggcgatttcataccatcgccccatataccgtttaacatccagttccggtacggtatgatgatctgttatattcataagtttctctattgttggataaatgtatgtaaacccagattcctgtaatttagagggatggacggtttgcccttttgtcacgaacgacgctccctcgccaaacttcagccgaaaaaagaactcaggcaaagggatgatcctacggatcttatccgctctcgctaacgtatgagccaactgcttttgggtgataaggtctggagaaaccaaatttaccacccccctcatctgcctattccgtatgatatacccaaaagagcggcatagatcaaacagactgatccatggaaaacgctgttgcccgttaccgatcacgacacttacccgtgagaagcgttgcaaacgaagcatctctttcaaggcccctccatcctcagacaatacgacaccaaaacgggtaatgacaagcctcacatccgatgagcatgcggacgcttcctcctcccacgccccacacaaccgggccaaaaaatccattccccggcaatcatgatactcgtcatattccccgaaagccggataataacctacggcggaggccgaaataaacaactcaagtttcacgcttctcgtgtttatggcatgcaccaactgtctggtcacgcaaatacggctatcatacaactcttgtttgtaagcctccgtccaacgtttattaatggaagcgcccgccaaattaatgacgacttcacaggattccacgcatcggcataattcatcaaaacaatcttccttaaacaaatcccgccctaaagggataacatcatatccttttccctccaaaaaagatgaaagatgctgaccgatatatccgcttgccccgctgatcgctattctcataatcaatacttttctattaaaacaaatccacaagcaatttagatggcaatttccggttctattttagtatcccaaacagaatatcgactaaaagaaatcggttcgacagaaaacaactatatttgtcctcatttaatagtaactgaatcatggcagacaattatctggaaaataagtacgcagaataccaagctcggaagacttccggcactagaacggggcatacaacgaagacacttcataaaacaagaagagtcttcatcaccggtggagccgaggggatcgggaaagcgattgtaagggctttcagaggagccggacatcgtgtggccttctgcgacaagaacgagaccttaggaaaagagactgccctacaaaccgggacacaattccatctcgtggacgttagtgataaaaccgcactagaagattgcctgcgaaagatcatcgaggagtggggagatattgatatcattatcaacaacgcaggtgtcagccagttctctcccatcacggaaacaagcgtagaggatttcgacaagatactatccataaacttacgcccggcgtttatcacctcccggcgattagcgctccatcggcaatctctcgatacccccaatccatacggcaggattatcaacatctgctctacccgttacttgatgagtgaacccggtagcgagggttacgccgcctctaaaggaggtatctattctttgacgcatgcgttggccttatcgctctcggaatggcatatcacggtaaactctatcgctcccggttggatacagaataacaattacgaccagcttcgtccggaggatcatgctcaacatccgtccggaagggtgggaaagccggaggatatcgcccgtatgtgcttatttctctgtcaagaggaaaacgatttcattaatggcgagaatattacgattgacggtgggatgaccaagaaaatgatctatctcgactaaataaatatccgtatatgacacaaacatcgaacatagaaaccaaccgtcttgtgctccgtcctttcagcgaaagcgatgctcctgatgtttttgagagctgtaagaatccaaacctaggcaataacgccggatggaaacctctcgaaacgatcgaagagactattgatgtactaaataccatatttatcggaaaagaaggggtttgggctatcgtatcaaaagagactcaacaagtcatcggctccattggcatcattcctgatcccaaaagagaaaacccacatgctcgcatgctgggttattggctaaaagaagagtgttggggacaaggcttcatgacagaagcagtgcaatccgtattgaattatgggttcactcaaatgaatttacatttgatcacggcgaattgttatcctcacaatcaacgctcacaacgtgtattagagaagaatggattcgtatacgaaggacggcttcatcaagcagaactaatgcatactggacaaatagaggatcatttgtgctattatcttgaccatcattccttttcaaacaaaaacaatagtttatgatagtagtaacaaaagatttatatacgctcaggagttgggaaggtcaagatacggaatccttaaccttgcaccttaataacaagaagatctgggataactgtcgggatggattgcctcatccttatacaaaagaaaatgcccgctgcttcatcagccaagcacgaaaaaaaactgaaatatcggatttctgcattgtggttcatggtgaggcaatcggcaatataggttttgtgagaggaacggatgtggaacgtttcaatgcggaagttggttattggatcagtgagagatattggaaccaagggattacctctgaagcgttagccgatgcgatccagtattattttgagcatacggaggttattcgtatattcgccacggtgtatgaatataatctggcatccatgcgggtattagagaaagtgggattcaagaaaactggcatcttccgaaaagcttgttacaaaaacgggcgattcatcgatgcgcatcattttgagatcgtagcggatgagaaattagttgggaacaaagacttataatccatttatgcaaataagacaattacaggtaaacgaatacgatagggcattaaccttgtctttggacgtgttcatccaatgtggcaagagtgacttcgacgaagagggattggaaaccttcaagagtttcatttacaataaggatctggtaaatgagctaaccatttacggagcattcgagggtgagtcattaataggtctaatcgctacaaaaaatgaaggaaagcatatttccttattcttcatcacgcctatgtatcatggaaaaggtatcggcaaacgattattcgaggccgctatccaagataagccagtctcggaaatgacagtcaactcctcttcctatgcaatcccaatctaccggaaattcgggttcgaaccaatctgcgaagaacaaactacacatgggatgaagtacaccccgatgaagcgaacgatagcccgtccctccttcgaggacttcaatgagcttcttctgctttgggaagcgtccgtacgtagtacccatcatttcctaaaagaagaggatatcttattttataaagaacttgttcccggatatttcccattggtagaactttatatcatccgaaatgagcgaggaaagatcgccgccttcatgggcttaagcgatgagcttatcgagatgcttttcgtacatccggaagagcaaggcaaaggattaggtaaacgacttatccaattcgccttgcaagagacacccatccgaaaagtcgacgtaaatgagcaaaacacaaccgcacttcatttctatcagcatatgggattccaagtgataggaagagacgagacggattcctcccacaagccattcccgatacttcatcttcaagttacacttccttaaaaatttaaggtaatcgtgtagcctatcatgactatatgcgtagcctaacgaaggcattcttatcaaaaaacaggactagttacacataaaaaaagcccaccgataaaggacgatgggctagaacctaaatgttttcacaacggaataatccttattgtgatttgcttcaaattagtatagcaaagaaataaagaatatatttataaagcaagtatttcttgataatttattttatctttgaaaaaatcgttaacacaatactagtcatgaaaaaaatagtaggattagatttaggtacaaatagtataggatgggcattaatcaatgcttatatagatgaatataataaagaacacttatatggtatagaagcttgtggcagtcgtattatacctatggacgcagccattttaggaaatttcgataagggaaattctatctcacaaactgcggatcgaacaagctatcgtggtatacgtagattgcgtgaacgccatctattaagacgtgagcgcctgcatagaattctcgatttactcggctttttaccaaagcattattccgattctctcaatcgctatggcaaattcttaaatgacatagaatgtaaattaccttgggtaaaagacgaaacaggttcttacaaatttatctttcaggagtcttttaaagagatgttggccaattttaccgaacatcatcccatacttatcgcaaacaacaaaaaagtaccctacgattggacgatctattaccttagaaagaaagcattaacacaaaaaatatcaaaagaggaactcgcttggattcttttgaactttaatcagaaacgaggatactatcaacttcgaggtgaagaggaggaaactccaaataaactagtagaatattattcattgaaagtagaaaaagtcgaagactcgggagagagaaaaggcaaggacacctggtataacgtacatttggagaatgggatgatttaccggcgcacaagtaatataccattggattgggaaggtaaaactaaagaatttatagtcaccactgatctagaggctgatggtagtcctaagaaagataaggaaggaaatataaagcgttctttccgtgcgccaaaagatgatgattggacattaattaaaaagaagacggaagcagatatcgacaagatcaagatgactgtcggcgcttatatttatgatacacttctgcaaaaaccagaccagaaaatacgtgggaagctagtacgtactatcgaacgtaaatactataaaaacgaactctatcaaatactaaagacccaaagtgaatttcatgaggaattacgagataaacagttatatattgcttgccttaatgagctttatcccaataacgaaccacgtaggaatagtatttccacacgagatttctgtcatttatttatagaagatatcattttctatcaacgtccactgaagagcaagaaatcattgatcgacaattgtccctatgaggaaaataggtatattgataaagagagtggagaaatcaaacatgcatccattaaatgtatagccaagtctcatcctctctatcaagaatttcgcctttggcaatttattgtaacctacgtatctacaggaaggaaacggatgttgacgtaacacaagaattactccctaccgaggctgattatgtcactttatttgagtggctgaatgaaaagaaagaaatcgatcaaaaagccttttttaaatacccgccattcggctttaagaaaacaacttcaaactatcgttggaattatgtggaagataaaccttatccctgtaatgaaacccatgcacaaataatagctcgtttaggaaaagcgcatatcccaaaagcttttctttctaaggaaaaggaagagacattatggcatatattatattccatagaagataaacaagaaatagaaaaagccttacactcttttgccaataagaataacctaagcgaagagtttattgaacaattcaagaatttccctcctttcaagaaggaatatggctcttactcggctaaggcgataaagaaattgcttccattgatgcgaatgggtaaatattggagtatcgaaaacatagataatgggacaagaatacgaattaataaaattatagatggagagtatgacgagaacattcgtgagagagttagacaaaaagctattaacctaactgatattacccattttcgagctttgcctttatggttagcttgttatctagtttacgatcgtcactccgaagtcaaggatatagttaaatggaagactcccaaggatatagatctctatttaaaatcgtttaaacaacattcgttacgcaacccaatcgtggagcaagtgataacggaaaccttgcgtaccgtacgagatatttggcaacaagtaggccatatcgatgagatacatattgaattaggacgggaaatgaaaaatccggcggacaagcgtgcccggatgtcacaacaaatgataaagaacgagaataccaatttacgcataaaagcactattgactgaatttttgaatccggaatttggaatagagaatgtacgtccatattcccccagccagcaggatttattgcgtatttatgaagaaggcgtactaaatagtatattagaattaccggaagatataggaattatattaggaaaattcaaccaaacagatactctaaaacgtccaacacgctcggaaatactacgttacaaactatggttggagcaaaaatatcgttcaccttatacaggcgaaatgataccattaagtaaattattcactcctgcttatgaaatagaacatattattcctcaatcacgttatttcgatgattcacttagcaacaaggtgatctgtgaatctgagataaataaattgaaggataggagcctcggctatgagtttattaaaaaccatcatggagaaaaggtggaattagcttttgacaagcctgttgaggtactttccgtggaagcctatgaaaaacttgtgcatgaatcttattcacataacagaagtaaaatgaaaaagttactcatggaagatattccagatcaatttatagaacggcaactcaacgacagccgctatattagtaaagtagtaaaatctctgctttctaatatagtgcgtgaagaaaacgagcaagaggctatctccaagaatgtcattccttgtacaggaggtattaccgatcgattaaaaaaggattggggcatcaacgatgtttggaataagattgtacttcctcgtttcattcggttgaatgaactgactgaaagtacccgtttcacttctatcaataccaataatacaatgatcccctccatgcccttagagttacaaaagggattcaataaaaaacgtattgatcaccgccatcatgcgatggatgccattatcattgcatgcgcaaatcgtaacatcgtgaactatctcaataatgtgtcggctagtaaaaacacaaagataacacggcgagatttgcaaaccctattatgtcacaaggacaagactgataataacggtaattacaaatgggttattgacaagccttgggaaacattcactcaagatacattgacagctttgcagaaaataacggttagctttaagcaaaatttgcgtgtgatcaacaagacaacaaaccactatcagcattatgaaaatggaaagaagatagtctccaaccaatcaaaaggggatagttgggctatccgtaaatcaatgcataaggaaacggttcacggagaagtaaatttgcgtatgataaaaaccgtatcatttaatgaggccttaaagaaaccacaggcaatagtagaaatggacttgaagaagaaaatactcgctatgctcgagttaggctatgacactaaaagaataaagaactatttcgaggaaaataaagatacttggcaagatattaatccatcaaaaatcaaagtctattactttacaaaagagacgaaagaccgctattttgcggtgcggaagcctatagatactagtttcgacaaaaagaagataaaggaaagcattacagatacaggtatccaacaaattatgcttcgacatttggaaactaaagacaatgatcccacattggcattctctccagatggtattgatgaaatgaaccgtaatattcttatattgaataaaggaaaaaagcatcagcccatttataaagtgcgtgtctacgaaaaagctgaaaagtttactgtaggacaaaaagggaataagcgaactaaatttgtagaggcagcaaaaggaaccaacctgttctttgctatctatgaaacagaagagattgataaggatacgaaaaaagtaatccgtaaaagaagttatagcacgattcccttaaatgtagtgatcgaacgccaaaagcagggactttcctcggctcctgaagatgagaatggtaatctacctaaatatatactctctcctaatgatctggtatatgtaccgacacaggaggagattaataagggggaagtcgtaatgccgatagatagggatcgaatatacaaaatggttgactcaagtggcattaccgctaatttcatcccagcttcaacagccaatttgatttttgctttacctaaagctactgcagaaatctattgtaatggtgaaaattgcattcagaatgaatatggtattggtagtcctcaatctaaaaatcaaaaagctataacaggtgaaatggttaaagaaatatgttttcccattaaagttgatagattaggaaatataattcaagtaggttcatgtatactaactaattagattttatcctatgattaagaaaacattttattttggtaatccagcttacctgtcacttcgtaaccagcaattagttattaagttaccggagatagtaaagaatgatactgtgcccgaaagcttcaaacgacaatcagaaattactaaaccaattgaagatattgcagtgatagttcttgacaacaaacaaattactattacccagggtgtattggaagcattactagagaataattgcgcagttattacatgtgatggacgaagtatgccagtaggcctcatgcttccgctttatggaaacacgacacaaaatgagcgctttcgagatcaattagacgcttccttacctttaaagaaacaactttggcaacagactattcaagcgaaaatcaacaatcaagcatcagtattatgctcttgtaaaaacgaagaaataaaatgtatgcgaatatgggccaatgatgtacgtagtggagatcctgacaatttggaaggacgtgcagctgcttattattggaagtatctgttcggacacatagaaggttttacaagagatcgggaaggtatacctcctaataatttattaaattatggttatgctatccttcgtgctattgttgcacgtggactagtcacaagtggtatgttacccacattgggtattcatcaccataaccgatataatgcttattgtttagctgatgacatcatggaaccttatagaccttatgttgatgagcttgtatttggtttaataagaacaaagggtatatcacccgaaatattaacaagagaatggaaagcatcacttctttctattcctacattagaagttaagattggaggtaaacgaagtccgttaatgatcgctgtcgctcaaacaacagcctctctttacaaatgtttcagtggagagcaacgaagaatcgtgtatccagaacggtaataatcatggatcgatttagcgaatatcgtattatgtgggtgttggtattatttgacttacctacggaaacaaaaaaagaaaagaaagcttatagtgatttccgtaagaatctgcagcgtgatggctttaccatgtttcagttctctatttatgtgcgacattgcgccagccaagaaaatgcagaagtacacataaaacgagtaaaatcatttttaccagaacacgggcaaataggaataatgtgcattacagacaaacaatttgggaatattgagttgttctatgggaaaaaagtacaacctcctaatacacccggccaacaattagagcttttctagaaataataaatcccgtcataaaacgggatttattacattggaaacttttcttttttattttctaaccattctatcatctagttgatatacagcatataatacagattgagatgtttccaatggatcaaagatactaatttgaaagcaaatcacaacgcgaatggcaagaaaacctgttgacgctgagatgtttccaatggatcaaagatactaatttgaaagcaaatcacaacgcttcatcgagacaccgtatttcgttgaacgatgtttccaatggatcaaagatactaatttgaaagcaaatcacaacacgtcaaggatatgacactatttcaaaccgatgtttccaatggatcaaagatactaattcgaaagcaaatcacaacaccttattgatagaccatttaccaaatatagatgtttccaatagatcaaagatactaatttaaaaacaaatcacaacacaagccaaccgtcaccattcgccccaagactgtttcttagactgcaaagttactacaaaaaagtgaaatgcgg

SEQ ID NO: 1393 - DNA, 15040 bp, synthetic construct
  source 1..15040: mol_type = other DNA
  misc_feature 1..15040: note = Synthetic
atctttttacttgctcaatgcaccaaggcatttggtcgcgaacttgttgcacccagaaacgcattacatcccaaccttcacgcatcagggcttgattacgcaattgatctttgtaactgagttctcctgtccatgcctgatgatacatagctccatctacttcaatgtctaacttctttccattatggaaaagagctaaatcaagataatatttgtccacatgatattgtgcagtgaccgggatacctgcatcagacagagctttttgcagaatatgctcccattctgacttttccacaggagcattttctccactactatattcagcaaagtgttccaaataacttacgccgcaatgcttacagtattgtttatctcccacggaaacaagaagtgcccgagcgcgcgtaatggctacattgaataagtttccggtcgattttaggaacatgagactttgtgactttgttccttcagatacaacaggtgagaatatgattacgtctctttcgtccccttggaatttatgtactgtatctatcagtatttgattatgcacttccaaatggtttcgtaattccgcatctctttccaacgctttggtaatcatttctgcttgtaaatggaagggagtagttactcctatacttccttcaaactccagttctaccgctaaccgtcggagaattcttataacactttccgcttctttaagattatatgcaccaccagattccggacgaacggtttttcctttgacatccatccatcgcataccaagaataggtcctttcccatcgttaggagattgcaaacgactataatctgtggctatacgaagtgtattgtcataaaattcctgattagagaattggataatatcaagaaaactccgatggtggtcgcgtagttggatgatattttccgattctgtcatactttccgccaaatcatatatcgaactgctacgataagaccaccgggcttcaatatcattgctgagaatgagtgataaatctgtttgtttgctcaatagacaaatgtgattcaactgttgcttgtcaccaattaccgccactcgcttagcgcgcataagcaacggaatcatggaggcgatatcgcattggcttgcctcgtctataatgagtaaatcataaaccgcttctttgaaaggcagtcttctgcgtgcactaagggatgtgatagcgctcacaggcaacatagatttcagtgcaggtgtgtacgaatctacgtggtcatgttcaagcagacttaaatagttgtgcagttctgctcgattcttggcattaaaaatgctgatatgctcatttagccatgcattccatgcagtctttgcttttgcttgtagttccacttgcgcacccatcatagaagcgtcaagttgttcaagtgaggcagactcgcaaacctcttttaataaactatcataagtggcaatcacacttaaatcatccattagcaatttgaaactattatcaaactgcatccattcacggtcatttgcagaacgagtgagagatagtccttgttggtatttcctcagaaatgaattaaccgtttctgctgcaacttcactacggtcagcagttttattcttccacctattcctgaagattttgtctataaaacgagtaggaccatttttcaaagcggttctacattggacgaaatctttatatgcactccttacttcgcttatttcattttcatttattatgccaataacatgctgatatttatccctgattgcacataccttctgctcaatttcatcgagtttgtttctggtccggacaatctgatctttttgtgcacgctttaaggaataactggaataaacttgattgtatgcgcttatggcatcaggaaatgattcttctttcctctttgctttttcccacaactgagcataatcggagatgcattgtttggtactcttttcgtatcggagcaccagaggaagttctttgtttagggaattaactcttttgactacgacatcgacagcattgttattcttactggtaaacaggacactctgcccggtcatcgcagcatttataataagattggcgacaacttgtgttttgcctgttcccggaggtcctgcaatcagtgtgacatcagcactcaatgccgaacggacagcggcttcctgttcgtcattcaggggaagaacttttaatatttctttctcaaactttggattgtgattaaattgtttgtggatgaatttccataacaccgaatgagaaatatccaagtctccgtactcttcaagacgagctaactcattacttagtccaacagtatatggagtaggctcttttgcaaatagaatggctctattcagaataccatctctatctcctatatgcatcggccctttttgcagattttcaatgtccaacgtatcaagccaattccaatcaggacgaaccgttctaagcaaattaaccttttcggataaatcagagaaagccgcatgtccttctgtaaaacctaattcggcttcgagttcacgcagttcatagatattctctgttttttcgtttgtggaatacttatctatgatatctttgtttatcaatagttcgtcatctattgaaaatccttcctgttttccatgagttccgtcactataagtgacatgaataataaatattggcgaaagaaaatgttttatttttagtatagggtagccaatcagcaaatccatttctttttcttggttccctcgtagaaatgcaccaatctcaggtctctttaatgtgtagtcgtttatccaaggtaaagttatgaaagattgttcgtctttcatagatgcccgaaatgtagtgttgctttccaacgcaatacaactgatatagtatttacagagtccttttaatgtcatacttcttcaatccctaaactcttgagatagttgtatgtactatcgtagaactcaggcaaacgtgtatgatcgtcgggtgagccctcaggaacgcagataatcatcccttgtcgtgcacgagtcaataaaacgcgataggcgttaattagataggcttggcggtctgctttcttgatgttattccatttgttaccgccgttgaactcaaagaaattccatcctttcggcgtatagcgcaaatcgccatcccagacaacacacgtccaatcgagttcaagtccttgcacatcaaactcagatgcggcatcttccaagaaaagcgaagaacgcacatcgttgatatcatccaagaaccagtgaaccgtgtccggtttgcaacgaacatcaatagcaagcggtttgaggcgataggcttttgatgaaaccaagagtccataacgctcgtttcctcgtgcatgagtgcgcagccattctttggctttgttcaaatcacgtgttaaggcaataggatagcgatcagcaatgtctgtatatatcttgcggacgttctcagcatctccgtcaagcagataatgtaccatgttagacaaactttccgcgcgaaatgagcgcatagaaactgccagatgcaggtcgtcggagaaggtcttattggggttattctccaaaagttcagagacttttccttccgcatattctttggcagttagttgtgaggagatatatactttccattggggaaaggtctcgttaagtgcacgtatccattcaccgataccggcttcgcctgtgttaatctcttgacctccaccaaccagacaaacgataaccgcccaatcgggtctttgatccaatgaccaaatgagaaactcaccttccgacatcgggaaattagcaaaccctttcttgcggctcagccagttagcaatatgctctttatcccatgaacgctgtgcttcatcgaagatagcgatattttccacctcaccataaccagcttcttggtcctttaactcctttgtggggtcaatctccaagacaccgttcaatactttaactttacccagcatattatcacggtagcggtgaatgatttggatgaaacgctttacttctctctccgcttctttcttggtgattttattgcctgtctccttctcctgcgcctgtttatctcgtgtcagggcttccgtcaaaacttgtaccaaaggcccgttccctgagagataaacggctaagtcttgtttctcttgttgtacagctacgttcaggcctaccaaggttttaccggctccgggaacgcctgtgacaaaacagatactctttcctccgcaggctttggtatcatggatgacttggcgcacatagcgtgtggtagtctctaattgcgcaccttccgcttcgcttttggtgatatcttctacgctatgattgagataaagcgaccgcgcagcctcaatgatagtgggtgtaggcgcataacggctacgcgaccaatcctctaaagaaacagcatattgttttgggagtataggctgcgataataccaactcgaagacatccttcaagtgtgccgcattagttagcagaggctcatatataccatcgtcatagtgcgatggctggcagagggtagagaaggctgtctcttccgtcgcaactaaaattggaataatacatcggtctgcactgccttggtggaagtttttaaggtccaaagcgtagtccaatacctgatctacgtcttggtgcctgaactcttcctcaccggctttgaattccaccacgaaaactcgttcgcggagaagaaccaccacatcgatgcgcttgcctaaacgcgggattgtatattcaaagataatctgcgcttgctcttggaagtatggtgcaagcagttccttcataatcgttatttcttgctcccaagcgaacttctgagtggatgccgtgtccatctcatcagcacgcgacattttaccgaagatagagttggtatcttctgcaaggaatgttgctatgtttgcttggtagaaataacggtttgtcataatatgtgcctgttgttatttcggaggtacttattaatttatctaaaaatagcttcattaggaatacttgggagcccctgtctttgcagatatgctgcatattgttgctgaattttactaatatatggaggaagtaggcgtccaatacgatatgtttttatattattccatttatctatgcataatttacgataactaattttcataatttttccctgaataaatgcaacataactgcaatttttcttttctataaattccccatttacaaatggtatgttttcgtcactttcttgtttgttaatgttactttcatcaatgaatactcctttcaacagatataaatctttttgctcacgtatgatatcacaatcaggacgaatatttatataatatatattttcctttagatatacgtcaccagaaaaaggataatcaggtaacttgtcattggatataaaacgttcacattctaatatgttacgtaaatcttcttttgttatagctcctatcgtttcctgagatagtatatcatcatctagtttgatgggatttatgcgataagacaaattgttttgtaataaatttagcaagtcataatctttatcaccaccatcattgtcaatactatctcttaatatttgaggccaagcaggatgtgcttcggttaaagaccataacatctctttctttgcttccctatttgctctttcccactcttttaggacatatactggtggacgtttttttacccaattttcaatttcttgaaataatctatctgcagtatcaactatattctttttccttatgaagatgggttctttttctaaattaaatccatttgtatctaatgcgacttctatatcgcgtggatcttcgtcgctaaaaatgaatattggggcataacaaacgctatgcattttttttagaaaatcaatattatcattaatcgtggcttcaggtataggacgaacaccacttagattccagtcgagaatcaagaaactcattgaatgcaactgaggaatggaatcatctggtagcccatcatacattaacattggaatatgattgtcttttagtgaattgacgattttttggatgccatttggtgcctcctctttagcatatacagtttcatcaatcaccactcctatgcccgaaaatagttcttttatattagtcattgtcatcagattttacaaagttaataacaaaatttgctccggagagtactttctctgaatctatttcagccagagagatagaataccccatcctttgcaacaattggcgtgcgatatatagtcctaaaccacgtccgtcctctttgccagaatagaaggcctcgaatataaatggtttgtcatcttccctgatgccaggaccgttatctgagaatattacttgctgattttctccatcaagtgtaatagtgatttgcttttttgccatatctggcatccccagccaatatattgcattatcgaataagtttatcagcagctgtagtattacagcatcagtacattttgcgataatcggggagccaattttaacaacattgtaattgatattttcacgttttaatgtgcggctatatattttttccaccttttccaataaatccgtaaagcgaatgttgcgccgcctttgtttggaggacttgaatagtagttgaatatctcccattcggtctctaacaaacgagaagatgccacgaatagagtgtagttcattctcaatttgctcatctgataaaatgcctccgtcaatatcttcgactagttgatctattgcatcaatgcctttatttaacatcatagacatgtcatgagaagctgtttctacggataaaccgacagctgccaaatcttcggtactgtccaatctgttttcgtagaaggcttgctcggttttatatgatgccattaattccttgcagatggtttctgcggcgctatttcccttaattgcttcctgtagagaaacaaacttattttcaacaacgcggagtttcgcatttttttgttctttctgctgcttgactccttcttgatattgtttatacggatgttgtcgtatgaacagtaagaaagaatgtataagacctataaactcctgagtagcttttccttcttcaataagtccttcgcgatttgttttgtcttttaatcttgggttgccgtgtttcgaaatatcaacaaaacctactacttgatcattgcttaaataatctcctgcacgcccaataccacgttgcttgtcgatttgtagccaatcgttgtctggattgccatatggagccacacggataccgtctcgatataagtatattctatggtttttaattcgctccttttcggtcttgtctaaataatatggagattctttatcggcagtaaaatcaaaaacaaagaaattaaatttgaaatctccacatgtggtttttctaataacaggattaccaaataaatccttattgcccataaatcttttttggaaataggacaatcccgctatttgtgcattattcagaggcaatctgaaaggaatgtcgtttagtttataagtaaaaactccttccagttcatcatatctgccatctgttattctaagaacagaagagtaatttaacaatgttgctaatttttcaatcgccgttttagaaaaaatccgtcgttccccattaaattcaaaaccgacctctattggggattggctttttttctgtatgattttatcaaatatagactctaatttttgtgattcttctccgacttcgtctattttcttttcagaccaagaacctttcaaattggttatctctattcttgtgccatgattattgtcattatcgaattgctggctgtttactataacggttctgtcaattattgattgaggctctctttctgttacgttaatttttatatcgtcaatatataattcttcttgttttccttcttttgaaagaaaatcatcgtcatataacgataaatcataattaacaaagtactctttgtcgcttccttctgaacgagttattattttaatatccctgcctaattttaatatagcaaaacgtccgatgcccttttctccctgaataattcttttcttctttggagttgtgcgaacctcattctcttttgactttttatttggggttgctggattcatccaactatgttcaatagtcttcaaatccattccgcagccattatcttcaatgatgattttagattttggggtcaaaataaattcgtcaatgtctttaacaatttcaaagttctcaaaacttatctttacccaagccgcatctgcatcatacgcattttttattaactccgctaatgcaatctgctcattagttattaattgttcgcctaacatagtaagcaaacgcgcataaggacgtatattaaatgagtgttccatgttaattatttttgcatgatgatgatatattcgttagggtacacttttttacaatctttgttgtcaagagttgtaaaacgtcccgtgtttttatcccgcagtgtcggcatgagtttatacggaatgtttcgcttgattattttttcctctttaagccctgtgcctcggaggaaatcaaaaaatacttcggcagatttaatctgcacttctttgatggttgtatttccgataaccacgcaagcgtaaccgccgtcttttaagatacgcgccatttcttcagcaacttgtttcaggtcgttgaaatatgtagctacatttcgcgctatgagatggcttttttcgtcaagagctttgataatatctttcgccaattcgctgccagacacttccaatgaagtcttgccagaataggaagtgcctatgaatttctgacggaattttgccaagtcatcaaaaagctccatccaataaccagttagctggtgaatgtctgcgtactcatatgaggttacgtaaggcggagatgtaatgattgtatcaatagaggtatcttctattcctgtatgacgagcgtccccctcaatgattctacatggaacatcaaagaaattgtgtgtttgcagatgctcatagaacagtttgttgctctgcatcatttgttggcagtgttgctcaaaagcgctaaaaggatccacaacagacttcttcggatcaacctgaggtttcgtgcttgattgtagccatcttgagcagttcttaagaatgtgagagatagtaacaaggaagaattccttaatctgttcgtcattctcttcattagcacattgatatagaaaagcaactttgtatttgttttcaggcacaaaccaataatcaagccgtttatgtgttggcatgtcgataaatgccgcaggattgtacatcgcgaattttgcaacaaaagcattatactcggcttccaattctacaggatcaataggggtggttttgacacgagtaatcaaagtggctacagggtttatatccgtgccgatagatgcgtaaccatgtgccttagcttctactaatgtagtgccgcaccctgcgaacaaatcagcaatcataccaccttcttgcggatggtataactcaattaatttctccactacattaggaagaaatttggctgggtagcggtggtaaccatgcgtccatttgtccgtggaacggtcttggttaaatgcccatgacggactagcctttattttgttaaaatctcttttgcgcatatgcgtacataatttcgggcacaaagatacaacttttttttgatatatacaaatttattttcgttttgcagcgtttcgctaaaaaaacacctaaccgctgttcctaatcactattcctaaccgcaatcataaccactcccctaaccactatgcctaaccgctatcatagccgctcgcgttgaggcggtcttttttgtgccacaaagacgcacttttgacaacttttcctcaaaaaaccaacttatatttgcataagtagattttattttgtacttttgtgaccgaattttggtgagcgtgtaatattttaaacctccaataccatgacaaaaaagattctcggattagatttaggaacgaatagtatcggttgggctgtagtagatgaagaagacactaagaaacgtatctctcatgctggtagccgtattatcccgatggatgcaaaattaatgggagattttgaaagtggcaactccgtctcacaaacagcaacgcggactgcagatcgcggagttaggcgtttatatgagcgtcatgctctaagaagggagcgtctaaaccgagttttatctattcttggatttttgccggaacattatagtaccgaactaaaccgttatggccaactcaatcaaggagcagaacctaaattagcttgggaaatgattgatgggaaatactctttcttattcaaagactcatttctcgaaatggttcatgagtttgcgcaagttcatccggaattactggttaacggacgaaatatagcttatgactggactatttactatttgcgcaagaaagctctgacgcaggccattactaaacaagaattagcatggattcttcatcaattcaatcaaaaacgtggttataatcaagctcgtggagaggaagaagaaacaaaatcaaatgaacgcaaagaactaataactcaaaaagtggtttcggttcgtaatacaggagaagaatcaaaaggaaggacgtggtatgagattacgttagaaaacggattcgtttaccgcagacaaagtgcatacccgttggattgggaaggaaaggttcgagattttattgtcaccacaaaattgaatgatgatggctctgatgcaaaagataaagaaggaaatgttaaacgttcgataagtgctccgcaagaagatgattggggactccgtaaaatcaagactcagcaagatatagatgcaagccataaaacggtaggcgagtttatttatgatgctttgttacataatcctgaccagaaaattattggtcaattagtgcgcgtagtagataggaagtattatatggatgaactgaaacgtattcttgatacgcaaaaacagtttattcccgaattacaaaacaaagaattgtacgcagagtgcattaaggcgctttatccgcaaaatgatgcgtaccgcagtagtatagccagcaaggatttcacatatctactgctgaatgatatcatcttctatcaacgtcctctgaaaagcaaaaagtcgttgataaacgtatgtccctacgagtatcatgtatataaggataaagaaggaacatggcaacggcagtatttaaaatgtatctccaaatcgcatcctctatatgaagagttccgtatatggcagtttgtagaaaacctgcatatctaccgcgaaactccaaatggattaggaaaggaagattgtaccgcagaatatatatccaataaggcagaattggtttcatggctttttacgcagaaagaagtaaccgaaacgtctttgcttacacacattgcaggtaaacaaaagaaaggtttgtcttggaattatgtatcagacaaggaaaagaaataccctgcagctcctgttacatctgccatttcttctattttacaagaagcgggaggagaagtttcttcaaatacaatagagcatatttggcagatcttgtattctgtttcggacaaacagcaacttatggctgcactcaaacattatgcggaagtcaataacttgtcggatgtgtttgtagaaaaactgagcaaacaaaagccttttgctgccgactacggagcatatagcgaaaaggctacgcagaaattgctcagtttgatgcgcagcggtgagtcttggagtgaagaagctatagatgccaatacaaaatcccgaattgagcatattcttaccggtgaagtggacgatgcgattagtgagcgtgtccgcgaaaaactggatgcaatgcatgaaataaaagatttccaaggacttcccttgtggcttgcagaatatgttatttatgatgtgcgcaagaatgacaccaaatgggaaacgccggaagatatagataagtatctgcaatccttccgtttgcactcgcttaataatccaatagtggaacaagtagtgatggaaagcctgcgtacggttcgcgatatatggaaacaagaaggccagatagacgaaatacatattgagttagggcgcgacctcaaacagaatgccgagcaacgcaagaagacccagcaacgccaacaagagaacgagagagccaatcttcgtgcaaaattgctattacaggaatttatgaatcccgacatggagattgaaggtgtacacgcttattcgccaagccaacaagaacttttccgtatctatgaagatggagtgttaagttccaacaaacccgatgaagagacgcaacgcatcataaatgacttagcgtctctcaaacaaccatctgcccaagacatcaagaaatatcgcctttggttagatcaaaaatatatttctccgtatacgggagagattattccattagcaaaactcttcactccggcatatcagattgagcatgttattcctcagtcgcgtttctttgatgactcaatgtccaacaaggttatttgtgaagcagaagttaatgcacgcaaagacagaatgttggggcatgagttcattgtaaaatgcggaggagaaaagattacactgtccggaggcaaggtagtaacaatattatctcccgaagcgtatgaagatactattcgtaagaactttgccggagactcgcgcaaacaagagaaactgatgttagatgagattcctgagaagtttgttgctcgtcagatgaacgatagccgatatattaaccgattgatgatgcaactgctcagtaatatagtgcgcgagaaaatcagtaagacggaatatgagccagaggccgttagcaagaatctgattgtgtgcaacggtgcaactaccacgcgcctgaaaaaagactggggtatcaatgatgtttggaataagattattcttccgcgttttgagagactgaataggttacaaaacaaaacggtctttactgccaaaacagcaaatgggcacattattcccaatatgcctttggaattacgtcagggctttgagaaaaaacgtattgatcaccgtcaccacgcaatggatgcaataatcattgcattcacgactcgcaatcatgtagctttgttgagcaacgaatccgcattagacaaggatgagaaagcacgctatgacttgcaaacgcttctgcgcaagcgggaagtctggagaagtgcagacgggaaagagcattataaattcacggactttattgcgccatacgatggattccagaaagacgtacaggaaacgttggaaaatataattgttagtttcaagcaaaacttacgcgtaatcaataagagtagtaatcgttccattcgttttgtggatggcaagaagcaaagggtaccccaaaagaaaggggacaattggtctatccgcaagtctctacataaagcaactgtattttggagaagtgaatctgcgcaaaaagaaatttgtcaatctgacttatgcgctccagcatgtggatgatatagttgagaaagatttgcgtgccaaagtgcgtgcgttgcaacaagagggaaaggacgagaaacaaatcaagaaatactttgcttccgaaccggatgtctgggcagatgtcaacctcaaacgtatagaggttttctattataccaaggacacaaacgaccactattatgcagttagaaccgcattagatgattcctttacagaagattatatcctcaacaaagtgacctctgaagccatccagaagattcttcttgcgcatctggcgcgttgcaataatgattcaaagttggccttctctcccgatggtattgagcagatgaacgcagatattcagcaactcaataatggtgtacctcataaaccaatatataaggtacgcacgtatgagaaagcagagaaatttgctgtgggacaaattggcgcaaagagcaaaaagtttgtagaggctgctaagggaacaaatctattctttgctgtttattctaccaaaacggaggaaggctctgagaaacgttcatttgtgaccatacctttcaaagtggcggtggattgccagaagcgcggcaagaaagaatggcgtagtttgttggacggatgggttcataatgagaatctggttacagaggaagcaaaactccgattcattctggcacccggtgacttggtttatgtgcctaaagcagatgacaccaatggaatcaataaatcaaggatatacaaatttgtttcctcaagtggtaatcaggcgttctttatagttgagaatgttgcttcaccaataataaataaggtagaattctctcccttgaataagatggaacgggcaattaccgatgaaatgatcaaagaaatttgcatcccgatcaaagtagataggcttggaaatattatagagaaatgattaaacgtgttctatgttttgaaaccccggcttacttgaacctcaagttggcgcaacttattgtcacttatcctgatattgaaaaggatgagaacctcactgaggaacaaaagaaagcatcacgcaaatccgttcctattgaggatgtgggtgttgtcattttagataacaagcagataaccattacacaggctttgatgtcccatttgttggataataacgtggcaatcattacctgtaatgaccaacatatgcctataggtctccaattgccgttagaggggcatacgctccaatcggaacgtttccgtagccaaatagaagcatcgggacctttacgcaaacaaatgtggcaacaaaccgtggtagcgaagattgccggacaagcacatattttagcaaatgagggtattgaacatacgaatatgttagcatggtctaaacaggtgagaagcggggatgttgataacttagaaggtcgtgctgcagcatactattggcgtagtgtctttagaaatcctaacttcattcgcgccaaagacggattaccaccgaataacttgctcaattatggc

SEQ ID NO: 1394 - DNA, 15031 bp, synthetic construct
  source 1..15031: mol_type = other DNA
  misc_feature 1..15031: note = Synthetic
aagtctttacgttatatttgttgcaaagagctttaatggtgtcgatatttatggtaattagtttcattaatagtgtaaagatacaaaatttcttgaaatctgcgtctgggggctttcccgccttgactggtagcgttttcagggcttgtgttcaacgggcttatggagcttcaactatctatacgtactcaagtatatttattgctcaatgttaatattcccttgtctgcccgcagacgcaattgcctcgggttaccagcagtttctatttcattttatctaatttgatattaaatatattcaatgagtcaggatgctctacgtaaaggtcaagaacaaatcttttatttacaaaactttcgtcaagttcttttaccttataaataaatttccaacaattagaaaagtcttgtcggtaagcaaaattgtaagcgataagcatatatgtatagggtacttcataatttttatgaattattttattatatatgtcgtcactttggtcaaggaatattttgttcttgtctttgaagtaataacgtgatttagcgattcctaagtcaagtagagctttgttgtcagtgctgtctagtaaaatagctttttctagtgcatttattgcttggtctaattttacgatacgaaaatacgtttctccaagcagcctgaacgcctgtccagatttggggttgaggctggtcgcttgttcgtaagcttttattgctttcttgtagtctcccttttcatataagttccgccctaatctaataagtgaggtgtcgctttgaggaaacaattgagttgatttcaatacaaataagcaaacgaaaactatactttttgtctgcctataaattaatatgttttttgtctgtcgttgtcaaaattactgataacttatgtataagtatcaccaataaaggagtctaagaaaagatgagaaaataaaatcaacaaaaaaaccctttaatcaataattaaagggttttttaatttttaaacagttaaaaactagtgttttttacctggtttaactttagctaacgaatcagcaatacgagttgaatcagctttagctttttcagcatctgcagcagcttgtgcagcagcagcagcttgtgcttcagcagcagcaatagaatcttgttgttgttttaatacagcatcaattgaatcttttttagctttttcacgagcttcgatttcttctttagatggtccgcaagcaacgaaagtagcagataaagcagctacagcgattaatgataatacttttttcattttattggttttttattttaaaatatgggtgcaaaaataaaacttttttcataataaaacacaaaaaataaaaaaaaataaaaaattaaccatttattcttattaatgtgggttaaagcataaatttgacgccattatgtacacacttttaaagtactttttgtttaaacaacagcccgaaaatgcacaccatttaacatttagacttattaaaaatgttagcaaattgcctttttttggttctattacaaggagtttttatgctgtaacgtctgaaaaattaaaccggaacgtttttggtttgaattttataaatcctgtgggtttagctgctggcttggataaagatgcaattgcttttgaagaattagcaaattttggatttggttttatagagattggcactgtaacgcctttgccgcaacaaggaaatgaccaacccagactatttagattaactaaagatgatgctcttataaacagaatgggctttaacaatcaaggggtcgccgccgccgcggatagattaaagcaccgaaaaaataaaaatttaattattgggggaaatattggtaaaaataaaattacctcaaacgaagaggcagtaaacgattacataatttgctttaacaccctttacgattatgtagattattttgttgtgaatgtgtcatcccccaacacgcctaatttacgcgatttacaagaaaaagaaccgttaacaaaattattaagcactttacaaaatttaaataactataagccaaaagttaaacctatattattaaaaattgctccagaccttacaaacacacaattagacgatataattgagattgttgaaacaacacaaattgcgggtgtgattgccactaatacaactatcagcagagaaaatttaagttacaaccagcaagaacttgaatcgataggcatgggaggccttagcggaaagccgctcaccgttagaagcacagaagtgattcgttacttaaaaactaaatcaaacaatgcgtttcctgtaattggtgtaggaggaatacatagtgcgcaagatgcactggataaaataaatgctggtgcagatttaattcaactttatacaggttttgtttacgaaggtccaaaattgattaaagaaattaataatgcaattgtaggcaagagttagttttaaaaatttattttcatccccaaaacgattagacttttgaaagctactttacacaacttccattataaacttttttaacttcagggttttctaaaacttgaaacgtcataaacggtgcaccaaacaatttacaatacctggctggattttttgtttttgcaatttctaaagcttttgcaaaggtacggctataatatttttcctgcacacggctggcagctgcaatatacataaacaccaggctttcttgcacatcaggtttgttaatgtaaggctctaaaagggttgcagaataattaaaatcttttgctctgctaaatacgtaacttaattttaaagcgttttgccagcttgcatctttaattttataaaagcctttaatcctagcgatacacgcatcaattattgcatcagcgttatcggaggtgtcaacactttccattattttaaattgccattcaatgtttaaaccatttacgtagttactatctaatttaccatacaagccatcaattgtttgttgtacttgagcttgatggtctggattagcagcgttggtatctaattttaattggcaaaaaactttgttgtactgataaactggatttgaagcgtctaattttaatagtctatcaaacgtggcttcatcttcttcatccaccgagccttctaattgatatttgtaatacactttattatttattattccagcgtttgcactattttcttcgcattttaaactatcaaaatagcctggcacatattttccttcattaatttttttagaggcgtactccattattttatagttttgatttgtgttgtttgcttttaatgctcttgcaaaactaacttgggtaaagcgtggttctttgtttccgctaacatcataagtaatatccataattatttgagcaaaacgttctttggctaaaattggttctaactcttgttgcaatttttcatcactattaattttatttatgcatttctttttaccaagcttaactaaatcggcatattttccatcttcgttttccaacataaataagccccaactgtctttggtttctatttttggtttaattttatttgattgatttgcttgcaacacgtcaaccacactttcagcacgtttgcgctgtaacttagcattggcaacactatcaccttcaattgaggcataggcatatataaacaagccatcaattataaaatcgggttcgtttaatgcttttataaatggttgaacatcttcttgcttaaactccgatttatttttctcgaaaggaattgtgaaattaattattgaactttctgactttggttcaaatggcggttttaaaccaatagaattttttgcaggtaaaatgccaattggcgtattgctctgaatattgccgctttcgtaataaccgcgtgtgattgttttacaaacctttttatcttgaacaactattaaatttaactcataatcaccagtaatgtttggattaaattttccgaaatcaactaagataccttttatcttttttcgtgcttttttatcatctgtttttaataataaattgcttttaaaaaatttatcacggtaaataactttagtcattacacctttgttgtataagttattatctacaatattgtaatctgctttaacatattgttctttttgtacaatatcaacagcaagtccatcggtggttttctttaagaaacgacgtaactcacgtgcattagggtattttaaataaatttttccaccttcaacataaagtcctttttgtaaaatatcgtagttacgccatctttcgcaagttttgcatttgcgtgcatcggggccttgtaatttttttgaacgtttgttatatggcactgctaaatcgctgcggtaagcagcgccaccatttaaaatatcgtagccaccaaatatagcgcttacaaaaacttttttcttatcatctactgcgcacgaaattcctactaaattatattttgaattggtgagtacttgtaaatttttaggattgctctcccatcggttgtatattaccttcgcaacatcttcggttttataactctctctgcctttgctaactggagctttcatggttaactcttctccgcgttttgtagcccctactttttttaaatttttttgtgtggtttttggctcaattttatctttacctgaatcggccattttctcagagctatattcgcccgcatcgtgcagcataggactaatttctaaagtatctaatcctttagacattcgaaaacggtttaattcttttaaaataataacaggtaaatcttcgagtttaaaattttcatcatttaccacttggctcttttgagataggagtggtgttacaaaacttattataataaccaagagtatatatttcttcatactatattgaattttaaagagtacaaaataaaaaaatttaactcttaagcaacttaatgttttcaaatcgttttaaacaaaaagagtccgtagtgttacggactctttttaaaaaaaagaaaataaattattgttttataatttttttggttgatgttctcccatctggtaatgtaagtgtaataaagtaaataccattattgtagctagataaatcaattaaaaaattactttcagcaatttttttattcaccaaaactctacctgtaatatcagttactatgatagttttatcaacatcaaattgagaagttaccaaaattgagtttttcgttggattaggataaagattaaaatctaagataacattgctagttttaattcctgtaggtgtaggcgttgtagagtaatcatcagcggcgtttgcaatatttgtagcggttagataagctaatactgcgctttctccactatacgtgctattgccccaatttggtacatttgttacaggcatattgtttggagtgccagtatgataaccaaccactacgacaccatttcctactttccaggagttcattaatcttacattatcgccattggtttgattgattgtatcccaaacacctaccaataaagagctatacaaaggcacagttaaatcatttttataaacacgcacaaaatcgttccaacaagatttaccgccataagcaggcttcaccattttttggtaagcatttcttgttgtaattgttcttcttccttttcctaaaactaaaacacttccattagcagtaatttttaaattatttttgcccataaatgtagaattaagtgttggccatcccgcagtaggacttggccatccatccaaattaggatcaggatgtgctgcacctaaaccagttgctccttcggcgtactcgcccatatacgtactctttaaaaaagttccgcttgcaatatcaaatcttccaagccacgacaaatgtatgtttccgctatttcctgtaaattgattttgaaacccaacagctgttgtgttagaagacactgtatttccttcccataagttttcagtattattaccgtgacttcttgcaccgattacaacgttgttcagaacagaatagtcaattgcaatggcatcaatgtattgatctggcgtagaatttgttgtgttagatgtagcaggcaacatttcatgatacaagcgtgtccaccatttcatatctcctgtgctatccatgcgcattacagctggttcaaaatctggtaaaccgctaaccggcaaggttgttttaaaattaaatcctaaatacatgtcgttacttcttctatcaatacaaattgagctcataccataagtgaatgttgaaccaggggaatagcccgtatagcctgggcctgaactggagttaccgctttgaccaggaacgcaaggtccgttaaaacaaacatccaaaggccatttaccttttttagttccgccattaccatctggttgcaccaagttataatcagttgcagttgttgagcgcaaatcacatcttgtaccatcacgtttaaatacaataacgctactcgataaattgttgattccgcctgtaaatgtatttgcagcgccgtaatgttctcctcctcctactttgttgtgtattcgccagttattcattacaatatctactccagtgtttccattcatggcatatacagcgctccaattataatcgtgagaatcgccaagcgcgtaaacaattttgttattgctaccaacatcccaaggcatgttattttttatatactgccctgcttttgctgatatagagcgcatccaagtaaaacctgtaggcgctgctgttacaaaattattgtttaatcttcctataaaatagccaccgcctgctgcgtctgataaatcgccactaatgtacaaattaccagttgctgcgccaggtagagagttggtgcgcacaaattcaaaattttcgacaacatttggaggcaaacaataaaccttaagcatggtttgcaagttagagttaaactctgcaataaacgccactttgtttgtacctgtttgattgtttaaggttgctgtgcctggaacggtaagcgtgatttgtggaactgtacctgaaatccatgagagattatctgcacttcctaaaacaataaaattgccatttgagagttgcataacatcagtaaaacgctcgttgccagcaccgccagcgtaagtaaccatgttttgagaattaatttttccgaaaactaagaacaaagaacataaaaataatttttttatcatacttaaaaatttaggtaggcaaataaacgtacaaaatcatttaaaactaaattttgtaaataatattcgcttaaattgatttagtaagaggttagttcgttaagaattaaagacaaattttcaattcgattttttcttttatatctggtttaaaaaaaataattccaaaataaaacgcatcgatactaagtgtaactgaacgatgctttttaatttcaatccaagcctttgtcatgtcggtgctccaataaatatcatcaaaaataataactgagttttggtgtttgtgttttagcaataattcaaaataattaatggtggcagaataaatatgattcccatcaacgtaacaaaaatcgaaggaattaagtttttgaagaagaggttttaaggtgtcgttaaaatttcctagaatgaattcgcaattcgttattttaaattgttgggcttgttgttctgaaaaattgattaaggcttcgcttccttccaaggaataaacactaccttttttatttgccattgccaagtacagtgtagtaagaccgatgctgctgccaagttcgatacgggtgtttaggtttaaaaaattaatgagcttaaataaaatttctgcttggaattttttgcttatgccgtgttttgcaattttattaatgctgcgttcgtttgtttgcaatatctttgatcctgctccaaaatcgtttacaataaattttgtagaattagtttttaatttttctcttaattcgtttaactcttcataggcaaaaaaatgagcgttgttataaaatacttcttcgcaaagtttgtatgcaaacggtgaatgcacaccatgaccctttttagttgcggtaaaatagtgttttacataactttttatttgataaaatttactcactgcaaacacaaaaactttctttttctactggagtggttttgtaattaagtaaattatttttactcataaaatataaatttaagatagctaattttttttcaggatgttctttgttccatttagttaaaagatatttgcaaaacagtggtcttaaaaatgtattgtttccttgcatgttttcagccagtttgcgccatctatctgttgtataatttctaacaacatgttttggttttgtaaactctacataatcatcgttatttacaatatcccattgtgcgcctatgctatcacgtccatctaaaacaaaccagccatcgcgtttcataacagtaggcgaaaacataccccagtattggtctaatctaaacatattaattggataataaattgctgcttttaattgataattaaaccaatttataccgcttaaatttaaaattatacttacaataataattgcagataacacataattattaagataattaagcgaaggaaatcgaactttgtaaattttttttgttgtggatttgaattgactgaaaagaaaatcaatttttataaattttaaaatcctaaacgaatatttttttggtaacaaagcaaaagcagaagttatgctaatgatgtaaaataaaccaacgtacatggtaagtccgattccaatgtggagtatgagtataagcacgaaggcaaataaacgtaagtaaccttttttttgagggaacaaaattaaaaacggaataaacaattcgatataataaacaacatgtgtaagaatttttgtgagtgcaaattgataaaaaagccaatcgccagcgtaaggcagacgtaattgatcgagactaagggcaaaataaattgcggtaccatcgctttgccactcagcgctgttttttaaatttactgtaaaaaaatagacggatgcaattaaaataaagtaagcaatgttaggtattgtaacttgttttaatttgtaattggtttttttagagtcgatagaatagcaatgatgccatggcagaaacaagccccaaaataaaattaagcgtagtagatcgtctccactctgcaatacaaataaattacggttgtgtagacttatgtatagtaaccaaacaattaaattactaattcttgttttataacctactagtaaacatattgtaaaaaggatatgaatagcaaagacggaagctacataccaatttgtttcaattagagaatgtatagtccaaaaacaaggcttccacccaaaatttttaataagatgagatggccaaattccctgctcggagtaatgtgcagttagatcgctcaaccttattagcaaatccgcaataaccacgcaagcaatggcaatacgcattaaagccaaggctgaatgattaattgcgtaatgttgacgaaaatatatgagtattttttttagtaaaatgggtctgtaatttatttactaaaataggaaaaaagtaagagtaaaattaagttagaacacatatttactaattaaggtctgctaataaactcaacagtttttcttttctcagctttttttgtttaataaaaaagatagagtcgacgcagacgcctactcataataatttttctaaagaaaaatatctaataatatttcgaatcatagaaaaaataatgctcgtctgaactgcgcagcgagttttgtttgtttcattagttaaaaacataagcaaggctgcctgttccaattcaaaaaagtactttttttgaatttttcctttttgctatatatactgaattttattttataaattagtgataaaaaaagcgacccgttaaggccgctttagatgttttcacaacggaataatccttattgtgatttgcttcaaaatgtaatgcaataataataaaaataattaaataaaaaaaaatatgaaaaaaattttaggattggatttagggactaactctattgggtgggctttagttaatcaagattatgaaaataacaagggagaaattattggtttaggaagtagaattatccccatgtcacaagaaataataaatgattttaataaaggtatatctatttcacaaacagctactagaacgggatataggggtgtgaggagattactagaaagaaatttactaagaagggaacgattacacagagttctaaatgttttaggttttttaccaaaacattttgcagagcaaatagattttgaaaataaattagggcaattctttcctaatcgtgaaccaaaattagcatataaagaaattaaaacaactgataataaattaaaacacgattttatattcaaaaaagcatttgaagaaatgcttgaagatttcaaagcacatcaaccctctttgctattaaacgataagaaagtaccttatgattggacaatttattatttacgtaagaaagcattaactgctaaaatagaaaaagaagaattagcttggctactattacactttaatcaaaaacgtgggtactaccaattaagaggcgaagaagaagaagaaacaccaaacaaattagttgaatttcattcgttaaaagtgattgatattaaagcagatgaacaacaaaaagggaaagcggacatttggtacaatgtgaatttagaaaatggttgggtttatcgaagatcaagtaaaacaccgttatttgattggaaaggaaaaacacaggaatttattgttacaactgaacttaatgatgataaaactattaaattaaataaagatggtaatgaaaaaaggagtttcaaagcggttgattcagaagtagattgggttgctattaaaaaaagtactgaagaaaaaattgacaaaagtaaaaaaacggttggctcttatatttatgaaacattacttcaaaatcctaatcaaaaaattattggcaaattagttcgtacgatagaacgaaaattttataaagacgaattaaaacaaatactagaaaaacaagtacacgaacacactgaattacaagatagaaatctttacaatgcttgtatagaagaactttacgaaaacaatactgcacacagagaaaatataaaagagaaaagttttgttcatttatttattaacgacatcctattttatcaacgccctttaaaaagcaaaaagtcattaataagcgattgtccgtttgaacagagaacttatttaaaagatggtaaaaaagaaatacaatctataaaatgtatatcaaaatctaatcctttatttcaagagtttagattatggcaattcatacaaaatcttaaaatctatcaaaaagaaaaaacaattgacggaaaaacatatagtgatgttaatgtaacaacagaatttttaaagtccgaagaccattatactaatctttttgattggttaaacgaacgcaaagagatagatcaaaaagtatttttaaaatgtcctgcatttaacttaaaaaaggatgttgaaaactatcgctggaattacgtagaagataaatcatatccatgtaacgaaacacataatgcgattgtaaatcgactctctaaagttcaaaaaatgccttctgattttttaacgagagaaaaagaacaagacttatggcatatactctactctgttgaagataaaatagaaattgaaaaggctctaaaatcatttgctattaaaaataatttaagtgaagactttgctgaagttttcaaaaaaataaaaccttttgataaagactacggtgcatattctgaaaaagcaataaaaaaattacttccattaatgagaaggggtaaatattggaatgaagaagatatacatcaacaaacaaaaaatagaattgaaaaaattatttatggagaggttgatgataaaataagagacagagttagagaaaaagctattcatctaaataacatcaatgattttaaagctttaccgctttggcttgcttcttatattgtttatgacaggcattcggaagacagaaatgccatgcaatggaaaaaaccagaagatattgagaattatttagaagaatttaaacaacactctatacgtaatccaattgttgaacaggtaattaccgaaacactcagagttgtaaaagatatttggaaaacttatggtaacggcgttgcaaatttctttgatgaaatacatattgaattaggcagagaaatgaaaaatccttctgataagcgtaaagatatgactaatcgaatgattgtaaatgaaagcaccaaccttcgaataaagtcattacttatggagtttatgaatgatgattattttaaaaatcaaattgattattctgaatattgtaaggatgaaaacaaattaagttcttatcaaaagggtagcaatccaattcgacccaattctcctagtcaacaggataagttaaaaatatttgaagaaactattttaaatactgttaacgaaattcctgattacatttctgaaaccattaaaaaatttaaagaatcggacgaaaataaacagcctactaaatccgaaataaatagatataaattgtggctagaacaaaaatactgttcgccatatacgggagaaataatccctttaaataaattatttactcctgcttatgaaatagagcacattataccacaatcacgatactttgacgattcacttagcaataaagtaatctgcgaagcagaagttaataaagacaaagataaatctacagcatacgaatacatccgggataatcatggtaaaaaaattgaattatcctttggcaaagtagttacgatttttgaagaaaaagcatatgaagattttataaaaagacactatgcaaaaaacagaagcaaattaaataaattgatgatggaagaaataccagaatcatttatccaacgtcagctaaatgatagccgctatattagcaaaatagttaaaaatctattatctaacatggtgagagaagatgaagaacaagaaagtacgtctaaacacgttatttcgagtaatggaaatattacaaatgtattaaagcaagattggggattgaatgatgtatggaatgatattatttcgcctcgctttgagagattaaatgaatctactaagagttccaatttcggcgaatggacaaataaaaatggcaaacgtgtttttcaaactcaagtaccattagaacttcataaaggatttaataaaaaacgtatcgaccatcgccatcacgcgctagatgctttagtaattgcgtgtgcaagcaaaaatcacatcaactacctaaataatcaatatgctaaatcagaaacaacacgttacgatttacaaaaaaatctaagaagacatgagcaagttgaaattacctataaaaaaacaggtgaaaagaaaaaaataaatgtagctaaagaattttttaaaccttgggatagctttacagtacaagcaaaacaatcgttagaaaatactgttgttagttttaaacaaaacttaagagtaataaataaaactgttaattactatcaatcatttaaaaatgaagatggcacattaagactaaacaaaaatggagtgccacaaaaggatattataaaacaaaagggcagtaactgggcaattaggaagccaatgcatactcccatgccttatggtaaaagaaattttggtttcgacattcttaaaatttcagaaaacattagtaaaagagaatacataattgatgaagatatcaaaaaaaagataaatactattttcgaagagtgtggtaaaaaaataacagctactcaaaattttatcaaaaaaaatcctattcaaaataatgagggtaaaccaattttagaaacagctttcaaaataagtgtaataaaatttagaaaaaggcaaccgatttcaaaactatcgaacagagggcaaggtggaattaaaacactcgaagatatgacgaaatttataaataaagttgtggacaataaattaagagatgatttattacttcatttgaaagtaaataataataatattgatatggcatttaatgctgatggtatagacgtatttaatagtaaaagaaaaatccctgtttacaagcttcctattgccgaaagtggcgataaaagattttctctaggtaataatattggttcaaaacataaatggatggaagcagcagagggaactaatttattttttgcaatttatttagatgataaaggaaaacgtaattatgacacaattcctttaaacattgttattgaaaaccaaaaacaaggtgctttacaaaatattaaacctgaattttgctcagtaccaaacaaaaatgaaaaaggtgacagtctattatttcatttatctccaaatgatttagtttacgtaccaacgaatgaagaatttgagaatccaaccttagttaactttaaaaaattatccaaagaacaactaaatagaattatgaaatttgtaagttgtactggtagtgagggtcattttgttccaaattattattcttcgcctattatgaaaaatgaaattggaactaataataaaagtgaaaaaacatttgataatgttcaaataaaggctgtttgttggaaattaaaattagatagattaggtaatattataacagttttaaaatgataaatcgcacactccatttcaccaatcaagcaaactcatatcatacataatgtatgatacattttgtatgatgcataatgttttatatatttgatgtatggaaaaatcaaccaacccctttttactatcgggctacaaaagccccagctacttttgtaaccgtaaagaagaaacaaaacaactaacccaattaatgcttaatggcgtaaatgttatcctatttgccatcaggcgtttgggtaaaacagggcttattcatcatgttttttatccttaccaaaataactcaaaaattacctgtatttatttagatattttggctacaaaaaatttagccgattt

SEQ ID NO: 1395 - DNA, 15013 bp, synthetic construct
  source 1..15013: mol_type = other DNA
  misc_feature 1..15013: note = Synthetic
tgcataactacacaattcactaccacttgtaaatcgttcaaaaccatctgtgagaaccaccaacctcaacgctgccgaaatagaagaccggacggaaaccgtgtccgttcccgaatgcgttctatgtttaatttactggcttttgacgaaaaatctagagataaaagatgttgaaaaaagaaaacgacaacctaagttgccgttttaaatgttttcacaacggaataatccttattgtgaattgatttcaaattgtacagctaatataaaaaaaaatagctaattaatatatattttatacttttagtacaaaatctaacaaatttcaattaatcaataaaaattttagagaaccacacattctacaagtgtgtaaaaccaaatgttatgaaaaaaatattaggcttagaccttggaactaactccataggttgggcattaaccacgcaagattttgaaaataagaaagggaaaattgaaggaataggaactcgaattatcccaatgtctcaggatattttaggaaagtttgattctggacaatctcattctcaaacagcaaatcgaactagttacaggggagttagaagactttatcaaagagctttactaagaagagaacgcttgcatagagtattaaatatcttaaattttcttccaaaacattacaaagaatctatagattttgaaaaacatttagggcaatttaaaaacaacactgaagtaaaacttaattaccgcaaaaatgaagaaggaaaacatgaatttatatttatggattcctttaatgaaatggttgctgaatttaaagcagctggaaaagacgttaagatacctttagattggacaatctattaccttcgtacaaaagcattaaagcataaaataactaaagaagaattagcctgggtacttttaaactttaaccaaaaaagagggtattatcaattacgtggtgaggatattgataacgataaagagaaaaataaaaaatttgaaacactttttgtcactgaagttaaagattctggtgaggttattaaaaaaacaggagagccactttttgacatttattttaaaaatggatggaaatatgataaacaaactacaaagcctaaaagttggttaaataaacaaaaagaatttatagttaccaccaaagaacttcaaaataaagagattaaaagaacctttaaacttgtagattctgagattgactggattgctatcaaaaagaaaacagaacaagatatcgagcaaagcaacaaaacagttgggcagtatatctacgaaacgcttttaattaatccatcgcaaaaaattagaggcaaactagttaaaactattgaaagaaaattctataaacaagaattacagaagatattaaaaacacaaatacaatttcatcctgaattaaatgataaagaactatacaatgcttgtttagacgaattatacccaagaaatgaagcacatcaaagtaatataaaaaataatggcttcgattatttgtttattgatgatattatcttttatcagagacctctaaaaagtaaaaaatcaacaatatcagattgcccttatgaagaaagaatttttataaaagatggagttagaaatgtacaaaaagtaaaatgcattgctaaatccaatcctttatttcaagagtttagactatggcaatttctaaagaatttaaaaattcatcaaaaggaaaatattgttaatggtaatattgatgaagatataacagatagccttttcacaagtgataatgattgggttttattatttgagtttttaaatgataaaaaagaagtggaacaaaaacatattatcgatttcttggtcgataataaaaagatagaaaaaagccagaagaaaaattaccgatggaattatgtagaagataaaaaatttccagcaaacgaaactagatcgtcttttttgtcaagattaaaaaaagtaaaaaactgtaatgaaaatgatttcctatctaaagaaaaagaagttgcattatggcatattatttattcagtaaaagataaaaaagaatatgaaacagctctagaaacttatgcctctaaatacaatttagatgtaaattcttttgttgaagtatttgtaaaatacccgccatttaaaaatgattatggtgcttattcagaaaaagcaattaaaaaaatattgcctttaatgagaatggggaaatactgggatgaagaagctatttccgatgacgtaaaaaatagaatactacaaatacaagaaaggttagaaagtataaattacgacaaagaagtttttaatggggataaagaagacagattgaaaacgattgtcgatgatgaaatcccaagacagtttattaaaagctttatcgatttcaaggataaaaaccctctcacaggtttaaacacttaccaagcttgctatgcagtttatgaacgtcattctgaatcaggtctaatcaaacaatggaaatcgcctaatgatatagacacctatttaaatgaatttaaacaacacagcttaagaaatccaatagttgagcaagttgttacagaaaccttacgagttgtaagagatatttggaaatattatggaaaaggagcatctaatttttttaatgaaatacatgttgaattaggtagagaaatgaaaaactccagtgacaaacgtaaagcaatgtcatctagaaatatagaaaacgaaaacactaagcaaagaattaaatctttattagaagaacttaaaaatgattcagaatatgatataagaccatattcaccaagccaccaagaaatattaaaaatttatgaagaaggtgtttttcaaaacccagaggtatctttctctaaagtaaaagaagatgaaataaataaaattagaaaaagtaattctccaacaaagtcagaaattaataaatataaattatggctagaacaagggtatatttccccttataccggtcaaataatccctttaagcaaattattttctattgactatcaaattgaacatattattccgcaatcacgttactttgataactcaatgagtaataagataatctgtgaaagtgaagttaatcagttaaaagacaataaaactgcttatgaatttttaaaaaatgaaggaggcagagttgtcacattaagtaatggaaacaccgtgaagttgtttactttagagaattatgaaaaacattgtaagcaatattttaaacaaaatagaacaaaactaaacaacctactatcagaagatattccagaagggtttattaatcgtcaattaaatgatagcagatatattagtaaaattgtaaaaacactcctaagtaacattgtaagagaggatggagaaaaagaagcaaccacaaagagattagtacctgttactggagcaataacctctaaactaaaacaagactgggggctaaatgacaaatggaacgaaatagtagctcctagatttaagagattaaatgagttaacaaactcgaatgattttggagaatgggactctaaaatcaatgcgtttagaataaaagttcctaatgaaatttcaagagggtttagcaaaaaaagaattgatcacagacaccatgctttagatgctttaataattgcttgttgcacaaaaaagcacacaaattatttaggttctttaaactctcaaagagaaaactacggtttaaaagccagtttgttaataaaaaataagcaaggagatttcaccaagcactttcaattaccttggccaaacttcactgcagaagctaaagatagtttagaaaaaacaattattagctttaagcaaaatttaagaatcataaacaaaacaaataataaaacctggcaatggcaaccacaaaaaaatggtacgtttaaaaaagtgttagtaaaacaaaaagacgctacaaactcaaaaaataaaacaaattgggctataagaaagccaatgcataaagaaactgtttctggggctgttaaagtaaaaaggatcaaaaaagggttaagtaatattaccagttatttagacaagccagagttaattgtagataaattaattaaaagaaaaattaatagcttattaattctatttgataaggatttaaaaaaagttagaaaacatttaaaggagacaccacttgtaatagatggcaaagaaattacgaaagtgaaagtgtatgaatggactgaaaatgccactgcaacaagagtagctttaaatgaaaaattcacaagaaaacaactggagtctataacagatagcggtataatagctattttagaaagacacctgcaaaattatacagatcaagattcaaaagaacgtttcgacctggcctttaaccctgacggtatagatgctttaaacaagaatataaaagcgctaaacaatggtaaaaaccatcacccaatttataaagttcgcttgtatgaagaaggaagtaaattccctgttggagaaagtggtgctaagtccactaaatttgttgaggctgctaaaggaaccaatttatttttcgcaatttattatgacaaagaaaaagataaaagagtgttcgaaaccattcctttaaacgaggttattgaacatcaaaaacaaacagcagcactacaaaaagataaacgattgccaatacaaccaaataacacaaaaggcgagtttttatttacactttctccaaatgatttggtttatgtgccaaccgatgaagaaattgaaaataattcgttagtagatttcaatcatttatctgttgatcagatatcaagaataatggtcgttaatgatttttgggatattacatgctatttttctccaaatcaattagcgtcttctattgctccaaaagaagtagatttaagctataatcacattaaaaaaaagctaactggttcttatgacacaaaaacagctaagtttaaaaacagatcaataaaagatatttgttggaaaattgatctagatagattaggtaatattataaagtatgctaaatagagatgataaaaagaactatttacatcggtaatccttcttatctaaaaacaaaacaaaaacagttagtagtacaggacccagaaactaaagaaattaaaggaacggtacctgttgaggatatagccttgttaatgttagatcattatcaaataactatttccaatcaattattaatgaagcttcaaggcaataacgtagcagttatttcttgtgaccaacatcatttaccttttggtttaatgctgccaatggtcggtcattcagaatattcagaaagaataaagtatcaattagcagcctcagaacctttaaaaaaacaattatggaagcaaacggtagagcagaaaataaaaaaccaaaaagcacttttagatataaataataaattctccgaccctttagaagaatataaattaacggtaaaaagcggtgatactaccaatagagaaggaatggctacacagttttattggaaacaattgtttaagaatttttctagagagcgctacggtgaagaaccaaataaattattaaactttggttatgcagtgttaagaagtatagttgctagagctttggttagtagtggcatgttacctgttttgggtatttttcatagaaacaagtacaacccatattgtttagcagacgatattatggagccatacaggccctttatagataaacttgtatataattatgttttaagcaataataactacgagttaaataaagaagccaaagcacatatacttaccattgcaacacaagatgttattataggtggcctagtaagacctttatttgtagcagttacaaccacaactgcaagcttgtataaatgctttaccggtgagttaagacaaataaaatatcccgaactagattaataaaacatgtcttcaaaaagatataatgcttataggattatgtgggttttagtattttttgatttaccaacagaaaccaagaaagaacgtaaagttgcagggcaatttcgtaaaaagctaattgatgacgggtttacaatgttccagtattctatttatctaagacattgtcctagtagagaaaatgcaaaagttcatacaaaaagagtaaaaagaaacttacctaaacacggtaaagtatgtattttagaaattacagataagcaattcgctaatatggaactctttcatggggtaaaagaagtagatttgccccaaccaacacaacaattacaattattctaataggatgtaaaaaatctttgaattaaacttttaagtaattatttaatttaatttttctaattcaaaaaatcagtcccaaactattgattttactcaatattttgggactgaccttgtgattgctcacgtaaaaatacaatttgaaatcaattcacaacctactattttggtaacgacgtaaagaggctcttgtgattgctcacgtaaaaatacaatttgaaatcaattcacaactacttcgttaacgtatagcgggtttttaaccttgtgattgctcacgtaaaaatacaatttgaaatcaattcacaacttatacaatgcaagtagctaccctatatcccttgtgattgctcacgtaaaaatacaatttgaaatcaattcacaacatgctaatgttagtacttgctcataaatagcttgtgattgctcacgtaaaaatacaatttgaaatcaattcacaacacgttaagaatatattaaaaactaacgagtcttgtgattgctcacgtaaaaatacaatttgaaatcaattcacaacgaattgtttaaagaaaatacagagggcgaacttgtgattgctcacgtaaaaatacaatttgaaatcaattcacaacagccagttgtaggcaagcaagcgaaagaaacttgtgattgctcacgtaaaaatacaatttgaaatcaattcacaacggctttcttgcgtatgcttcggcttcggctcttgtgattgctcacgtaaaaatacaatttgaaatcaattcacaacacatagccatttgccatcatttcttcggcccttgtgattgctcacgtaaaaatacaatttgaaatcaattcacaacttacccttgaaagttcttttactaagtattcttgtgattgctcacgtaaaaatacaatttgaaatcaattcacaacggtttgatgaagcttcaaagagcgtagagacttgtgattgctcacgtaaaaatacaatttgaaatcaattcacaacagttaaggcatatacttcgctttttgaaaacttgtgattgctcacgtaaaaatacaatttgaaatcaattcacaacactgtttaaatttatagaatattactgttacttgtgattgctcacgtaaaaatacaatttgaaatcaattcacaacaaaaaaaagaaacttcatttatagatgaaacttgtgattgctcacgtaaaaatacaatttgaaatcaattcacaactaaacgctttgtgttggttattaactctatcttgtgattgctcacgtaaaaatacaatttgaaatcaattcacaacacgtcacctcctggggttatcggtcgactacttgtgattgctcacgtaaaaatacaatttgaaatcaattcacaactatagttatcaacttcggttgcatcacctgcttgtgattgctcacgtaaaaatacaatttgaaatcaattcacaacaatggtaaccaccttgtgtaataaaacttacttgtgattgctcacgtaaaaatacaatttgaaatcaattcacaacgagatactgctccattaaaaacatatacaacttgtgattcaaattaagtttcgaagtttttggttccccattttacttattttactcctgccagttacactgctgctacttctttttatcatgggagtccatcctgcataactacacaattcactaccacttgtaaatcgttcaaaaccatctgtgagaaccaccaacattagggctgttatgtttccaatacctggtatgctttttaatcgggttaatacttcttgatgctcttgtttaactaaaatcaaaagtttgtcttccagcatttttatttctttttgcacttgcttcaaactacgttttaaagagctaacaactgctttactaggatttcctaaaacagattcaccgtgtaaattatttttaaccatggtgctttgttttgtaataacaattctaaaacacataatgtaacaacgtttgcctataattgttaaactaatgttttaatacaaagtagtttaaatactattttgtacatttgtaagatactatataatacatacagaagttaaaaaaattttgaaaacagaagtcaatatagcaaatatcgcccctaaacatctgttttgggatatggatatgagtaaattatctactaaaaaagataaagcacttatcatccctagattttttgtggctacaactaaagaatcctttattaaagatattacacttgtagaaagtatttatagtacaaacgaaatttattccgttttaaaaaacacaaaagaacgcattagtaataatgtatgtcgtttggtagcacaacgatataataaacctttatttttgcgctataagtattagtcatatgagtgcagtatcttcagtgctcttacaaaccattaaacaattacaagcactaccaagcctatctcaattcgcattagcaggtggtacaaatttagcatttcgttttaaccacagacaatctcaagatatagatttattttgcccagaaatagtgggaatcaaacattttgaaactattgaggcagaagttaaaggctgttttggtaaaaccaatattacaggcttagaatatcccttcgataaagaaagcgagcaacatacatatataagattttgggtaaccaaaccatgtggtgcaattattaaagtagaaatcattcaaaacatgaaaatgatggatactgtagaagttgtagatgacgtaaggttggtgacaactaaagatattgggcttttcaaactaataagtggttccagtcgtgcagcaaaaaaagatatttacgatttagattttattaccgaaaaaataaatatcattgatttatacgaagctttaaagcttaaaaaacaaacattcaacaaaaaagaacatcaaaacatttttgatttagacgaagaagaatgtcctactcaaaatcctactctattattaaagtttgatggtaaagtaaaacctaatagaataaaaccaatacactctaatgataatattttaattgttgaaggaggtaaaagctgggtaagagttagaacgagttggcgtataaaagtacgtagattatttaatcatttaggcatagaatataagtagttactccacccaaaaaaaacccggtccgaacgtttagaaaagacacagtgctccttttagtgaaggaatcagtctacgcaagggtaatacaaaaagaaataaactttgttgtatattttaacctgagcacttccgaaagacacccagtcgcattgttagttttatgtcacaatagttttagccaacgctataataagttaactatgttacctacaatatcatccttattgccaccagtaacatatacattttcattaccctcttttttatttaatgatctgtaaagtactataaccagatccacttttttctagtctaatttgtgtggtaatgcgttcttttaaggcttcgacatgggagataactcctatggatttatcgccttcattctgcattttttctagaatagtaatagcctggtttagcgtttctgggtctaaggttccaaagccttcatcgataaaaacagattctattttcacattcttggctgccaagtctgataaggcaaaggccattgccaaactcaccataaaggtttctcctccagatagcgtgttaatggtccttcttgcgtctccttgatgcatatcaaacacttttaaagcatcgttcttatccgcttcttcggcagttggaatgtctaaaacatagcgatcactcaaatcttttaatcgtaaattggtgtagccaattaattgctctagggtaagatcttgcacaaaatttgaaaactttttaccatttgcatctccaatcaaactattcatggttttccaaagggcctcctctttttttaaggactttagttctgcaagtagttcttcttgtttggctataatttttttatcggcttccaatcgggttagaatcacaccaatctgttggtttgtacgcgcggattcttcctcgagtgacgtatatttattttgaagctcctctaagctgtcttccttggtaattgcttttttaaacccttctagttcttttaaggcggcagtctgctctgtttttaaacgctcttgttttaattgcagagtgttttgctgacgacggatgttttcggcttggctttcactaaggatattggtttttaactcctgaaggctgtttataccttcctgtttcagaatgtcttttagcaccgtttcaaaagcggaacgctctttagagacctcttcaattttagcgttaagcgtggctatggtttttgtggtatgacttcggttttgtgtgtttgccgaccatctgtttagcagtgtctgaatggtctccagaagtccgtcgccttcataaagcgcctttcttttactttccttctctgcttttaacctggtcttttcttcccacagtttggctgctatttttaaatctgtaataagatcacgcaaatgcagtgctttttttatctgagtaagttttttagagtcctccaaaacctgggcttctaagctttcgatagcggcactggtttttactgttgcaacctctaggctagcacataatttctctatagcggtggctttaggctgcagcgctttttcagcttctaacagctctttttgaagtcgtttactggttgcctgatcgctttttaatagcgcttgaatggatgcctttaactcgcgttttgtatgtaacagctcctttttagagcgtaacacatcggctttcacatcaaaaaccggctgttgagaagcaaaaggatgctctagggctccacaaagtggacaagcctcaccgtctaccaattggttacgatgggcttctaaactttgatgtgttttgcggtgttcctcctctttggtgagtttggtaacctcagcatccaatacaggaagttccttatctaagtcttttaaaatagcactgtgttttaccacctgcgcctcacttccttttaattctgtttccttgctttgcttttgctggagctccgattggtacttggtgaaagcaacatttaggctaccaagggttgccaagctctcatttactttgttttctcttgcttctaattggtgcgtcgtatctacctgagcggtttttaaaaagccaagcactttatcttctacgggagtaacacctgttacaaatgtactgggttgcccatcaaaaggaattctcaccgtatctttattaatatcaccgagtaactttttaatagcatcctcatagagttttgcttcggcttgcgccaaatcctcatctttttttaaagcggtataggtggtatttaatgtatttaaagcctgattaaattcgctaggctctaccgttttttttaaaagtgttgttgcttgctgaagcaaatcgttatagtcttttaacaccattttttcatgtgctgtttgcttgctaagctcttcggtatgttctttaagtgctttatccttttgttcgtaatcggaaatcagcggtgtatgcaccacgtacttcgcgtgtttttgtaatcgggattcctcttttttaaacgcgtctaagtctttagctaattgtttctgaaggtcgttattagcctttaaaaccaattcatttttaaggatgccttttttattatcgatctcggcttttaaaacctcaagggcttttttctgcgttgtttttgcttttgtcaactccctttcctgggcaattagtttggttttctcttcttctgggagcagttccacttcccctaaacgtacctcctgcttttcacaagcatcttgtgcttctttaaattttctatacacagcaattccaatagacctatagtctttggctccggtaatatcctctagcagcttattacgctcatcgcgtttggctttaagtaatttactaaactgaccttgtgagagtacaattgcttttacaaattggtcgtaactcaggcctattaattcttcattttttgtgggaaccgaggacttaccactttcaataatagcaccagtagtcacatcaattatctcttgttttctgtcttttaaattattgtttctattgcgttcaatagaccaatgagaacggtaggttttcccttccacgatatactcgacttctgcgtagcagtccgctgcatttcgagtcataattcctccttgatcttctataactgctttgctaatagcgccaatacgaggcactttattaaacagcgcaagggtaatcacatccaaaagggtagatttcccagagcctgttgctcctgtaatggcaaagagtccgctctccgccaaaggcccagaagaaaaatcgatatgatgttcgccacgaagggaatgaatatttttaaaacgtattttgctaattttcataaggatacttacagatttagttcttctaaaatttgacgaaaggcattttttagagcttccgtgtcctcctgactcccatccatctccaactttttctcaaacatttccatgggtgtaacatcggcaacactcactcctggttgaaatccttcggaagcaccacggactttattggtaaaaattaatttggtttttacaatctctagatgttcctgattaaaatccgcaaccaaggcatctaaatcttgtcttgtttgaatattttcatcagcttcgacaacaataatttccgctaaggactttaggggcgttttatgtttataggtttttaattgcgaactaacttccttgaaagttccttgaaaagtgactagatttctaaattttggaataggaaggatgcttagttccatagacctcccatcagtagtaataatattcacctgcttggtttcctccttctcactaaaacttaaagcaacaggagacccggaataatagatatgtttagagggggatactggatagggtttatgaatgtgccccaaagccacatagtggggatcatcgccaaaaatagcgccagaaacacctgcttgattccctatctgaatgtctctcatactgtctgaaacatgcgccccttgaacatataaatgccccataactatgaagaaagtattagggaaatgttctttataatagttatttacctctgcgtaataagcttttaaaccacctttaatctgtgctattttatcactataagattctcctgctaccgatttgcgaatatcgcgatcttttaaaaagggcactgcagcaaccaccacagtttcttcttcttttgtataactaaagaacaaatcgcttatcgcttctggtgcaccaccaactacatcgacatccaagacacttaatatatcttttggagcgtttaataccgaagcagaatcgtgattcccacctgtgataagcagtttacaatcggttgctagcatccgttttaaaaaactgtaatattgttttaatgaggcttgtgatggattggcttgatcaaacacatcaccagagactaaaagtaagtcgatgttctgttcttttatggtggttagtagccaatcgaaaaacaaatcgatatcttgagatacatctgttttgtgcaactgcttaccaatatgccagtctgaagtgtgaagaattttcatataaaaacgctaaagtgctttatttaaatgtgttaaacatccttgtgaaaaaataaaatattaaaatggcattatagtacgaggttcctacaagtaactcgaataaaattaagctatttaaatactaaaggagattccaaaatactaagttatatagaattttatacataaataccataaaaaagtgaaagtggaaattctaataaaaataattacttccattttcataatcccagcagcatcctacttccatgtatctaattaaggtactgtaacatttgcaattgcacttgtgttctagaaatcatgacaacaaagcttaagcttttaggttatcctgataagaatgtcccttaatttagtctttttctttaaagtcttcactagtaatttaagccctctaattgaaatataagtttcttctatataaaactctactataactacctgtccccccacacactacatcctcttaaaatattttaaacaaacttccttggttttaaaaagaaattattaataagtttgtggtgtaaactttaggggtgttctaaataattagaactgagaaagaccctttgaacctgatctggttagtaccagcgaagggaaaagttagcaatacatcatctaaatcgatagatgtatttatacactttttataaaagtacagtgtcttaacctgtgctttcatttcaaatacttcctttctcaaaccctttatcgtttacagcatatttaaaacgatactgtatgatgattactattttggttaacgagaaagcaattgaaatcaactctgatttccatattctacaactgctagataaaataaattcccctcaagatggtattgcggtagccgtaaaccacaccattatttcaaaacatttatggagtgccacaagcttgtctgccaatgacgaggttttaattattcaagctactcaaggtggataatctcttcaattaataaactaacacaactgcaaaaacttttcgatatgaaaaacaaggacactgctccaaaacaaggaacaatcaccagacaagcatttccaaattcaaaaaagatatacgtgccgggcaaattgcatccacagataaaagttgccatgcgtgaaatttc

SEQ ID NO: 1396 - DNA, 14945 bp, synthetic construct
  misc_feature 1..14945: note = Synthetic
  source 1..14945: mol_type = other DNA
tttgctgcccatcatgtgaatactccggatcagtctttttatggaagcggctctgatctgcctgctaagttttctttgatcggtggatataagtttatgctagagaaaggaaaaaccaagggagatataccttctgatgaagatgtttatattactcctactttacattacaagtctcagggaaagtctgatcagcttgatcttggtgtttatggattatatcatagactacttctgggagggtggtacagaggaattcctttattaaaaaattaccgggccgggatacagaataatgaatctgttatacttatggtaggttacaaagtatatcccctaagtatttcttacagctttgactgtacggtttcggaactcaccagagcaggaacaagaggtgctcatgagcttaatattacctacgtttaccattggcctcctaaaaaaagaaagccttacagaaagcttccttgccctacctttaaagggtcgtaaaaaaacattgaagtgtttttcgaattaattagataggtttttcctttcagggatagaatacacttttttatagatttataagtagttttattctctatctgttccttgttatttgcttttaaatctttttaatgttgttcaatcaatcctgatttgtaggataaaaatgtaacgttaacaggaagagaaaatgaattagagttgtcggagttgaatagtgaagtttattatcttaatatcaaataacagagtatatatggtatttaagattaaataataagatacttttgttcaaagtaaaaaggccggctaaatatagcaggcgtttttatttatgatggttctctatgtatgtaacattcccttaacagtaattttactgaattataataatcgtaatgaatggtgtttagttatatgagctacttttgacgctcaatcaaattaaaaaccagatgaaaagattagttacaacattttgcttattgttaagcacattcacttggttgtctgcccagacaactcttatctcattgggctcctcctggaagtacatggataacgggtccaatcaggggactacctggaaagacgcaggatttagcgatgcttcatgggcatcaggaaatgctcagctaggttatggtgatggagatgaaaccactgttgtaagttatggctccaattcaatttctaagtacatcacaacttacttcagaaagtctattacagtggcagatgcttctatttttacaggatataccattaacgtaagaagagatgatgggatagttgtttatatcaatggaacggaacgctatagaaataatatgccaacaggtactattgcatataacacattggcagcgaccacctgctctgatgatgggggaacaattcaaactgggtcaataccttcaggggctttggttacaggaacgaatgtaattgctgtggaagtacatcagtctgacattaccagttctgatatcagctttgatctcgagcttaaagggaatacttcttcagctactgctgtgattcaaagaggaccttaccttcagttaggcacatcatcaagcgttattattaagtggagaactgatattgcgacaaatagtaaagtatcatatggtacaacagcaggcagtttaacttcttcagcaaatgatgctgcttcagtgaaagatcatgaagtgaaattggcaggattgtctgccaatactaaatattattattcaataggttcttctacacagacattgcaaggtgatgcaaataattattttattaccgctcctatagtgggtacagaaaagaaaactcgtgtatgggttactggagactgtggtaacaactcaaccaatcagaggaactcacgtgataaatacatctcttatcttggatctaactatactgatgtttggctgcttgcaggggataatgcttataatagcggacttgataccgaatatcagacgaacttttttgatatctataaagataaaatgttaaagcagactgttttatggccagcgcctggaaaccatgattatgcaaacaatgcaacaagacaaaatgatcataatgttccttattacagcaattttacattacctaaaaatgcagaagcaggtggagtagcctccaatactgaagctttttattcctttaattatgccaatattcattttgtctctcttgactcttatggcaaagaatctaatagctatagaatgtatgatactttaggtcctcaggctacatggcttaaacaagacttggcagcaaatacacaaaagtggacaattgtatactggcatcatcctccctatacaatgggatctcacaattctgacacagaaactgagctaattaacgtcagacagaattttatcagaatacttgagagatataaagttgatatggttatctgtggacatagtcattgttatgagagaacaaaacttattaaaggtcactatggaaatgaatctacatttaatgcaggttcgcataatctaagcagcagcagtggaaagtatgacggctctgcatcttcatgtccatatgagaaaaacgtttcctcctcttataatggtactatatatgtagtctcaggttcttcagggcaacttggaggtacacagtcttcatttccgcattcagcaatgcattattcagatgctaccaatggcggatcgcttgttatcgagatcgatcagaatagattggatgcaaaatgggtttgtgcggatgctgtagtaagagatcagtttacagtttttaaagatgtgagaaagacaaccaatataactatccaatccggacaaaataccacgttgaatgcttcctgggtaggaaattacaactggacgacaggagctacttcacgagcaattacagtaagtcctacaaccaatacatcttattctgtaatagataattttagttgtgtgacggatgtattcaatgtaacagtaattccagcaagaatagctgatctgaattttggaacggatacagttttaactcctgctttggaagtttttcctaatccttttgaagataaaacaactataaattattcaataccttttgctggacaagttaccctatcacttcaggggcttaatggagaattaaataaggttgttgttaaagaatttaaagaagcaggatattattcctttactttacgtgcatccgaattagatatttcagcaggtatttatttgctgaagcttgtctgtggagataaagaaatccagaagaaagtcagtgttgtaaaataaaaagagtttccccctctgtgtttctctgtgtctcctctgtgtttctctgtgtaatataattttttcatagagcagcacaaaggagtcccagggtaatcagagaaaataagtgagtttcaggtttttgtaaatcaggtactgttacttgtgtttgaccttaaattgttttaatgaaaatttaatagaaaatatagtatattagtaggcttcgacagcttaatattcaatgttttctaaagctcattatcctgatattttaatgccggaagatctggatctgtacctggctgatggttggtttcgctgggggcaatccatatttaccacaagttttctgagttttaacagtcagttttacagggctatatggcttagagttgttctttcggattttaatgatgataagacttataaaaagctttccaggttaaataattcttttagggtggaggtacagaaagcatcaatcacacctgaaaaagaagaactttttcaattatataaaaaaggaattacgtttaaggtctcagagtcccttgaagctcttcttttcggaactgatcaaaaaagaatctacgatactcatgaagtatgtatatatgataatgaaaaactcatagcctgcggtttttttgatatgggaaaagatagcgctgcaggtatcaacagtttttataatcatgaatacaagaagtatagtccgggaaaatatattatttacagtaaaatgatgtattgtaagaatttaggattgcaatacttttatcctggatattttgcaccgggatattcggcatttaactacaaactggatatcggaagaactgcattggaatatcttgatactgccagtgaacaatggcttcatatcaatacttttgattctgttacaggatctgtaagtgagatgagagaaaaactatccaatctggcagaacatcttaatgctgcggatatagatgcaagactactcacatacagatattttgatgcaaaccttgtggcagactttaacggatacaatttgtttgattatcctatgttcatttattgtcttgagtttgttcctgaaataatcaatcctgttattgtttatgatttccgggatcagcattatcatttgatccgaaatatgagtgtgggaatggctgataaaatagaagatcattctacagaatattcagctcatttgatgaaaccaaggcaagtaattttctcttccgataatcctgagatgatggccaacatgattgcatcagcattcagaagagatgttaaagctgaaagcacaaagcttaaagcttaaagtctaaagctgaaagcacaaagcttaaagtgaactgcaatttcaatcatcaactaaccttatactcgacttcaccctaaatctctcctgaagagagaaattttggatgaggtcgagtagtatatcctttttaattcaggtatttttatcgtcgacggttcccttctcctttaggagaatggttagggatgaggttcatcggatttgatacgggtgttaaatatctaaacatattttattcttccagccctgtagcgatcagaagatgggcatagtgatgttttacatgccacgcagccattgcaatggcttgtttctggtttagtgtgatcttgcggaaaggatgataataggataactcaagttgctcaggagttaaggatcttattaaaaaagcaaagcgtttagctatgccttcaaacatcaacagggaatcgtcaataggtgagttcatgttatctcgggtgtgagcccatgcatctatattgatcaatgtgatttccttatagtcattttcagtaattgctttcttcattctgaaataatgcactaattgaatatcagccacgtgattatataattgatgaacattccaggagccttcacgatacgttttggccaggtctgaaggtgaaaggcgtttagccagttcacgatacttagaaggcgcttcttcaattgtttttactaatgcatccagctctgcagtactcaggtctgaaggtgaaacaaatggacctattggaaatttaagtttggatagttcggtttcgggtatcatgatgatttattgtattagtattaattgtcaattttaagtctttttgggattcttccaaatttcctttgtgaaaaattgaaggagatcaagctgataatggtttttccacctggctgtatttacttttctattgatgtccggtttatccttactgaagtcaatttgaagtaaaataaaatgccaattggattgcataaggaaaaatttttttcaaaaaactaaacaatttttattctgattggttatgcttcccggtcagaacaattagtggttttgataaacgttttcaatcgtcggagaaataaaagttttttaagtatttaatcgattttctactcaagattaaatttcaggcagtatgtattttttctaaataaggactaattaatcaatatatttctaaatttttaacctcaaacactatgaaaaaaagaagatggtggtgtcaattgttattgacaggtcttatttcttttggctctgtttcagttaaagcagattcaaacgtaccatgtggcagtggaacttctcagacaatagttctcggaacaaattgccagaattgttcggtattacaaccctcacttgcggtggatgatgataccaattcattctcgaccataaagctggcgccggatatccattatgggtatgttgctcaaagaatcaagttctcgtcggcaggcagtaagaaggatcagataaaaatcaaattgtcattttctgatccggtttacgatcgtaatttaatttcaaatatttttatctcaacagtggtgggcaacaacatcaatacagagagggtaaatttcaatgacaatgatgtgaaactgttctggtcttctctccaggatgtcatagttatttttaatcctgatgaaaactttcaaggtgttgaagtttaccttaaagcagaaaataacaataaggtcagaacagttcacctgcattatgctacagtactgcttgctgcacctgtagttcaaaaagaacaagtgacaacctgccagggccaacctgcagtattacatgctacaaaacctgtgggagcaacttttaagtggtatagtcagaagagcggaggcctgccggtctatacaggagctgactttacaactcctgctatcacttctgaaaccacttactatgttgaagcagtatacaatggttgttcaacatccaaaagaactcctgttattattaaaacaactcctttacctgaaaagccgacggtaagtaatagtatgatctgtagtggacaatctgcaacgcttgttgcttctgtttatcagccttctattcttaactggtatgatcaggcttcaggtggaaatgtaattgcaagcggcacatcattttcgactcctcctctttatacttctacaatctattatgtagaagcttccaaaagcggatgtgtttcaggcagggttccggcacaagtgaacattcaaaagaaaatatctaaagtttgggacaacacagtttcaaataccatcaataatattacacgttccaatgacagtgcatatatccttgcaggatatatctatgcttcaggaaatacttattttaggaaaacaaaaacagaccttgcgggaaacgtcatatctaccgaacaaaccttccttcgtaatggacctattacgaacttcataacacagaatctttcggataaaggttacatctttgccggcacccaaaatattccatataatttacttgtatataaaatagatcaatcaggaaatatttcctggtctctggatataccggccaatggccatcaaaatggtatttcctctgtcatagaaaacaatgatggtacattactgctggctggatatacatccaatactaatggaaaacagtttgatttctggattctgaaagtagactacaacggaaatattctttggaccaaaacctatggtggaccaaaagaagagatattaatatctgcaattgctgttccggatggtggttatgcattaggtgggtatgctattggtgacacttctcagcgtgcatggttggtaagaataaatgattccggggatatactttgggataaaatatatagtaaatcatatatggatcagatccaaagcctcatcttaacaccggaagaaggttttcttctttatgcgatggattatgagcacacagaccattggattatcaaaacagattctttgggcaatgtaatatggaataaaatctatggcgggagtaattttgactatcctgttactgtcataccagcttatggtggaggttatatagccggaggatatacaagatcatcgaatggagacatctcagatggtaataatggagatgatgacctatggatatacaagattgacgatgctggtaataaaatatgggatatcactcttggtggaagcagctctgatcgtctgagttcattatttaacaataatgatggaagttatcttctgggggcatattctttttctggtcctaacgatggagatgtaacacatggtccaggggactggcttgtaaaaatagtagagtccaatggcaattgtgcagcaagagaagcaaaggaaaacgtagcagaagtaaatacagtttcctataaaactactgcatatccaaatccatttaactctaatataaatcttgatattactgctaatgaagctggaaatttacacttgcaactcttttctattgaaggtatactgctaaaggatattcaacaatatgttggttcaggacaaggaacagtttctttaaaaactgacgaaatgccagctggaacctatattgtaaagatgatgctgaataaccaggttgttactgaaaaactaatcaaaaataattaaccagatcattactcccagtctatgtatgtcagattgggagttctttttattcaatccaaactttgtcatattgagcatgcgaaatatctgagctttcccaaaggaagaagtttttctatctgacagatccttgattgaaattgcaaatttattttatgattatcagatcccttcgcgggctcaggataaacaaaggaaaattatacactcattccagccactcaggttcttctaacttaaaatactcaggaaattttgtgccggattaagcaactttctataaaatagattatgagcagagatccggcacatactgattaaatgacatatttagttgccggatcactccaggcactttgacctgctgatgccactgcagccactttaaaccaatattttttcccgctttccagattctttatagtagcctttgacttggtagagatagtagcaacactccagctatcatctttgctcaggtctgttgtaagctgtacaacataactcttcgcaccttttacagattcccaggagagttctatttccttttcattggccgctacagcctgtaatttttccggtgctgaaggaattcctgtaggagttttgggggcatgtactctcattcccgcttgcttaattgttatttcatctccctttgcagtgctttctacataagctgccaattgattcagaacagcatcaagctctgaagatttatcatctaaaatactgagcttagttgaaacagtttgtcgcgctagctttacatctgtatgtgctttttccagttcgccaatagcagtactcactgagttcagcgatggaatgggggaagggaaaagttcattttctgtaagtgcttgtacaatctgtcttgagagaataagtttttcttctaccgaagaacctctaaggttaagcttaaccttggcttttttggttgtggacatagctgatatgttttagttgttaaaaaaatgatgggacaaaagtttatatatcgctaaacaaatgcaagaattttcttaaaaatatttttttggcatgtgtttatctatcaggttattttatgattttttatagataaaaacagtctctactcttatataataaaaaatagaaattaagtaagaattaaaaatgtctgtgtccaatccaatttcattataattatctcaatcatctgtccggaattttaaaaaaggtttacaaatattccttaggacaaatcatcatattcaaattcattaacagaaaaaagaaattacaagcttgccaaatgaaatgacaggtttgcaaattgaaattacaagctttcaaaatggaattacaagtctgcaaaacgaaaatacaagtctgaaaaatggaattacaaatctgcaaactgaaattacaagcttgcagaataaatttacaagacaggaaaataaaattcccaatcaggaaattgatatctcttcattgaaattattttattctctagtgaggtgatatgtgtatatgtggtagtactggtaatcctgtgtggaatttgttttgatcgcagtaactttaaatcttttaagaggcgggagtaaaatggatggccatatgtgaatggggaataaaaaaagccccgtattgtaagacgaggcggcttatatgttttcacaacggaataatccttattgtgatttgctttcactagcaaatatatataaatttaattttattcaaacaattttcgctggttagataggacatttttaaaaacttaattataatgaaaacagttcttggtcttgatttaggtacaaactctattggttgggcattgattcaacatgattttgatagtaaaaaaggtgaaatacttggaatgggtagccggataattccaatgagtcaggatattttaggtgaatttggaaagggaaattctgtttctcaaacagctgacaggactaaattcaggagtgcaagaaggctccgggaacgtcatcttttaagacgagagcgtttacatcgcgttttaaatatccttggttttcttcctcgtcattatgccgctgatattgattttgaaaaacgattagggcaattttttgaaggaaaagaacctaaactagcttatgacaacaatcagttcatttttacaaaatcctttggaaaaatgctggctgattttcgtcagcatcagcctgattttttaaaggatgaaaaaagtaatgatttattaataccttatgattggtctatttattatttgcgtaaagaagctttaacaaaaaaaatagagaaggaagagcttgcatggataattctcaattttaatcagaagcgtggatactaccaattacggggagaggaggaagaggagaatttaaacaagttggtagagtttcattctttaaagattatagatgtagttgcggatgaaaaacttaataataaaggtgagacatggtattcgcttcttcttgaaaatggatggacatacagacgttcaagtaaggttccattatttgattggaaagagaaagtcagagattttattgttactactgatataaatgatgacgggtctgtaaaaacagataaagagggaaatgaaaaaagaagcttcagagcgcccagtgatgatgattggactttactgaaaaagaaaacggaacaggatatcgacaagtcaaggaaaccaattggggcttatatttatgatgcaatacttaaaaaccccaagcaaaaaataaatggtaagcttgtacgtacagttgaacgtaaattctataaggaagagcttaaactgattctacagaagcaaaaggaatttcatcctgaattgcagagtacagatttgtataatgaatgtattcgggagttgtataaaaataatgatgcacatcaattacagttaaataaaaaagattttgttcatctatttttggaagatattattttttatcagcgtccgcttcgaagtcagaaatcttctgttggtaattgtcctttagaattcagaaaatttaaagatagtgaggggattgagaaggtagaatatttgaagacaattcctaagtccaatccatattttcaggagttccgcatttggcagtggatgtataatctttcaatatacaagaaggatgatgatgaaaatgttacccgtgattttctgaaaactatagaagattgggaggatctattcgaatttcttaatcatcgaaaagatattgagcaagagacattgttgaagtttttgttaggaaagaatggggtaaaaggaaaggctcttaaagtagaagcagggaaatttcgttggaattatgtatcagataagatttatccatgtaatgagaccaaagctcttattatttctaagcttgaaaaagtaaaaggtgtagaggagaaatttttgacagaagagatagagtataagctttggcatcttatttattctgtaacagataaagttgagtatgaaaaggctctaaaggcttttgctggtaaacaaaagttggatttggtttcctttgtagattcatttaaaaggtttccaccatttaaaaatgagtatggtgcttattctgagaaagcaattaaaaagattctgcccttattacggacgggaaaatcttggaattggatggctattgatagcaaagtaagggatagaatcaataaaataattactggagaatttgatgaagaaataaagaataaagttcgtgagaaggcggaaaagcatagtttaaagaaggaaaacgattttcaaggcttaccattatggttggcgcaatatgtagtatatggaagacattcagaagcaagtttttcaggtaaatggaactccgttgatgatttaaaaaagtatctcgaagaatttaagcaacattcattgagaaacccgatagtagaacaagtattgacggagactttacgggttgttgctgatatttggcaattttatggaaagggagaaaaagatttctttagtgagattcatattgaactcggaagagaaatgaaaaatacagctgaagaccgtaaagaaatgagtgccataatacaggcgaacgaaacaactaaccttagaataaaagctctattaaatgaactgttgcaagacaagaaggtggaaaatgtaagaccttattctccttctcaacaggaaattttaaagatatatgaagatggcgttttaagttctgatattgaaattccagatgatattcagaaaatcagtaaagcagcccaaccaacgaaatcagaacttcagagatataagttatggcttgagcaaaaatatcgatctccatacactggagcaatgattccattgggcaagttgtttacatctgaatatgaaattgaacatatcattcctcagagtctttattttgacgatagttttagtaataaagtaatttgtgagtcggccgtcaataaacttaaagatagtaggttgggaatggaatttataaaagaatgccatgggatggttgtggaaacaggctttggtaagtcggttactgtttttgaggaagaaacttatagagattttgtggttcaaaattatagtaagaatcattccaaaaaaagtaagcttcttttggaagaaattcctgagaagatgatcgaaaggcagatgaatgacactcgttatataagtaagtttatatcatctgtattatctaatatagtgcgtgaggaggtcaatgatgatggagttaactcaaaaaatattgttccgggtaatggtaaaattacaacacagttaaaacaggactggggtttaaatgatatttggaatgaattgattttaccacgctttgaacgtttgaatgttttgactgattcaaaacattttacagcttggagtgaaaatcatcagaggctattgccaactgtaccgatagggctttctaaaggattttccaagaaaagaattgatcatagacatcatgctttggatgccttggttatagcctgtgcctccagaaatcatatcaattttttgaacaatgcacatgcaatagataaaaagaaaaattcggaggaaaaacaaaaatttagacatgatttaaaagcgattctttgtgataaaaagtatagtgataaatccgaaaagaattacaggtggatattcaagaaaccttgggataattttactattgattcaaaaaacgctttggataaaattattgtaagctttaaacaaaatcttcgaattatcaataaggcaacaaaccgttatgaaaaatgggtagatagagatgggataaaagtaaaagaatggcataagcaagaaggaataaactgggctactagaaagcctttgcataaggatacagtttcaggtaaagttgatttaaaaagggtaacagttccagaaggaaagatattgaccgctaccaggaaaagcttagatacatcgtttgacttgaaggtcattgaatctattacagataccggtattcaaaaaattctaaaaaattatcttactagtaaatcaaataatccggagctcgcattttcttcggagggtgttgaggatatgaataagaatatcagaaaatataatgatggaaaattgcatcaacctatatataaagttagaatatttgagttggggagtaaatttccattgggacaatttggtaataaaaagtttaagtatgtagaaacagcaaaagggactaatcttttctttgctgtatatgaagatgaaaataaaaataggaattatgaaacgattcctttaaatgtagttattgaaaggcaaaaacaaggactctcttctgtgccaataaaaagtgaaaaagggcataaattgttattctatttgtccccaaatgatatagtctatgttcctggtagtaatgaagaattcagtatagataggctttatagatttacagattccagcgataagactgctaattttataccacttagtgtttcaagtttaatttttagctcaaataaaaatgagcaaaaaaaaatagggattagctatccaattcaagatgagtttggtctaggaagtccacagtcaaaaaatcaaaagtcgatcgacggaataatgattaaagagaaatgtgtaaaagtgaatatagacaggcttggtagggtgtcattttgatatgatattgtaagtaattcggggaagaactattattatttggaataatccactatgctaatccatttactgattttttagaagtcttaaagtcttttctaatattaggaagaggctcaatgttgatttatagtcttttatatctatatacaatatggatgctaattgtatatatcatcttaaaatgaaagaaattgatgaattagattttattgaaaataatgaagagctaagagttattcctaattatccaggttatatcacaagacaaagaaagaagaacacctgttgtgatttgctttcaaacaacgatctttgaattatcggaaacaactcatctaaagatgtaatcaaccgctctactgttgtgatttgctttcaaacaacgatctttgaattatcggaaacaacccacaaaaaattaaattgaaatagagatcgttgtgatttgctttcaaacaacgatctttgaattatcggaaacaactacggaaagtacacagatggtcaggaagtgttgtgatttgctttcaaacaacgatctttgaattatcggaaacaacagttcgttctcttgcaatat

SEQ ID NO: 1397 - DNA, 14944 bp, synthetic construct
  misc_feature 1..14944: note = Synthetic
  source 1..14944: mol_type = other DNA
atcatgaaccaggtattcgatgtaatgcaccagcattttcaagccaacaccggccaggccggaactcaggccgaccaacatacccgaaagcagtaaaaactggctgcgcgacaggttatcgcggatccaaagcaggatcacctcgtagcttttggccttgaggaggctttcctttctaaagctctttacaagttcgatgaactggaggtacttctttttacggtggaaatctgtcaacttaaattgggttggattcagcaaaaatagggaaaataaaaaaggcgagttgtcccgccttaaatgttttcacaacggaataatccttattgtgatttgctttcatttcaaagaaaacatttttatattacaaaaccaaatacaaattataatgaagaaaattttaggacttgacttaggtactaattctattggatgggcacttataaatcaggattttgaaaattataaaggagaaatactcggtttaggaagtaggattattccaatgtcccaagatattttaggggaatttgaaagaggaaactctatttcacaaacggctgaacgaaccaggttaagaggtgcaagaagattaagagaacgccatcttttacgtagggaaaggctgcacagaatattaaatgtacttgggtttcttcctcaacattatgctgataaaattgattttgatgtacgtttaggtcaattcctaccagaaatagaaatcaaattggtttatgatgataatgggaattttatcttcaaagaatcttttgaagaaatgctttcagattttaaaagttttcaacctgaattactgaacagaaaaaacaaaaaaggtgaagatgcaaaaataccttacgattggacgatttattatttaagaaaaaaagcgttaacccgaaaaatagaacaagcagaagtggcgtggttgcttttgcattttaatcaaaaacgtggttattatcaattgcgcggcgaagaggccgaagaaaagccgaatagactggaagaattttattcgttaaaagtacttgacgtaaccgcagatgaaccacaaaaaggtaagagtgaaatctggtataatgtcattttggaaaatggttggatttaccgccgtgcaagcaaactacccttgtttgattggaaagataaaacacgtgattttattgtaactacagacataaacgaaaacggtagcgttaaaaaagacaaagaaggaaaagaaaaaaaaagttttcggtcaccaaaagaagatgattggcaattgctgaaaaagaagaccgaaaatgagattgaaaaatccaataaaacggttggcgaatacatttataacatacttttaaaaaagccaaaacaaaaaataaagggtaaacttatacgcaccattgaaagaaaattttacaaagatgagttagagcaaatcctaaaaaagcaaattgaattgcataattcgttgcaagataaaaatctgtatcaaaaatgtgtagaagagttatatccgcacaatttacatcatcaatctacattacttaataaaggttttctacacctttttattgaagatttattatactatcaaagaccattgcgcagccaaaaaaattctatcagcaactgcccattagaatcaagaacctttatactcgaaggcgtaaaaaaatagaagctttaaagtgtatttcaaaatcacatccattgtatcaagagtttcggttgcggcaatggataagcaatgtgcgaattattaatagagaaaatgatgttaatgaaacagaaaaatatttacaaacgattgatgattctactgccttatttgattttttgaataaacgaaaagaaatagaccaaaaatcgttattgcaatattttaaactaaaagaaggcagctatcgctggaattatgtagaggataaaaaatatccttgtaatgaaactcattctatgatagcgggtcggttagaaaatgtaaaagacttaccacaagaatttttgaataaaaaaaaggaagaagaattatggcatattatatattctgtaactgataaaattgaatacgaaaaagccttaaaatcttttgcagataagaacaatcttgatttagagagtttttacgacgcatttaaaaagttccctccgtttccaagcaattatggttcctactctgcaaaagcaataaagaaattgttgccactaatgcgtatcggtaaatattggaatgaagaaaatatagacgaaaaaacaagagacagacttacaaaaattattaatgctgaagtagatgaaacgatagaagaaagagttagagaaaaagctaaaaacttaacccaaatagaacattttcaaggactaccagaatggctggctaagtacgttgtgtatgatcgtcattctgaaaaaagcgatttagggaaatggaaaacggttcaagacttagaagaatatttaaaatcgtttaggcaacatactttaaaaaacccaatagttgaacaggtaataaccgaaacgctgagaacagtaaaagatatttggcagcattatggaaatggcgtggaaggtttttttgatgaaattcatattgagttaggtcgcgatatgaaaaattctgccgctgaacgagtgcgaattacagaacaagtaactaaaaacgaaaataccaatctccgaattagagctttgttagccgaaatgctaaatgataattctgttgaaaacgtcaggccgtattcgcctacccagcaggatattttgaaaatatatgaagattttgttttaaactccgcttttgaaatacctgaagatatcgaaaaaatcagcaaacaagcacaacctacaagttctgagttgcaacgttacaagctttggcttgaacaaaaatatcgttcgccttatacaggtgaaattatcccattaaataaactatttaccccggcttatgaaatagaacacattattccgcaaagccgctactttgatgatagctttagcaataaagtaatatgtgaaactgctgtaaacaagttgaaagataatcaaactggtctgcaatttatccagaattatcacggacaaattgtagaattaggcatgggcaaaactgccaaggtttttacagaagaagcttatacagactttgtaaagcaacattatgataaaagcagagctaagaaaaataaactgttagcattggagattcccgaaaaaatgattgaacggcagatgaatgatacccgttacatcagcaaatttatcatgcaagctttatcaaatattgtaagggcaaacaaagaggacgatggcgcgaactctaaaaacgtgttggcaagcaacggacaaattacgacaaagcttaaacaagattggggaatggatgctatttggaatgaactgatactacctcgttttgaaaggctaaatcaaataacgaatacgacacattttacagtttataatgataagcaccaaaaatatttacccgctgttccattagtattacagagaggtttccaaaagaaaaggatagaccaccgccaccacgctatggatgcactggtaatagcttgtgctacacgcagccatattaactttttaaataaccaaaatgctttagaaaaaaataaatctataatgcaaaagcaacaaggccgcttggatttaagaaaaatattatgcgataaaaaatacaacgatggctcatctgaaaattaccaatggatatttaaacaaccttgggtaggatttatccctgaagcaaaaagtaaattagaacaagttgtggtaagttttaaacagaatttgcgaatcattaataaaactatcaatcaacatgatattataaaagatggtgaaaaaatcaaggttaaacaaaaaaagggggaaagctgggcaatacgaaaatcactacatacgcccatgccttacagtaaaaaaacttacgagtttaatgttttgaaaattgctgagaatttaggtaaagctaactttattattgatcttgctattaaacaatatgcggatgcaatattaaatcagtttaataataaaataactgaagcgcaaaagttcattaaagcaaatccaattaaagatgagaatggaaaagaatgtattagtacaacttttaaaattccaattgaaaagtttagaagacggcaaccaatttcaaaattgtctaacagaggacagggagggcttaaaactattgatgaagtaatcaaatttattaataaggtggctgatattaagcttcaacaaaatttacttaatcatttaaaaaataatgataatgacatagataaagcgtttaatgccgatggaattgagaagtttaatttattaagaaaaattcccgtatataaattgccaatctctgaaaatggctcaggtcgttttcctgttggccaaaagttaagcactaatcacaagtgggtagaagctgatacaggcactaatctcttctttgccgtatacgaagatgaatttggcaatagaagctttgaaaccgttcctttgaatgaggttgttgtacatcaaaaattagatgcaagcttatcaaaaaatgatagaaaacagtcttcacctattcctacaaaatcagacaaagggaaactattatttaccctgtcaccaaatgatttagtttacatacccaccaaagatgaattagagaatcatcaaaatttaaatttcaaaagcatcaaacagtcaggacgtatatataggtttgttagttgcactggcagtgaaggacattttgttcataataattattctacaggcataattaacaatgagcatggtactaataataaaagtgaacgaatgcttgattttaaaaacactccctctttctctgatgaaaaaggaaaaccacaaatgattaaaaatagctgctggaaaatagttgttgataaaattggaaatattaaatctgttttaacatgatcaaacgcaccctccatttcagcaacccggcctacctcagcttaaaccaaaaccagttaaaaattgacctgccacatctgaaagtactgggcgaaaaagagtcggtaaaaacagtaccggttgaagatattgggattgtagttttagaccaccagcaaatcaccattacgcatggttgtatggccgcactgctggaaaacaatgctgccatcatcacctgcaaccatacgcaccacccaaccgggatgatgctgccgattgacgggcacgacatacaaagcgagcgtttccgctaccaaattgatgcctcgcaacccttaaagaagcaattgtggcagcaaaccatacaagctaaaatacagaaccaggctgcggtactggccgaacgaggtttagaacatgaaaatatgctgcattgggccaaatcggtaaagtccggcgacccggaaaattatgaaggccgggcggcagcctactactggaaaaatgtattccccaaaaaaatagaattttttcgcggccgtgaaggcgatccgccaaataacctgcttaactatggttacgctattttgcgcgccattgtggcccgcggcttggtttgttccggcctgctccctaccctcggcatccatcaccgcaacaaatacaacgcctattgcctggccgatgatattatggaaccttaccggccttatgttgaccgcattgtattaaagattattgataatggcgaaaactttttggaacttgggacttccatcaaaacacaattgttaagcatcgcaacagttgatgtagaatttgaaaaaggccgcagcccgctaatggttggcctgcaaaataccacagcttcgcttgcccgctgttacgaaggtaccgcaagaaagattgcctacccgtttattaaaaactttgatgcaaaacggaattataaagctttgggtgaagatgatttaagtaaagccgccgaaacagaaactgattattatactgcaaatgatgatatagatttacctttttaaatggatgcgtttaaatgaataccgcattttgtgggtgttagtattgttcgacctgcctaccgaaaccaaacgtgaaaggcagatatacgctaagtttcgtaaggatattatgaaagatggctttgccatgttccagttttccatttacctgcgccattgcagtagccgcgaaaatgccgatgtgcatattaagcgggtaaaaaaagcattgccggttaaagggcatatctgtattttaaccataaccgacaaacagtttggtatgatggaactgttttacgggaaagatgaaaaacctttgcccaacacgccgcagcagttagaactgttttaaaaccaattattatcagaaatctcggtatacttcttttagcactataaaattgttgtttagcattccggattaacctgccacacttcaccttaatgatttttatgtgataaaagaagcatgaaggatagctgtagcgatgtttagaaatacaattggttataaaaagaaaacccggaagccaaagcaaccgggttttttaattcctgattttttaattaaaatactgatagttagcatgatatgcacaggtatgttgtgctaaatatcagtatttcaaagaatgaaagcaaatcacaacacggacgtattgctaccctgaaataaaaacgttgtgctaaatatcagtatttcaaagaatgaaagcaaatcacaactttttgctacccttaacaccttatttatagttgtgctaaatatcagtatttcaaagaatgaaagcaaatcacaacaaaacccgtgctgcaccttcaaatcaatttgttgtgctaaatatcagtatttcaaagaatgaaagcaaatcacaactttgttaccagccctgtaagaactttttacgttgtgctaaatatcagtatttcaaagaatgaaagcaaatcacaacccaacgacatttctttgaatatggatttgcgttgtgctaaatatcagtatttcaaagaatgaaagcaaatcacaactacatttaatctcatccaaacgctgtaaacgttgtgctaaatatcagtatttcaaagaatgaaagcaaatcacaactctttgataaatgctacaactaaatcagttgttgtgctaaatatcagtatttcaaagaatgaaagcaaatcacaactacatttaatctcatccaaacgctgtaaacgttgtgctaaatatcagtatttcaaagaatgaaagcaaatcacaactctttgataaatgctacaactaaatcagttgttgtgctaaatatcagtatttcaaagaatgaaagcaaatcacaaccctgtaacacaagttgccaacgtaatgggcgttgtgctaaatatcagtatttcaaagaatgaaagcaaatcacaactatcgcggaaattgaatttctggccctttggttgtgctaaatatcagtatttcaaagaatgaaagcaaatcacaactacctgcggcttcggcatcaggtaaggaaagttgtgctaaatatcagtatttcaaagaatgaaagcaaatcacaacacattcgtttacgtttttctgtacatgcttgttgtgctaaatatcagtatttcaaagaatgaaagcaaatcacaacaacaacaggcgatgccatacacatggttgtgttgtgctaaatatcagtatttcaaagaatgaaagcaaatcacaacgtagtgcggttgatcttataaaatggctccgttgtgctaaatatcagtatttcaaagaatgaaagcaaatcacaacaccgaatggcaggttaaacttatttttggtgttgtgctaaatatcagtatttcaaagaatgaaagcaaatcacaaccgttttttgcaagctccgcgtttataagagttgtgctaaatatcagtatttcaaagaatgaaagcaaatcacaacaaggttcccagcgttccgctctcttcaactgttgtgctaaatatcagtatttcaaagaatgaaagcaaatcacaacgctgcccttgtgtgtagtgagttaacggaagttgtgctaaatatcagtatttcaaagaatgaaagcaaatcacaactggtgtacgtccgatattttacccgcagccgttgtgctaaatatcagtatttcaaagaatgaaagcaaatcacaacaacgaaacgtaaccctactggtgaaccgttgttgtgctaaatatcagtatttcaaagaatgaaagcaaatcacaaccgcgcgatcaatattttcttcggtatttttgttgtgctaaatatcagtatttcaaagaatgaaagcaaatcacaacttttgcacgcttgcaaaaaacggttaaagcgttgtgctaaatatcagtatttcaaagaatgaaagcaaatcacaacagtttgaaaatagcttacacaatacagaaagttgtgctaaatatcagtatttcaaagaatgaaagcaaatcacaactcaagattggggtctattttgagaggaaacgttgtgctaaatatcagtatttcaaagaatgaaagcaaatcacaacatcatttggttgaagctgtttacttaaaaagttgtgctaaatatcagtatttcaaagaatgaaagcaaatcacaacaagaaatcacgaacggcccaaaacaaataagttgtgctaaatatcagtatttcaaagaatgaaagcaaatcacaactcttgtattccgtaaccaccgcgaacataagttgtgctaaatatcagtatttcaaagaatgaaagcaaatcacaacttacttgtacatggatcatcgcgttagtcagttgtgctaaatatcagtatttcaaagaatgaaagcaaatcacaactatgtttgcacgctggtgggtaaagttagtgttgtgctaaatatcagtatttcaaagaatgaaagcaaatcacaactactgatcataagcggccacataaatgtttgttgtgctaaatatcagtatttcaaagaatgaaagcaaatcacaacattacaccatgttagaaacaaaaaaagcgggttgtgctaaatatcagtatttcaaagaatgaaagcaaatcacaacaacaatgggcgattttaagcaatcgtttaggttgtgctaaatatcagtatttcaaagaatgaaagcaaatcacaacgcattctgtattgtcagccaccaacaaatagttgtgctaaatatcagtatttcaaagaatgaaagcaaatcacaacaacgtagtagcatcaaaaccagtagcagctgttgtgctaaatatcagtatttcaaagaatgaaagcaaatcacaacacgcggcaacgcttgagaaattttgcatctgttgtgctaaatatcagtatttcaaagaatgaaagcaaatcacaacaccggaagtgcagagcttcaaataagtacagttgtgctaaatatcagtatttcaaagaatgaaagcaaatcacaactctttaagaccacaatatatacaccttaacgttgtgctaaatatcagtatttcaaagaatgaaagcaaatcacaacgaactcacaccggtacaaattaaaattgtagttgtgctaaatatcagtatttcaaagaatgaaagcaaatcacaacagtctgttttaagttctgaaatttgttttagttgtgctaaatatcagtatttcaaagaatgaaagcaaatcacaactagacagggaagcagaaaaatgattaacgagttgtgctaaatatcagtatttcaaagaatgaaagcaaatcacaacttttgcatgcttgcaaaaaacggttaaaagttgtgctaaatatcagtatttcaaagaatgaaagcaaatcacaacagcggcaacattggtggccagatggattatgttgtgctaaatatcagtatttcaaagaatgaaagcaaatcacaacacctgccccgcaaatcctacgtgtacattgttgtgctaaatatcagtatttcaaagaatgaaagcaaatcacaacttgcagataggtatgatttttattaattagttgtgctaaatatcagtatttcaaagaatgaaagcaaatcacaaccttgtaagaagtgttgcacttaattgtaaggttgtgctaaatatcagtatttcaaagaatgaaagcaaatcacaacaagaggtctcttttacctttttatgaagttgttgtgctaaatatcagtatttcaaagaatgaaagcaaatcacaacttatcaataccagtatcgaaaaacagtgcggttgtgctaaatatcagtatttcaaagaatgaaagcaaatcacaacaaccggttgtggtaatgtttgtaacgccgggttgtgctaaatatcagtatttcaaagaatgaaagcaaatcacaacaacagggtgtttttaaaaaacaaaacgaaagttgtgctaaatatcagtatttcaaagaatgaaagcaaatcacaactaaagcaagggaacaacaatacagatattagttgtgctaaatatcagtatttcaaagaatgaaagcaaatcacaacaatgctattgtttgattcatttatttgattgttgtgctaaatatcagtatttcaaagaatgaaagcaaatcacaactgatattggtgctatcatccttgttggtgggttgtgctaaatatcagtatttcaaagaatgaaagcaaatcacaactgctgagaagaaccactttatgccttacgagttgtgctaaatatcagtatttcaaagaatgaaagcaaatcacaacgtctaatcggatggatagctttgtcattttgttgtgctaaatatcagtatttcaaagaatgaaagcaaatcacaactccaggccactggtaagattgcgttcaacagttgtgctaaatatcagtatttcaaagaatgaaagcaaatcacaacaaagatcggtttctctattttgtgcgatatgttgtgctaaatatcagtatttcaaagaatgaaagcaaatcacaacagtatcacatttgcaataattgctcttctggttgtgctaaatatcagtatttcaaagaatgaaagcaaatcacaactaagcacaaatgatgagataaaaacaaaacgttgtgctaaatatcagtatttcaaagaatgaaagcaaatcacaacgcggagacagtaacagcggaaatagtaacagttgtgctaaatatcagtatttcaaagaatgaaagcaaatcacaactctgaaactctggtcaggctggctgcaatggttgtgctaaatatcagtatttcaaagaatgaaagcaaatcacaaccaatttgtttgtaagtatttgcccagctttgttgtgctaaatatcagtatttcaaagaatgaaagcaaatcacaactatcgtggttaccgcgcgcgcgacaaagcggttgtgctaaatatcagtatttcaaagaatgaaagcaaatcacaacaccaaacatatgctttgtttgaaacaacaggttgtgctaaatatcagtatttcaaagaatgaaagcaaatcacaacgtgagtacggcaattgctttacgcaggccggttgtgctaaatatcagtatttcaaagaaagaaagcaaatcacaactggctttttgaattattatgatttttactgaggggtttttgtaagcaaaactgatgcttcttttagcagtaaaatttatgacttaaattaaggtttattttttctcaacctgattccaaagttctatcaatccgccatttttacccgaaaacggatcaaaatcaggaaccggcaaagcagcaatccgttcatcagcttttggcctgtcgccgggctggccgcgcattacatcccaatttcggccgtcgggataagcaccaactacgccaaaatctgcgctgcttcccagatttttatggccaacgccagccgggattacgataatatccccggcttctaccttaactttcgcacccttttctccgcccaaaaacagcaaagcagaaccgttgtaaatacctaaaacttcgtgagaagtgctgtgataatgatggaacggataaacgccgttgcgccaggaattcgtccagttgtttttagcaaaatgttgctccaaccagcttgcgccggctgagtttctatccaaaaaaactttatgataatgcagcaacggatgtttactgttcgggatgatgccgtcatctttaaaaagatgcgtttccggttttattaaatcttctgccattacttttttgccagaaaaagtaaaagaagataagccaagcaaggttaaaaatctggttctgttcatgcttcttttaccttaatttatttatcacttagtggtttacaacttttcgaacagattaacttccaggtgtttctccagcaaatccttgatcgtttcgcccagattgatcatatgttccgtcatccgatgtttttccagatgcgctacactgtcccagttttcataaaacaaaaagatgtttttatgttcaatatcctggtgcaaatcatacagcaggcagccttcttcatttcttgttggggtaatcaccgattttaagttcgtttttacggcttcaatctgattttttttggcagttatttttgcaataacggtaagcatatccgggagttttattttgcttatataagtgttattacgataattggtttgcaggttttataccgataaaagaagcatcaactacagcttcttcaaattatcaaacccatattgcattatttccgttacctagttttaaattggtactttaaaaagtaatgttgtttttaccggtataaaaacagtacgagaattttattttgaagaatttttccaagattgaaacgggttttcggccagattagaattataatatctgggatcgtctgtaacttctgctgctgtaaaacctggcttttcaaacttgtcgttttcatttttcaattcaatttctgccacaatcaaaccttcattttcttccgaaaattcatcaacttcccaaacttttccggcaaacagaacgcggtaacgggttttggaagttccttttaaagagaagctttcaagtaattcctgcgcatcgctcaacgggatttcgtactcatattctttgcgcgtaaaaccggttgtaactccttttatcgtgataaaagccttgtcgccggctgtccggatccggatagttttatcttgtttatttaccaaataaccctgccggtaagcaacgccttcgggcttgttaaactgtttccacctttcgtgatcaactaaatattttctttcaatttccaaacccattttatgattatttattttccgattcttgttctgctacacccacttttgatctgaaatcggcaccttgttccataataattcgttccaagtttgcattgcttttttgaagattatccatcgctttaacttccggtttttttaaattagaaaaaacctgcaatgttaaattatgatcgtgccaatctccgattgcattttgtaaattatccaagtaatcaaagttgattattaatttccggctgattgcatgaacggccaggtttctattgtataataaaagtttaatctttttacgggtattgtgcaactcgttatccattgttggctgatcaaaaaaactttctaccgctgctaatttctcctgataaaaatttaggatcgtcctgctttttacatgatcgatgttattctgtaaagtaaaatgtgcctttttaattacttgtaaatgtttgttactgcgttttttaaaccggctgattatattggttaacaagtgttgctgctgctgtttaaaatctttgttgttaagctgatattcgtcattcaattttaaattaatataagcgttacggatatcgccggctttggcaaatactttttttacaggtttaaaatagtgcagcagcttttgattattgtgcgccgctgcataaagtgttaacatggctttaagcttttttacccgaacacgaaactggtgcagctcctcctgatccttagattttaaaaagttttggaaatgcttttttgcctttttccacaacttatccaactgcctgatttcttccttctttttcatatttaagctttaacttttatgagggaaaactataaatggattaacagcgagtaacggcaaatgattgctttagcaggaaatttattaacgaaatatacacttcttttagcactaaattattttcgacaaggcattgatcaaacaaattcccaggcactttaataagcattttttttgtatagcataagtaataaaatcagtgtaaaaaggcagtttggaaagtgtagaactatcaccgacctcaaattttttattgtagttggaatcgcaacagataaaatatttacttgcgctgtttatataaacttcgaaatccatccttctttgtttcgcaaacaagcactatcgaaacttcaaatacctatcaaaaaatcaaattattcgtttctaaaataagattgttttacttgttgttcaactcctttgtatataaattccaagaatatctgtaaccggatagaaaacgaatcttgcaaagttatagctaaacttacatctaataatttaacaaatattaccaatacaattattaattcaggtttattatcaaaagaagaaatagaactatattttactttatagtttttttaattagaacttttatcttcaaccgtgcgatttcttcgtaagcttcacttccttccaattcaagcttctttttcaaatcgctccaataccttttcggtggttgaagcattatcaactactattatttcaaaattttattaccagtaagttgtttggtttcaataattgttaataaacattcatcctttcgattataattaaccattataaaagatgcttacataatattttaattttaacacacttgtaaaaactcagaatttttttgaagctaatgcaattaaattttaatacttcttttaccggataaaaattataagctgttatacttcta

SEQ ID NO: 1398 - DNA, 14931 bp, synthetic construct
  source 1..14931: mol_type = other DNA
  misc_feature 1..14931: note = Synthetic
ttgctggtcctgcccctaattatgacatgcagcgcatcctctctgccaagactcctaaggaagcctcaaagatgagtgcctttgtgaatttggttttactttttccaagatacatgttgattgctggcttagctattttagcattagtatttctcaatgaggagttcaatggcatgggtgaccagatagatttcgagatgatactgccttttgctatcaagaccttcattccagtcggattgatgggtctgcttctcgctggattgttagccgcattcatgtcatcttttgccgctgctgtcaatacagcacctgcttatttggtgaacgatatttataaaaattacatcaataaaaatgctacagagaaaagtctaataaaattgtcatacgtagcctccgtggcggtggtcatcttgggtattactttcgctatgttcttgtcttcactgacgagccttattgattggttcgtgagtgcactatatggtggctatgccgctgccaatttattgaaatggtactggtggcgatttaatggtaacgggtattattatggtatgatggggggtattctggctgcggctatcttaccactcgtcttcccagagctatccgctttagaagcttttcctattaatttactgatatcctttacaggctgtatagtaggtacatatatgaagcctccagacgatgctgaagtactgaagaaattctatctaaagacccggccgtggggattttggaaacctgtctatgaatctctattagtcgattttcccgatcttagaaaaaacaattcattcgcgagagacatggctaactgtgtagtaggcgtcatatggcaaacgagcctgactgcgatgcctatcttcttagttattcaagactttagtaaaatgagtatagctggtgctatcgtcatcgcgacaagtatctttctgaagatattctggtatgataaaattgaagattatccagatcatgcccaagatctactgccgcagcaagatcagtttaagcagtttctaaatacagattctaaaataatttctccctaaatataagtactacatgaaatttgattcttatgacaaaaggttggatcaattaaaaaatgattatcaagaaataattagtaagtctaacgcaattgtaagctccaataatggtgtgtatagtcgatggcagagaccgatcatcacgacagcgcatattccctatttctggaagtataatttagacaaagcggctaacccattattagtagagactatgggtattaatgccacctttaatgcaggggccatttttcatgacaacaagtatatcctatgcgtacgagtcgaaggcaacgataggaagtctttttttgcattagcagaaagtcctaatggtgtggataactttgtcttcagagataagccgatagacctacctcaaacagagacacctgatgtcaatgtctatgatatgcggcttgtagctcatgaggatggatggatatatggtctcttttgcactgagagaaaggatgactcagtgaatgatacttcgacggcattagctaactgtggtatagtcagaactaaagatttacagagttgggagagattacccgatttagaaagtaagtccaatcagcaacgaaatgtcgtgctacatccagaatttataaatggagaatatgcattatatacgcgacctcaggatggcttcattactgtaggaaagggtggtggcataggctgggcgctgaccaaggatatgactaatccagtgattagtgatgaggacattatagacaacaaacactaccatacaattaaggagttaaaaaatggtcaagggcctgccccaattaaaactaaggagggatggctgcacttagctcatggagtgagaaacacggctgctggtctgagatatgtattgtacatgtttatgaccaagctagatgaaccgtggaaaattatccatgcgccgtcggggcacgtgatagctccgcagcgatcagagagaataggtgatgttagtaatgtagtgtttagtaatggctggattgctaatcagaatgatgaagtattcatatactatgcttcttctgatacgagaatgcacgtagctactagcacagtggacagactagtacattattgcaagcatacgcctacggataaatatcattctcatttaaataataaggaccgtattgcacttatcgatcaaaacctgagccattgatatgcctataaaggaaattacgcgtcgtggcagcttattaaagcaggcaaaaataggcctggaatcactgacaggctggtggtgcgactatggctatgacagcgagaatagtcgattttatgcagaagtgagcattgagaatattccgaatattaacgcaccgtacgtcatcatacaaaggacacgtctattatggtatttttcagtattaagtcaacaaaagagatttgaccaatatcgaagttatgcagacttattatataaggaattaatcaataatttctatgataagagtcgtggaggcttttattgggaagtagatgcaagctttaatctttcaaatgatcgcaagcaaatatacgctcaggcatttgctatatatgcactgtgcgagtatcactcactgagtggcaacagcaaggcactgaacatggccttagaaacttttgatttgattgaaactcatgcatgggaccaggatatgagcggctatattgaagcactggattctgactggaaaatgcttaccgactttaggctcagctcaaaagatatgaacgagcctaagtccatgaacacccacttacacctattagaagcgtatactactttgtcgagagtgtctaaaatatctaaggtgacagcctcattagagcgattgctaaaattatatgcaactcagttttttaatagtgacactggtcatttcgaattgttctttgatatggattggaatctgaagtcgagtatagtctcctatggtcatgacattgaatcagcctggctgatgcaggaggccgccgaagtaagtggggactccgaacttataaaaacggctgagcggctgtccatacgaattgctgatgtgacgatgcaagcaggaatagctgcagttggaggacttaaaaatgagatagaggatggtcatctagatactacatacgattggtggccgcaagcggaagctgtggtagggttcttatttgcgtataatttaactggcaatataaagtatgaaaatatagctgtcagaatttttgaatttatacatgaacacgtcattgacgcagcgggaggggagtggtactggaagattagtgaagctttaaaacccgtgcaaaatatgtcaaaaagtagtgcatggaaagcaccttatcataatggtcgcatgtattttgaattattaaaaatgacaaattaaattttaaatatgaattcgatagtctaataatatgacaagcggtgtgggcttttaattattagattacggttttctccaacatagaattatgagtagaattgctcttcttgtattgttttcagtaatattctatcggtgcgatgtggctgataccacagagcttatccctattggctttgacaattttattactgcagaaggatataatcttttcgatggtcaggatacggtgagattcatatcatggaatatacctaatcttaattatgtagaggatgagttaaaattcgagtccagtaatccttacactctccctactgaatacgaaattagagatgcgctgatgaccattaaggaaatgggagggcaggtcgtgaggatgtatactattccagtgagaagtaataagatgccagcagatgcagtaacctacgttgaggcacctggggtgtttaatgaagaagcgtttaaaaatttagacctagtgatgtctctcgcagatgaaatagggatcagagtcattatcccatttttaaataactggcaatggtttggaggggtacctaactatgccgattttagagataaaacctacgatgacttttggacagacgagcagctttggacggattttcaagccactgtggaccacctgctcaataggaccaataccatcaatggcaaaaaatatacagaagataaagccatattttgttgggaatcaggtaatgaactacaaaacccatacccctgggttcagcgacttgcagctcatgtcaaatctttagatgctaatcatttattcatggatggttatcatgctgttgatgatacgcctttctatgcagaggcattcacagatgagaatattgatataatatcatcgcatcattatgaaatagatcccatggatatgctcaggaatataaaagctaaagtagatacgatcgatgggagaaaaccatatttcgtaggtgagtttggctttgtcagtaccacaggtttaaagatggttttagaatacttaatgaaagagcagcgcgtatgtggagccatgtcatggagtataaggcatcatcatcgtgagggaggattttattggcactcagaaccagcaggcttagatttgtataaagcctttcattggccaggatttgtcagcggcgagaattatgacgaggagaatctgctcagcatatttagagaatcagcttttgaaattcagggcaaggacgtgcccgaggtgagcataccagctccaccaaaattgctgccttgtttggatggtaatacgctgaggtggcagggatcaatgggagcgagatactatcaggtgtatcgacaagaaaaaggtaagacagcgtgggaattaatagaaccttacgcctcagaaaccgatagaccctatttcccaggatacatagatgagaattctgaattaggaaaatcttacctctataaaatgaaagctgtaaatgaaacaggatcctcagactattctaatgtgatcagtgtaggtgccattgaatcaaaactctttgtggatcacccagctaatacagcgaagtgcttaagcagtaaaaatgtcaccattgagtcaggaggtgatagagactataaagagatgctgactcgcatgaagggtgtcaaaggaagcgaggtgcagtatcgtacagaaggtaacattcataaagtagtggtttatgccttctctaaagaacctacagcaagtcttagcttctcaacttcctcagacggaataaattttttgccagcttcatacgagtttgaagagttcagtttaggagaccaactttatgactatatggtgccagtcaaatatattttacaagacgaaaccgagaacaatatcgtaagaataaagttcgataatataacctatattggaagagttgaaattaatcacaaatgagcatgaaagcactgtatctattcttaataggcatccttccaacggtcctagtcggacaagaaagttatgttgaaaaattcgaaggggacgcgttgccgtctggctgggagtttcctcatgatacgtatgctggctcagtatcagacggagctctgatagtagaatataacaggactgccgatagctggatatgggatcaatttaaccttcagctaccatcagcggtaaatgtctctgagaatccaatcctcaggattaaagtccgatcagaccagagaattaatttagtattaaaacctgagaacactgctggcggcagcgactggttagaaaaatcattagaaggtgatggcgaatggtatgaattcttttatgagttaacaaactcttcagtcctaccgataaaagccatgtatatctattttgatccatcgagtagtgccgagaaatctgctatggttgaatttgacgagattagtattggcagtgaatctatgctaccgctggatggtgatttcttagagcatgctgtgattgatgcgactaacctactccaatcctcggtcgtaggagaggggcaaggcgataacactcaagaggatatagatgcgctcatgtcagctatagattattataatctgtttcttttagatttagaatctgcaggaagtcaggtggctttagactcattagccttagagctgtacgatgtgtgtatcaagcatgagcaaggcactgtcttcgatctgaagaaatcagcagtggatggatccatggtgtattcatctaaagtgcttcttgaaaacttacataaattaaaggggccacgattcatgtatggcatgcatgatcctacaggatatggagtagggtggagcggtaatgatgatagaagtgatgtgaaggacgtcactggatcatatcctgctttctttagttgggatgctaacagtatcacgagggatcaatctaatgagagaataaaatatagagtcgaatcgtctcatgatctaggtgtggtgacgtctttctgctggcaccaatatgatcctaagggagtcagcttctatagcaatgacctgccgaataatacggagataggaaagtctctacttcctgggaatgctaataatgacttatacaagaagaaattagcgatcatggcgaaagctgccaaatccatgagaggagaagatggtagatctattcccattatattcagaccttaccacgagcataatggatggtggttttggtggggaagcaatatgcctgagcaggactatatagcattgtggcaatatacagtggagtacctaagagacagtatgggtgttcataatctgatttatgccttttcccctgacggtggccagatcaatggtttgaaaccgtataaatacagatatccaggcaatgactatgtggatctattaggattggatttctattttgattcaggaactgaacttgagatcagccgattcatgggtcacttagagtccgttgtttcattagctgactccttagacaaggtagcagctatcacagagataggtgacagaaataatctttccatagataaatggcacactgaggcagtcttaaatccaatcaaaaacagccccattgcctctaagatagcctacctggccacatggagaaatcaagatgacactcatcattttgccccatatcctggacataagtcagaattagatttctataaattctatagcgactcttctactatatttctcaacaatatggtcaagggtattgatgaaagcttatacacgactaagctcagtgagaaaagtgacgctgctttcttgcttagctataaattaaagagtgggccacaatttacaattgacggcctaaaggcgacatacggtgggcccttgacttttaattatacgagtgctatagctcagttcgactattctcaaaatggcagagtggatatcgatggtgaaacacaagaaagcggaacatctaaagtaaatctctccctgcccacattctatactgtaacttctgagaatggacaggtcgagaggtcctacgaagtttcactggagcaaattataaccagttctaatgatctagcagctgcagatggtgtggagctcgacatctatccactcccagcgagagaatatcttaatatcgactgctcagaatctatgagaaatatacacttgttgagcggcgatggtagagtgataagaatttataatgatatccgatctgatagttataccttgaatggattagagcagggcgtcattatcctgaagattgagttagtgaatggcttgagtcttaccagaaagctgataatcaactgatgcagtagatgtatggctatctaaagaaacttaatcttatgatgtatgtatggttaaagtatattcgttgtaggtcgtctttttgtgagcatttcgttatacttttctcggtaggcgatcaatctttgtaaaggcatattcagaagtaataatttttatgccgtgggtgtaatatctcgttagcccactatgacatattaggaaaagtagtagagaaaactttgattgtcgatactttattaaaacttgtgacaatcaattagaaaagtgaccccttttttttgtgcattaagtaattaaaatattgcttttataaagtcatctaattttagctgtactaaccgtggatcagcataattttctatccagagtgtacatcagaaaaataagtcattcttaagtagcgtgatgactctatacaatacatatgaaattcttctttcagagctctgtcagaaccacagctaatgattgccatatccatacctcgtaattttctgccaatctctttttctactttcccacagttagaaatgctatcaaaaaatcctttcatgatcccgctcatagtgttccaaaaaaacaatgtcgtaaatatgactacagcatactcttttacaattgacctcatcagtggatgaaaatcatcgtcactattggaaaactcataatcaaatgctgataaaatgtttagcttcaaatctataaataaatatgcagtcttgctgctcacataggaacaagtttttgagtatctcctgcgctactataaatgccaagtaatataattcctctttcaattttctctgagtgaagctatagaatgataaactgtcttggtatcgtagtctaagggtatgtcataatatatctatttgggatgctcactgatactctaatatggaaaatacattacaagcataataagactcttatagtattcaaacatatcccagcttatttattggaagatctcatttcttgccagcgagtgttagcaggcaatagttaaactgcaagcttcatatcattataggtgaaagggaacaactgagccctcagctgctcttactgtagaatatagagagctgattaatgataaaagttacatatagagagtcttgcattttagggatttatcggatttccataaataagctgatgatagattgagaaataaaaaaaaagcgaccagttatcatgtaacagaccgcttttaatgttttcacaacggaataatccttattgtgattagcttcaatttgttagatgaagctacaaattaatcacaactaataccaaaattttgcatgtgaataaaaagaattcagaccataggtttggaagctatagtcgctggacgacgtctcgcacaactgaattcatgtttcaaatatatttataaatttggtattataaaataaatattaaatcttagctaataaattaatgcataatgaaaaaaattttaggtcttgatctgggtacaaatagcataggttggagtcttattgaaaatgatgcacaatccctcaagggaactatcataagtgcaggaagtcgtattatccccatgtcgcaagatgtgttagggaagtttgatgctggcgtgactgaatcccagacagctgagagaactcgatataggtctactcgcaggctctatgaaaggaataaattgagacgacaaagattgcaccgtgtactaaatataatgggttttctaccgaaacattatgctcaggacattgacttcgaaaaaagattaggtcaatttaaagaaggcaccgagactaagctcagctatagaaaaatagatcaagctgttgctacggctggttatgaattcatatttcaagactcttttaatgagatggtcaaagaatttaaagagaaggggtataatgaaaatataccatatgattggacgatctattatctgagaaaaaaagcacttgaagaaaaaataagtaaagaggagttagcttgggtaatactcaattttaatcaaaagagggggtattatcaattgcgtggggaggaagaagcagataagaataaacattttgtgcagctgactgtgcaagacataatagacacaggtgaggatattaaaggtaagcggctatatgaagtattattcgataatggatgggtatatgacaaaaaaataacaaagactgaagactgggtaggcaggactaaagaattcattgttacgatcaaggatctcaagggaggtgataagaagtatacttataagactgtaaattcagaagtagattggctcgcgattaagtctaagacagaacaagatattgataactctggattgacaataggccaatacatttactctaaattattagataaacccgatcagaaaattagaggaaaactcataaaaacaatagaaagaaaatattaccgcagggagcttagagaaatattgagagtccaagaaaaatttcatcaagtactaatggatgagactgtatttgaaaaatgtctgatagaactttacaagcgaaatgaagctcatagaaataatattaagagcctatcgctatcttacttaatcgaagaggatattatcttctatcaaagaccgttaaaaagcaaaaaatccactgtaggaggctgtcagtttgagtacaggacttattataagaatgacgctgatagtggtgacactatacaacagagagtaccactgaaagccataccgaagtctcatcctctttaccaagaatttaggttgtggcaatttgtgctgaatataaaaattatagatcaggacttagaattgcttcaagccaaaaatgctgatataactcaggaacttttaagcagtgatgaagagatcgtcgagttatatgaggagctaaatgggcgtaaggaggtagaacagaaaaatattatagattacttcataaaaaaaagtaaaatagataaatctaagagaggaaactttagatggaattatgcaaaggataagaagtatccatgcaatgaaaccagagctgaaatattaaagagactaaaaaaagtcaatggagtaaagccccatcaatttctcactaaagaaatcgagcttaagctatggcacatcgtatattctgtaacagatagaatagagtatgcatcttcaatagaaaatttcgccaagaaaaatggactgcatgtggaatctttcgtattggcctttggtaatatgcctccatattcaagtgactacggttcactatcccataaggctatagtcaaaatattatctcttatgagaatgggcaagtactgggatcccgacgtaattgatccacatacatttgataggattactaaaataattagtggcgaatatgatgagtctataagagatcgtgtacgtgataaagctatcatgctgaaaagcataaatgatttttctggattaccttattggttagcaagctatgttatatatgatcgtcattctgagggatcagatacagcacaatggacttctgcttcagatatagatgaatatctaaagcaatttaaacaacatagattaagaaatcctattgtagagcaggttgtgacagaaacacttagagtggtacgagatgtatggctgaagtacggtgatggggccaaagattttttcgatgagatacaccttgagttaggacgtagcttaaaaaactctgcagaaaaacgaaaatctatttcgaccaagcagaatgaaaatgaaaatactaatgaacgtatcaggcagcttttagaggagctagggcaagatgatagtatactaggtgatattagggcttactcaccaagtcaccaagaaatactgaaaatatatgaggatggcgtatatcaaaatccagatgccaagtatggtactgtatcagaagatgaaatttataagatacgtagaaataaaacccctagctataacgagattcaacgatacaggttatggttagaacaaggatacgtctcaccatatactggatctattatatcattgagtaggctctttaccactgaataccaaatagagcatatcatacctcagtcgagatatttcgataattctttcaataataaaataatatgtgaggctgatataaatcaggataagggcaacttgactgcttacgactatatgactagaatgagcgaagaagtaagagatggccatgaattgttaagtaaggaaaattatgaagcacattgtcagaaatactttaagaaaaatagagtaaaattggctaacctgctcagcgaagatattcccgaggggttcataaatcgtcagatgaatgactcacgatacatagcaaagtatgtaaagggtctactcagtaatatagtaagagatgatggagagcaggaatctactgctaagcgcctactacctgtaagcggcgccataacagctaaacttaagcaggactggggtctgaatgataagtggaatgacatcatagccccgagatttatgaggatgaatgaaataactagaaccagcgactacggctactatgataaaaaaattaacgcctttcgtattactgttccagataaaattagaaaaggatttagcaaaaagaggatagaccataggcatcatgctttagatgccatagttatagcttgtatcactagggagcaagttaattaccttaactcacttaattctgagagagagaattactcgctcagatcaagactgttggttaagaataaacatggggattacactaaacattttagattgccctggagtaattttcctatagaagtacagcaatcacttgaacaaatgattgtcagctttaagcaaaatattagggttatcaataaaacgaataacaaaacttggcaatggatctatgaagatggaagatatgttaaacgccgtgtcaggcaagagggtaaaaattgggctatccgcaaatctctgcataaagagactgtttcaggacaagtaatgcatatcccaacttccaaaggaaaaattgctacagcttctcgtgtattattatcaagtattactaataaaaaacacattgataaaataacagacgtaagtatacaaaagatactactgaatcacctctcatcatatttggatgacaaagggaagccacaatatgatgtggcattcagtacagagggtatagaggatatgaataaaaatatcaagatgctgaatggcggtgtatcacataagccaattaaaaaggtccggcaatatgaaatagggtcaaaatttcaagttggaataaaagggaataatcataaaaagtatgtggaggctgctaagggcacaaatctcttctttgcagtgtattggaatgagaatataaataaaagaacatatgaaactgtaccactcaatgaagttgtcgaacatcagaaacagactactcacatctctaagtcaaagaaacatccatttcagccagataactctaagggcaaattcttatttagtctttcaccaaatgatttggtatatgttcccgacgaagatgagatattaaattcagggcttgtttcagttgtgtcattgaggattaagaatatttataaaatggtaagttcatcggggaatcaagtattttttttaaagtcagaagtggcaaaaagtatcgcgaataaattagagttttcaggactaaacaaaatggaaaaagatattaatggcgtcatgataaagtccctttgttggaaattagtaatcgatagaattggaaatatcctaaacattaaaaagggcatcttatgatcttcaatagcagctatgattaaaaagacactttactttggatctcctgcatatttgcatctcagagaccagcagttggtcattaagaagcaacttcctggctttcatgcagagacgagaccaattgaagacataggagttattattctcgatcatggccagattactattagccataatgcgatcaaggaattacaatcgaataatgtagtcattatcagttgtgatgatagtcatatgcctcatagtatcatgcttccattagaaggtcactctgagcaaagtcagcgatataaagttcaattagaggccagtctaccgttaaagaagatgctctggcagcaaacgattatagctaaaattaacaaccaacagaaagtactacagatattagataagccatacaaaagactggaagtattatcacggagggtacaaagtggagatgtagataatgtagaaggtcaagctgcagcatattattggtcaacttatatagaaggtttcgtgagagatcgctacggcctaccacccaataattttttgaattatggatatgcaatacttagggctattgtagcaagagctttaatttcttctggattaatactgacgataggtatacatcataaaaataagtacaatgcattctgtcttgctgatgatattatggaacccttcaggccatttgtagaccttattgtgcacgatatgtataataatgatgatttggaatcatttttgtcaccagaaagtaagaaaagattattgcacttacctaatgtagatgcactttatggcaaaacaaagcgtcccctcatggtaggtatgtctcagacaagtgcttcattatttaaatgcttctctggagaaaagcgaaaaatagtctttccgaagatcattctctaaaagcgtttcaatgttatctaataggctaaatgagtatagaattatgtggctatacgtattctttgacttacccacagaatccaaaaaagatagaaaagtagccgggctttttagaaaagctctacttaaggatgggtttaacatgtttcagttttctatttatataagacattgctcgagtcgcgagaatgccaaagtacatgagatgcgaattaaacgaaaactaccgcaatatggtaaagtagggatcttaactgtgactgataagcaatttgggatgatggagatatttcacggtagaaaagaaataattgtacccacaggtcatctacaattagaattattttaaaaatctatattctgagggtcattataatgtgttgaatcacagggatttatgcaatgtaccctgtgattcaccacagctaaaatacaaattgaaagctaatcacaactaatgcatgttgtgcattggatcctaaactcctgtgattcaccacagcta

SEQ ID NO: 1399 - DNA, 14892 bp, synthetic construct
  source 1..14892: mol_type = other DNA
  misc_feature 1..14892: note = Synthetic
gagtggcggaactggtagacgcgctggattcaaaatccagttcttcggagtgcgggttcgattcccgcctcgagtacagagtaaatccctaatcatttgtaaatcaaatttttagggatttttatttgtattaaatgccgaaattttgccgaaaaaacattgtttttatttcttctcttatcactttcctttttttgaaacatatctaaattaaagccaaaaaaaatgccccgtattggaagacgaggcgacttaaatgttttcacaacggaataatccttattgtgaattgctttcagttctgtaaatgtaataaataatttttataatgtattacggattcccgtaaccgcattcttacgatactttgtattttcattgcataatttgtagggatgaaaaaaatacttgggttagatttaggtaccaactctattggttggagtttaatagagcacgattttgagaaaaaacaaggagaaattaatgatttaggggttcgtattattccaatgagtgcagacgttctaggaaaatttgatgcaggacaatcacattcacaaactgctgaaagaaccggatatcgaggagttagacgtttatatcaacgtgataatttgcgtagagaacgtttacatcgtgtactgaatgtacttggatttttaccaggacattacgctgtacatatcgattttaaaaagcatttagggcaatttaaagagggtaaggaaacaaaacttaactataaacctattgcagatagtaaatacgagtttatttttcaatcttcttttaacgaaatgattaaggagttcaaaaaatatcgacctgagttgttttatgtgaagtccaatggaaaagaaaccaagataccctatgattggacgctctattatttacgcaaaagggcactttcgcaaccattgaccaaacaagagttgtcttggattattttaaattttaatcaaaagcgtgggtattatcagttacggggagaagagattgatggtgataaaaacaagcaatttgttcagctaaaagtaaaagaagttattgattctggcgaagccgtaaaaggaaatccattgtttgatgtgatttttgaaaacggctggaaatacgataagcaggtcgtaaaaaccgaagattggattgataggaccaaagaatttattgtaactacaaaaacactgaaaaatggtgatataaagagaacttataaagctgttgattctgaacaagattgggctgccataaaagctaaaaccgaacaagacattgaacgcacaaacaaaacggttggcgaattcatttacgaaaccctactggaaaatccagcgcagaaaataagaggaaaacttgtaaaaaccattgaacgaaaattttacaaggaggaattagagaaaatattaaccaagcaaattgagcttcaaccgcaactttttacaaatgagttatacaaagcttgtattgaagaattataccccaaaaatgaggctcaccaaaatgcattaaaaaaccgtgattttctttatttgttgatggaggatattattttttatcaacgtccgcttaaaagtcaaaaatctaatatttccggatgtcaattagagcaacgtgcttatcataaaactaataaagaaacgggtaaaaaagaaaaagttaagcaagctgtaaatgtcataccaaaatctcatcctttattccaagagtttagaaattggcagtggttacaaaatttaaaaatctataataaagttgatacggataaaggcgaacttatcgatgtaaccgaacagttattgccaaacgaagatagtagagtagatttgttcgattttctacagagtaaaaaagaacttgaacagagtcaatttataaaatattttattgataataaactcatcaataaaaccgaaaaaaaccattaccgttggaattatgttgaagataaaaaatacccatttggcgaaactagagcccagtttatttttcgtttaactaaagtagaaggtattaaagatgccgacatgtttttagatgaaaaaatacaaataggaaacaaggaaaacaactcatttatatctagaattgagcaattatggcacataatttattcggtttccgatattagcgaatacaaatctgccttagagaagttcgctataaagcaccatttaaatcaagaatcttttgtagccaattttattaagttcccgccttttaaaagcgactacggcagctactctaaaaaagcattgaacaaattgttgcctttaatgcgtagaggcaaatattgggatgaaaatgatatttcagataaagtaaagcagcgggtttcccaaattatggaacgtgttaattcgctacacttaaaagaagattacaacgctaatgaattagcagaagctttaggtaatgttagtgatgatgatgttaaaaaacagcttgtcaaaagttttgttccgtttgcgaataaaaatcttttacaaggattaaacacttatcaagcaacatatcttgtttatggcaggcattctgaaattggagatattcaaaattggaaatcacctgaagatatagaaacataccttaaaaatttcaaacaacattcattacgtaaccctatcgtagaacaagtggtaactgaaacactacgagtggttcgagatatttggaaacatcacggcgaaagcaaacctaattttttcaatgaaatacacgtggaattaggacgtgaaatgaaaaatccagcggataagcgaaaaagaatttcagatagaaacactgaaaacgaaaataccaatcatcgcattagagaaatcttaaaagagttaatgaaagatacttctgtcgatggcgatgtacgagattattctccaagtcaacaagatatattaaaaatatatgaagaaggcgtttaccagaacccaaggatagattactcaaatgttagcgaagatgaaattgctaagattagacggagcaatagccctacacaaaaggaaattcagcgttatcgtttgtggctagagcaaggctacatttctccctacacaggtaaacctattccattgacaaaattatttacacacgaatatcaaatagaacatattattccgcagtctcgttattttgacaactcattgagtaataaaattatttgcgaaagtgccgtaaatgaagataaagacaataaaacagcatttgaatatttaaaagcaaaaggcggaaatgttatcaatggacataaattgttgagtcttgcggaatatgaagcccatgttagccaatattttaaaaacaaccgccaaaagcttaaaaacttattgagtgaagatattcctgaaggtttcatcaatcgccagttaaacgatagccgttacataagtaaattaattaaaggcttgttgagtaatatagtacgtgaagaaggagagcaagaagctacttctaaaaacctggtacccgtaacaggttccgttacctctaaactgaaaaacgattggggtctaaacgataagtggaacgaactcattttaccacgatttgaacgcttgaatcaattaacacaaaccaaagattttacagtaaccaataccagtggacatactatacctagtgtaccggacgacttgctaaaaggcttcagcaaaaaacgtatcgaccatcgtcatcacgccttagatgctttggtggtagcttgttgtacacgaaatcatgggcactatttgaatgctttaaattcagaaaagaaaaactacggtttacgtgataagttattgattaaaaacgaaaatgaccattatattaaaacttttcaaatgccgtggcaaggatttgcaaacgaggctaaaaatcaacttgaaaatacagtcattagttttaaacaaaacttgcgcgttatcaacaaagcaaacaacaaattttggtcgtataaagatgaaaatggtaatttaaatctagacaaaaacggcaaagccgttaaaaaactccgcaagcaaataaagggtgataattgggcaattcgaaaagcaatgcataaggaaaccgtttcaggtaaatacaatattgaaacgccaaaaggtaaaattgcgacggctgtaagaggctcattgggggacattaaaaacgaaaagcatttagctaaagtaacagactcccaaataagagaagtgattttaccaaatcatttaaaaaactatatagatgtcaaaggcaagattaaatttgatgttgcctttagcgatgaaggaatcgaagatttgaataaaaatattatttccttaaataatggcaaaaagcatcaacctattcgtaaagttaagttttttgaagtgggaagtaagttttctatatcggaaaatgaaaattcagcaaagaacaagaaatacgttgaaacagcaaaaggcactaacctcttttttgctatatattgggatgagataaaacaaaaaagaaactatgaaaccgtaccgttgaatgaagttatagttcatcaaaaacaagtagcacatttacctaagaatgaacgtttacccatacagcctaatagtaaaaaaggttcatttttatttacgctttcgccaaatgatttggtgtacgtgccaactgatgaagagttaaccaatatatccttgattgattttaataacttaagtaataatcaattaaatagaatatataagatggttagttgcacaagtgtagaatgttactttgttagtcaaggtacagcatctttaataatgagttataattccaaatctaaacaaggggaattcggtagtaagaacaagctagaaacaacaattgacagcttggaagttaggataaaagaaaggtgccttaaactcaaggttgacagacttggaaatatatccaaagcttagtgctatgatcaaacgcaccctcttttttggcaaccctgcatacctcagtactaaaaacgaacagttggcggtcaattttcccaaagaggaaaagggtgaagtaactataccaatagaagatttgggctatgtagtgctagaaaatcagcagattactattaccaatgggttgttaatgaaattggttcaaaacaaaactgctgtaattacctgtgatcaacagcatttgcccaatggctttttacaacctttggtagggcataccgagcagaccgaacgtatgcgccatcaactgaatgccagcgttcctttgaaaaaacagctgtggcagcaaacggtaatggcaaaaatagagaaccaaggcaatcatttgttgcaacggggcaaaaatgccttaaaattaaaacgttgggcaaaagacgtcaaaagcggcgatggtgaaaaccatgaagcctatgccgcggcatattattttcagcacctttttgatattgaaggttttagccgtaatcaaaaaggtgtagcgcccaataatttactcaattatggttacgcaatacttagggtgataaccgctagagctttatgtagtagtggtcttttaccttctgtgggcatttttcatagaaacaagtataatgccttttgtttggcagacgatattatggagccttaccgcccctatgtggatatgttggtttatgatattgttgaaacgggttgcccgttggaggaacttaataccaacttgaagaaagagtttttaaatataccggctatggatgttgttttagatggtaagcaaagcccgttgatgaatgccatgagccgtaccactaatagtttgtacgagtgttttgagggaagcagtagaaagttgttatatcctcaggtctgacaggtaattgagcattatgcggtaaaagcaggtaattatgaaccaaaatagatttgaacggcttaaccaatatagatgtatgtgggtattagtattttttgatctaccaacggaaacggctaccgagcgtaaacatgctgcaagatttagaaaagatttattgaacgatgggtttactatgtttcaattcagtatttacatgcggttttgccctagcagggaaaatgcttgggttcatgtaaaacgaaccaaaaatgcactgcccaaaaaaggtaaggttggtattatgcaaataaccgataagcaatttggtatggtcgagttgtttcacggcagaaaagagcaaccaacagaaactccaagccagcaattagaactattttgaattaaaaaaatggatactaacttgtgttcaattcaaaattttggttcttattttataatcctattttatggcttaaataacagtataccaactttttacagctggtatactgtgaatcctcaataaaattaaagaactgaaagcaattcacaacaaatgggatgaagtagctaaagaattaggtactgtgaatcctcaataaaattaaagaactgaaagcaattcacaaccaacaaactaacgaataaaatttaaaaaatactgtgaatcctcaataaaattaaagaactgaaagcaattcacaactagccttttcccatgtttcgtcattgtctaactgtgaatcctcaataaaattaaagaactgaaagcaattcacaacaaagtgtatttccagtaattacagaagtatactgtgaatcctcaataaaattaaagaactgaaagcaattcacaactatttcttctttggttgcttttctaacatcactgtgaatcctcaataaaattaaagaactgaaagcaattcacaacatgatgccgttagtaatagaatcatcaaagactgtgaatcctcaataaaattaaagaactgaaagcaattcacaactaattgatttcataagtgatataaatagtaactgtgaatcctcaataaaattaaagaactgaaagcaattcacaacagtcgctaaagtatcaacatatatatgcacactgtgaatcctcaataaaattaaagaactgaaagcaattcacaacacacagtgccaacaggagccggcaaaacagactgtgaatcctcaataaaattaaagaactgaaagcaattcacaacagtatcggattctcctcatattcaaagttgactgtgaatcctcaataaaattaaagaactgaaagcaattcacaacagtgtccctttgtcccctttttgtcctgtcactgtgaatcctcaataaaattaaagaactgaaagcaattcacaacctttgtacaccttgaatatcatctaaatatactgtgaatcctcaataaaattaaagaactgaaagcaattcacaacaattttcttcatctttaaagttttctattgactgtgaatcctcaataaaattaaagaactgaaagcaattcacaactgcctgctttacagaatatcacacaagcgactgtgaatcctcaataaaattaaagaactgaaagcaattcacaactaaattcactttccatgaataaccattccaactgtgaatcctcaataaaattaaagaactgaaagcaattcacaactatatatgccttgaccatctaaatgcatgtactgtgaatcctcaataaaattaaagaactgaaagcaattcacaaccggctgcactcgcttccgttccgtgttcgtactgtgaatcctcaataaaattaaagaactgaaagcaattcacaaccgtgttctgatgaatgagatataacttcttactgtgaatcctcaataaaattaaagaactgaaagcaattcacaacggtcttctattggtgtcaggcattgccattactgtgaatcctcaataaaattaaagaactgaaagcaattcacaacaaactacaaacaatgagtttgaaaaattatactgtgaatcctcaataaaattaaagaactgaaagcaattcacaactcttgtaccgtcgttataatctacaccttactgtgaatcctcaataaaattaaagaactgaaagcaattcacaacggaggtggtcggctgttcctagggtcaaatactgtgaatcctcaataaaattaaagaactgaaagcaattcacaacactatccgtttcaaccgttgtagttagttgactgtgaatcctcaataaaattaaagaactgaaagcaattcacaactagattcgccaacacgcttacgttctgccaactgtgaatcctcaataaaattaaagaactgaaagcaattcacaacttgcttctcttcctctttcgcttcggctttactgtgaatcctcaataaaattaaagaactgaaagcaattcacaacatatagtacctgtaagttctgagaacgaaactgtgaatcctcaataaaattaaagaactgaaagcaattcacaacaacggataaatcagataacgaccctaatatactgtgaatcctcaataaaattaaagaactgaaagcaattcacaacctaaagaacttctaaggttgtttatcgttaactgtgaatcctcaataaaattaaagaactgaaagcaattcacaacaatctatattttgggcaacgctgaatatttactgtgaatcctcaataaaattaaagaactgaaagcaattcacaactgaatttaacggggttgtttagttttttttactgtgaatcctcaataaaattaaagaactgaaagcaattcacaactagcgcaacggctgtttttgttttcaatgtactgtgaatcctcaataaaattaaagaactgaaagcaattcacaactatgttttatggaaaaagaggatattattaaatgtcaatcctaatcaataatatttaactaggtaaatagtatagttaacatactgtaatcgctttacctaaccacatttgtaatactattcaattttccaacctttggtaaccataatatctgtatggggtggtaggatagctacccgattgcctaccctaagtaaccaatatgctaaccatttgaataaaataagtaacttttcgctaccctattccccaccattgttaaccacagagcgtgtttgaggtgggtagggagctacccgattgcctaccctaagtaaccactatgctaaccatttgaataaaataagtgacttttcactaccctatttcccatcattgttaaccacaaatccattttaaggtgggtagggaaatacccaattgccaaccatagctaacccttatgcctacccttattaaggacggtactgtcattttgtaactttgatattattttggaaagaaaatttaacggcggaaactggaaactagaaactttaatagagtttggtgtctagagtaatgaattaggggtgtgcgatggttgttataataagtttccagtttccagtttccttttcaggtcatgtaggtgtttgttccaaatttttgatacttgcccttttgataaaccagttatagcaataatgtctttctgtgatgcgccattgtttatagcctttttaaaaagctcatttttaaaagatttttcatcaatagcgttcacgcttgaggatgctatcatcttaaaatttgtaaaataaaaatcatttgtacagattgctaaatcaactgtttcaaccgagacataattctgaaattttttatctgcggatgtcattattaaatgcataactattattagtttataaatacttatctgcattttagaattgtattccttttcaatggcgggtaggtgttgctgttttaaaattaaattctgaacgtaatcatgaagcatctcttgtgcatcttcgctcaaaactagaggtaatgattttttagcgacttctatacttttacgatagtgtaataaatttttaagactgtttttataatcatttaaaattacctcgggtattcctgatttagacaatttgttattagtggttagcctagaagtaaatagaattctatctatcaaaccgctctccaagtttccattagcaaatagtttagggactaattgagtttgaattgagcccaatagtgttggataggacaactccattctataactatctgttgtttttctagaaatgtctatatgttggttggtgtagccctgcagcagaaaggtgttccattgcgatccctcgctattgtttttatttgatattttatctgctaaggctgtaagctcatctacaaagtttcctaaagaatatgggtttttaaaatgtgcatacattgctgcttcaatggtagaattttgagtaaagaattgttttctgtcttctatattttcatctgtagattccgttgattgtatttccttcttttttctttcaaatttctcatatgcttcatggtcacttctatttagtatctctgtagccaaactcatagctggtgacttgctgtctcctctgctgccaatcaatgcaatatataaatttccgtaattggtatacccaccctcttttaagttgaaggcaagtcctgcagcattgctgaaggcaaatagaatggaactgaatagatattcttttggtattcttttgtgtacgaatgcctgttcaataaattctctgtgttcgtttggtaacttgttaataaccctttttagttgcttaagagctatctccttttctgtaattaatttgctctgttccatcccgatattttcttgattgatgatattaaaccgtagtctacttcttgaatgctccatgggttgcccatgaatatatcctcattgctgctaagtctcagtgacttttctaaattcgagaagactttatctctttcttgattagtaagcgatagtggatgcttccaattgggataatgaactaaatctagtaaatcacctctcaatctttcgttcatacttgaagtcaattgctctacacttacatgaaaaggtttattcataatttggtaaagctctatgtgtggaatagcactatcgatgttgacattgtatttgcttaaaagcctttctagagtataagtatataaatttgcgagaggcagattattttttaataattcatccttatcaaaacttagtgggttgtctagttgcatgatgattgggttttagggttgatagattctaattgtgttcttttgaactcgatattattgataagacaccttaatgctacgtaaagtgaaatagggtattgatacctattttctggcggtgtgtaatttggtttaaattttaatggcttcataagattttatttagaattgattcatcttttttaaagccaataaaatttcactttttttgtaccggacttttgtccctatacggtatgcgggaactagattgtccttagtatatttccataaggtgacgagcgagatagagagcatttctgcagtctcttctcttgtaagcagaatttctgaatcctttgacaactcaccgtgttccgtgagtatgtcttttaatccttttaaaatttttggaataaaatctgaggattgggtgttttcaatttctaaaatctttttaatcattacagtgtgttttaaattcaccgtaaagaaaaattgatttaacccagtttatcgtgtaggtttcgactataaaagtggtctgtttaggtgatgcgcctagtgtttatagactttaaccaaatactcgaaagtgtttttattttctcgatataaattaaataacttattaagtttagcgtctgacttgtcacttcttaattgttttaaatctttatcatatgatttgtttactaactctatgtaatgattttgcttaatgttttttctaaacgcttggtcagtgtctagtatttcgaataaataggtccagtctactacgttattgattggcaagaattgtactgtatggaagaatagttcgcaatgaaatgcatccttaaacaaatgagggaatcgatttactttttttaatacattttctaaattgaaactagggtcgaacttgataaattcgttttttgatgtacgtagaaattgtaaaatttttttaagtattgggatgaatctatatgctttttcaaaatctatccaatgttgaatgtctattcccaaaaaaggataatcggaaaaattaattataaagtcttccggtacattctttttatgacgatttctttcattataaaaccaaatcacatcaaaccgatgatcaaaccgattattactataactcaaatcattatattccctgccatatactccttcttttagcttgttgtattttagaatttcatcttctataaatattataacgttctcaatattttcagtttctaaaatgtccgataatttttctttcaattctttagcattagttataacgaaagatttgacttccctgtggaataaataattaaaaacttctgtcctatattctttactgtcaatctctatgttattttttgattcaaaatcattaatctccttaatagtatgctgatagtcataatcagggtcaagtttagacattgcccattttagattacttatggaatataattctttacccttattaatgtcaatttccaaattatttaataattcagataccttagaatttaattgagcttcggctgaaaatttagacatgctttatatttgattaattaagattggagctttcggacttccaatgatcgcttatcattttgatatgctcatcttgactagcctttacgtaggcgttgaattgttttatgctcttatgtccagtagctttcataattattgatgaatcaaaccctgccaaatataaattagttgctagagagcgtctacatacatgagatttgataagttcatgtttaggaaaaagcccctcttcttttctgttggcaccttccttaattttagaaccaaatgtgagctcattaatttcaacatctttgcatacttccttaatatataaattgaatttttggtctgatatttttgaaggtagttcaccattccttttttcaagaatagcttcaaattgtgggtgtatcggtatggttaggttttgattggtttttatagtagtaatatttattacgtttccaattatattttccttgctaattctaagaaaatcagaaatccttaaaccggttctcaaaccgataataaacaaatcacgtgcattatccagtctttgcgagctactaaagtcatgattgaatattctgtcgatttcagattcgtttaaatatatttcgtgtgtctcgttctttggtgcattaaaatttgagcttttgtattgaggatttactgcgtaaccttcaaactcgatttctctgcaaaatgttttaatacgagagactaatgagccaattgaattgttatttagattttcgacatctctacagtaggtgataaactttttatgaaactttaaatcaatatcttcaaaacgatatttatagttttggtttttctcgaatgcttcaagttttttcaacgctgatttataattggtaatagaccgtggtttgatttgtttacctctatagagtctggtgctagcgttgtctacaaatctttgagcccaaggtactaaataggctttatattcctcgttctcgtttactcgtccgaaataggtagttacattttctttcaaccaagtttttgaaatatgttttttgccattgtagtctttgttatagctatcaaaaatgtaagtctctaactttgaaagttcagaattgatgaaatcaatattggtggtggtagcttttagttttatcctttgtttgctgctagaccagtctgattttaatgtactgaatccagttcttgttttttggtcaattctattgctatcccaaaacctaacataaatacttagatatttcttttttccgtctacaatgaagtattttaaattcaagctacagtattttttgccgatattttgccgaaaagtacttaattttatttaattcagcttaatttacttgaagtaaaatatataggtacatttactctagggcttaattttaaaggctctaacacgtttttattattattagggtagtgtgcagattaatagcggttattaccgcctcgagtacttctaaaccctcttagtcgtttgattaagagggttttttgtttaataaatcaaaatgttttgaaattataagatttgtttgatttattttcgcacgaaatacaacattttcaatagcttattttccattttaataattatcgcagtaccattgcaaaaagaatatttacggttatagacatgatgaactttctaaaaaaatacgaaatttggatatttttagccctcgcgcctttacttaatttcgtaatcacttacctgaaaagtaaggggctaatagacttctttccatataccaacggtcgcttttatgcgctgatgtttttattattgtttatcgtaaaaatcacaaaagggaatgagggtataaagaatttatttagacctatgctgatttggaaagtacatccaaagtggtatctgtttggtcttttattcgcttttacaataggcttaataacactatcaatagtagctttctataatggagatatgtctattcttgatttcgagatttacatacctacattaaaatttacattattcttattgtcttgggcatttctaggtgaagtggtatggatcggctatgccgttcgcgaactatcaaaagctataaaaccattttatgctagccttattattggatttgtatggtctttatggtggttaccttctgtttatataaatgttggagtaatagaagatttgcctgtttggccattatttctgaatatgatgggggctgccggtatgtgtgctattgtatattcaaaaaccaaaagcggaatatgtgtattggttatacagtctatgctaaatatgtcgctggtaatgctaccgatatctccagatgcaggtgacaatacatatcctatttttgcagttctttattttcttataatgttggtattcat

SEQ ID NO: 1400 - DNA, 14862 bp, synthetic construct
  misc_feature 1..14862: note = Synthetic
  source 1..14862: mol_type = other DNA
acgaattagcagagaagttatctgagtattgagacaaacgaatacataagctgaattacagaactcagtgtcgcatgaacggataacgatgccacaaaaattgacgagatggttggagaaaaaggctttcatgacaatggtgatggtgatggtgatggtgatggagcaaactacattagcgacagattgcaccttgaagatatgcaccctgctaacttttttttgcaaactgacatgtaatggcagtttggcatcataattttgcagccgaaacagaaaatcgactcgcaaaaacagttttttaattacatatagaagcaggcaatgtctattacgtaatcactaacactaagcattgccattcattctaataaataaaataatacactatgaaaaagacaattctcggtttagacttaggaaccaacagcattggctgggcagtagttaatgaaattgatgagcataagaacatttcttgtgcggggagccgcattattcctatggatgcggctttgatgggcgatttcgaaagcggcaatagtgtatcgcagactaaaaacagaactgcagcacgtgggactcgtcgcttatttgaacgtcatgccctccgccgtgagcgcctaaaccgtgttctttctatattgggcttcttacctgaacattatctatcatcgttgaatcgctacggtcagttaaacaaaggtgaagaaccgaaactaccttgggatgtaaaagatggcaagtccacattcttgttccaaaaatcatttatagaaatgacccatgagttttctcaagcgaatccagacctattgatgaatgacagaaaggtagcctatgattggactatttattacttgcgtaaaaaagcattgactgaggcaataagcaaacaagagttagcgtggattcttcatcaattcaaccaaaagcgagggtattatcaagctcgtggagaagaggaagaagccaaagttaacgaacgaaaagagttgatgacacttaaagtcgtctctgttaaagatacgggcgaagtatcaaaaggaaaaacatggtacgaagtgctgttggagaatggctggatatacaagcgcccaagtgcgtatccattagattgggaaggaaaggtaaaagattttatcatcactacaaaactcaatgacgatggcactgatgcaacagataaagaaggtaatgtaaaacgaagtttcagtgctcccaaagaagatgattgggggctgcgcaaaatcaaaacgcaacatgatatagatgcaagccataaaactatcggagaattcatttacgatgccttactcaaaaatccggatgagaaaataatcggtcaattagtccgtgtagttgatagaaaatattatattgaagaactgaaacgaatcttggacactcaaaaacaattcataccggaattatgcgataagatattataccaagattgtatcaatgctttgtatcctcaaaatgaagcatatagaaatagtattgccagcaaggactttacttacttattcttgaacgatattattttctatcaacgaccattaaagagcaaaaaatcattgattaacgaatgtccatacgaatatcataattataagtcatcggaaggcgagtggaaaagacaatatttgaaatgtattcccaaatctcatccgctatatgaagagttccgcttgtggcagttcgtggaaaacttacatatctatcataatgatgcaaacgggataggaaaaatagattgcacagcagagtatatccacgataaagcagagatagttaagtggttacttacacagaaagaagtttctgagaagacgatgcttgaacatttagcagaaaagaagacaaaagggttatcgtggaattatatctctgacaaggataagaagtatccagctgcaccggtgacagcaactatatcctctgtgttacatgaagcaggaggaacggcagacatgtctaatattatgcatgtatggcacatactatattccgtatctgacaaagttcaactaacggcagcattacaacattatgcagttgacaataatttaaccaatgtatttgttgagaagctgagcaaacaaaaaccttttgaagcagattatggggcatatagcgaaaaggcgattcgcaaactaatcaatttgatgcgttgcggagagtattggaaaaaagatgcgattgaccaaaagaccttagagcgcattgagcacatattgacaggcgaagtggatgataatatctctgagcgagtacgagagaaattaacctccatgcatgagattactgatttccaaggattacctttgtggttagcggaatatgtaatatatgatgttcgaaagaatgacacaaaatggaataatcccgaagatattgatagttatttacaagccttccgtcttcactcgctcaataaccctattgtggaacaagtggtaatggaaagccttcgtacagtacgagacatttggaagcaagagggacagattgacgaaatacatatagagttaggtcgcaaccttaaacagaatgccgagcagcgtaagaaaactttagaacgccagcaagaaaacgaaaaagctaatttgcgagcgaaactccttttgcaagagtttatgaatcctgacatggaagtggaaggagtacgcccttattcaccgagtcagcaagaattattccgtatctatgaagatggagtcttaaattctaataacccaagcgaggatatacaaaaaattatagatgacatcgcatcacttaggcaaccttctatgcaagatattaagaaataccgcttgtggctcgatcaaaaatataggtcgccatataccggcgagattattccgcttgcaaagttgtttacttcggcttatcagatagaacatgtaattcctcaatcacggttcttcgacgactctatgtcaaacaaagtaatctgtgaggcggaagttaatgcgcttaaagaccgtatgttagctcacgagttcatcttgttgcatggaggagaaaaagttaccttgtccggcggaaaagtagtaacgatatgtaacagagaaagttatgaacaattagtaagagataatttctcggggaataaagccaaacaggagaaactgatgcttgatgatatccctgaggaattcattgcgcgtcagttgaatgacagccgatatatcagcagactaatgacacaactcttgagtaatattgtccgcgagaaaatcaatgctacagaatatgagcctgaagctgtcagcaaaaacgtcattgtatgcaacggaactactacaactcggcttaaaaaagactggggaataaatgatatttggaatcatattatcttaccacgatttgagcgcctaaaccaattacaaaacactacggtgtttaccacacagactgctaatggacatattattcctaatatgccgatggaattgcgcaaaggctttgagaaaaagcgtatagaccatcgtcatcacgcaatggatgcaatcattattgcgtttacaacacgtaatcacgtaaacttacttagcaatgaggcagctttagaaaaagacgagaaagcacgatacgacttgcaatccatacttcggaaacgagaaatatggactgatgccaatggtaaacaacataccaagtttactgacttcaaagtaccttatgacggcttccaaaaagaagttcaggaatgtttggagaatattgtagttagttttaagcagaacttgcgcgttatcaacaagagtaataatcattctctacgttttgtggatggtaagaagcgaatggtgcgacaagagaaaggcgacaattgggcaatacgcaaatcattgcataaagaaaccgtattcggcagagtcaatttgcggaagaagaaatttgtaaatctaacttatgcgctacaacatataaaggatattgtagaaaaggatttgcgaaataaattgcaggagttagtaactgatggaaaagacgaaaagcaaattaaaaaatggtttgctgcagaacctgatgtatggtctgacgtaaatcttaaacgcatagaggtgtattattatacggaagatgcgaatgaacattattatgctgtgcgaaccgctatcgatgagagttttactgccgaatacatacgcaacaaagtaactgcggaaagtattcaaagaatcttacttgcacatttagatagttgcaacggtgacccgaaacttgcattttcacctgatggcatagaaaagatgaatgcacatatttggcagcttaatagtggcaggccacataagccaatctatagggttcgtgtatgtgaaaaagctgagaagtttgcagttggacaaattggtgctaagagtaaaaaatttgtagaagctgcaaaaggtacaaatctgtttactttagtttacgagaaaatagaaatggatggctctatatccagaaaacttgttcctctttctctacaagaagttattacggctcagaagcatgctcataaagaatggattgattatattaatacctattatcatgaaaatgaagtgctttcaaatgaatggatttataaatttactctatccccaggcaacttagtatatgtcccttcagaagatgaaatcaaaaataaaaaatatgatttaaatcccaatagtatctataaggttgtatctttagatgatgaaaatccgaattttatacctgtaaatattgcatctatgttaatagatggcgttgaatttggtagacacaataaaacaacacgagattcttatggttgcttaataaaaaagatttgcatccccataaatattgacagattaggcaatatatcattatgatcaagcgagtcctatgttttgaaaatcctgcacggttgagcctcaaattagagcaaatcgtcgtggagttgcaagatgccaaacgcaccgtgcccattgaggatgtgggtgtagttatcttagaccacaagcagataaccatcacacacgcgcttattgatgctctcttggcaaataactgcgctattgtgacttccaacgacaaacatcttcctgttgggctgatgcttccgttagacggacacaacctgcaaagtgagcgtttccgcgaacagataaacgcatcagaaccgctaaagaaacagctttggcaacagacaatagtaagtaagattctcggacaagcttacgtattgaatacacaaggtatagaacggcgtaacatgctcaaatgggctaagagtgtcaggtccggcgatgtggataatttggagggcagagcagctgcctactattggcagaatttgtttggtgatttggattttgtccgtggccaggaaggtccacctcctaataatatgctcaattatggttatagtattgtgcgcgctatgatggctcgtgctttagtaggtgccggcttgttgcctacgcttggtatttatcatcatagccgatatgatgcctactgcttggctgatgatatcatggagccatatcggccctatgtggatatgatggtcattgatatatggcaaaaaggagaagcagcagaggaactttcatcggatatcaaacgtaagttgttgggcataacgaccatggatgttattatagcgggtcatcgcagtccaatgatgctcgctatacaagcaactgctcaaagtgtgcagaaatgcttctccggtactgcacgcaaaataatatatcctgattggtagtttatctatcattcaagatttgtaactttgcaatataaaacagcatgaggagttatcgcaggcaatcctttcttgttgtgtatatcattcaaaatttgtaactttgcaccataaaacagctggagcgcggtatcggtaacccgttttatagttgtgtatatcattcaaaatttgtaactttgcaccataaaacagcagggcggtaaggctttcctggaggcgatcagttgtgtatatcattcaaaatttgtaactttgcaccataaaacagcaacaaagaaattaacaaataaagaaagcaggttgtgtatatcattcaaaatttgtaactttgcaccataaaacagcacctgcacccattacaccgcccaaaatcagttgtgtatatcattcaaaatttgtaactttgcaccataaaacagctcttgcagttgtgccgccgtcatagccaagttgtgtatatcattcaaaatttgtaactttgcaccataaaacagcataacggcagacggactgcgcgaacgtatagttgtgtatatcattcaaaatttgtaactttgcaccataaaacagcaaacgggacaggccgccaactatacgcgggttgtgtatatcattcaaaatttgtaactttgcaccataaaacagcccatactcaccacagtaacaataggttatagttgtgtatatcattcaaaatttgtaactttgcaccataaaacagccaggtgctttttgcgcatataatcatccagttgtgtatatcattcaaaatttgtaactttgcaccataaaacagctaatgatgggaatgaaatagaccttaaagggttgtgtatatcattcaaaatttgtaactttgcaccataaaacagcactttgggtagataagacaagtcggacatgttgtgtatatcattcaaaatttgtaactttgcaccataaaacagcttatacaatccagactcatcatcatcatatgttgtgtatatcattcaaaatttgtaactttgcaccataaaacagcgttgcatcttacgttactaagtttggttagttgtgtatatcattcaaaatttgtaactttgcaccataaaacagccgctgcgagatagtggcagtatcgagcaagttgtgtatatcattcaaaatttgtaactttgcaccataaaacagcaagcataaactacacagcgctcaacactaagttgtgtatatcattcaaaatttgtaactttgcaccataaaacagcaccgccgttgctatcgtaatatgttatgttgttgtgtatatcattcaaaatttgtaactttgcaccataaaacagcgatgcaacagctgcaaacagtcttgtaatagttgtgtatatcattcaaaatttgtaactttgcaccataaaacagcaacctgtacaacgccgacgaactgcgcgcccgttgtgtatatcattcaaaatttgtaactttgcaccataaaacagcaaaagcacgcgcgtttaaggcgtgggtagagttgtgtatatcattcaaaatttgtaactttgcaccataaaacagcagaacgtcaaatcatactcaatgctccggtgttgtgtatatcattcaaaatttgtaactttgcaccataaaacagctatcacggcaaaatactacgttattatgaggttgtgtatatcattcaaaatttgtaactttgcaccataaaacagcgccaccgctaccgcctttggcgacagcgcgttgtgtatatcattcaaaatttgtaactttgcaccataaaacagctatccctcacccccgccgaaatagcggatagttgtgtatatcattcaaaatttgtaactttgcaccataaaacagcgataggtattaagcaccgtaaatttagtagttgtgtatatcattcaaaatttgtaactttgcaccataaaacagcatacttgctgaacatcttgacgagcttgagttgtgtatatcattcaaaatttgtaactttgcaccataaaacagcgtgtagatataaaaccgttatagttatccggttgtgtatatcattcaaaatttgtaactttgcaccataaaacagcaaatccccagcctggaaacacctacgcgagttgtgtatatcattcaaaatttgtaactttgcaccataaaacagcataacgaggaacataaccaattacagactgttgtgtatatcattcaaaatttgtaactttgcaccataaaacagcatgtttgattggattggaatgattattgagttgtgtatatcattcaaaatttgtaactttgcaccataaaacagcaccaagaacgatatgcacgttgaccaagcagttgtgtatatcattcaaaatttgtaactttgcaccataaaacagcggcggtggcgtttatgctacatcggcacaagttgtgtatatcattcaaaatttgtaactttgcaccataaaacagcatagccgaaagttgcacctatcacctcgtgttgtgtatatcattcaaaatttgtaactttgcaccataaaacagctaatacattattttatcctttaggggctagttgtgtatatcattcaaaatttgtaactttgcaccataaaacagcggacatcaatcaagacatccacgttcataagttgtgtatatcattcaaaatttgtaactttgcaccataaaacagcagtaccaagcaaaacagaaagaccggatggttgtgtatatcattcaaaatttgtaactttgcaccataaaacagcacaagaaaaagaagccaaacaagccgaactgttgtgtatatcattcaaaatttgtaactttgcaccataaaacagcacaatctgcgtaagttgcaaagtatgagattattaaaagctgttttataaatagaaaaagtgatactaaaaatgtcactttttctatttatttaagagttttatgaagactaaaataactctaattgttgtacgggttgttgcttgcttatttctttgcaacactcaaaaatttgcatatcaccaaattgcttatcggtgattcttaatatacctattttaccatgaggaggaagccaacgtttgactcgggcgatatgaacatcggcattttctgcacttggacaatgacgaagatagatagagaactgaaacatcgaaaatccatccttcaataactgttttctaaacatagcatactctttcttatcttgctttgtctcagtaggaaggtcaaataatacgagtacccacatgattctatattcactaaaacgattcacagtttgtaaagttaaaaaatatattggaaataaaaaatatcaatattaattttgttatgtaaaaaaaagtaattacctttgcggcacaaattagaatgatatacacaataaggattattccgttgtgaaaacattcaaggtgggacgcaagtctcgcctttttatattgtttgtcagttatataaaaatatcaatatgataaaatagttatttccctattctggacaataaacaccaaacagtacctcaacacgttccgcaccaaaatttgtcttttctcagacactatctgacttataccaatattaattgctaacccgaaaagtgtcttccccctccgccaaacgccatccggcattccaacttcaatgacgaacccatgtgtactataggcatagaatacaagtgtcttacagaaaattcccaagactattttgccgtacatcttattctctccgtaagcatcgaagcctgtagcatttctatcgaagggttgttcatgagagaggatggcaactcatatcattctgatattcctcactgcgtgtcagtacggctttggcataggagcagacaggcagaatcgtgcggttgtttgcgcgggcaaaatccaccgttcgatgaccactggcggaaagctatagcgcgcttggaattaacacggtagcctatagagagtataatatctaatgagtaaaaaggaacaggtttcttactccattaacgtgtaaaaaatgcacgttattctcgcgcgatacttcttcatcacgaaaaacattaattatgtgacgacgtatgtttgagtcctctttcccaaataattctgccatttgcgcagctgtcagccacacagtttcgttctccatacgcacatcgagttgaaccgtgttgtcttccgcacgaaagataataatttcgcctttattttcattgggttcctcgttcatattgtatggctgcatttttcgcgatagtactatattcaccaacggtttccaaaatggaaaccgtcggtatttcaaaaaaaactgcccgcttgccggcctcatttagaatttgactgccttgaatgacatgtcgagggctttgaaggagtgggtgagtgcgccgacggaaacgaagtccacacctgccaaagcatagtcgcggatagtgtcaagcgtgatgccgccggaggattcaatttccactttcttgccgttctgctgttcccattggcgcacaatctgcacagcttcgcgggtctgttcaggcgtgtagttgtcgagcatcacgcggtttggtatgccggtggagagagcctcacgcagttcatcgaagttgcgggtctcaatctctatgcgcaggtctttcttcttttcgcggcaatagcgttgagccgcagtgagagccgcagtgataccgcctgcaaagtccacgtggttgtccttgagcagaatcatatcaaagagtccgatacggtggttcataccgccgcctatcttgaccgcctctttctcgaggtatcttagtccgggtgtggtcttgcgcgtgtcaagcacgtggcagccggtgtcagcgatgagcgactggtagcggtgggtcgtagtggcgatgccggacatacgctgcattatattaagcattgtgcgctccacttgcagcagactcagttcccttccatagacacgaaaggcgatgtcgccttttttgacttcatcgccgtctttgagaatctgctccatacgcaggtctttgtcaaaatactcaagtaccgcctttgccacttccactccggcaagcactccgtctgcttttattattagttgctggcagccttgttgcgaaggcggtatgcaacagagcgacgtatggtcgccatctcttatgtcttcttcaaaccagatggctatcagtttgttaagttctgttttttccatgttttataagtgtttatattctttctgcatgttgtgtttctatccacccttcgttgttgcccacctgtatgttacaccactcgccgagcacttctattatctccactttggtgccttcgtgcagtgtaaacagttctgtgccgctttggtcgggcgacgacttggcattcagtatgcctagtgttattatagcctcgctgcgcttggtgtcgcgttggtggagcgagtgagcgttcagtccggtcaggagcgacagcagcagacatatccaagccgtgtggaatgcggtcttgcggattaccactttccccccgagggcgaaaagcagcgcacccgcgaggaagaggtaaaacaagacgatggacagtatgctccaagttcgctctttcagttggttcctcactgtcttcgcccatgaggagaggaagaaagtgcggttgtcgtctatgtcatccactatgcgtgtcttggcgaactcaagattaaactttgcgtccttatgcctcgggcatagcctcaggcaacgctcgtatgcaagtatggcttgtgccgtctcgccctgtttgaagcgggcattaccgaggttatagtatatctcgccacggctctcgtcggtcaagtatccctctgtcgtgtcttgcagacactgctcgtatgcctctgcagcctgctcccattcactgtctgcatagtaggcgttggcttgagtaaaaagagcagatagtatgatgaatatcagtttcatatcgtttcgttttcaagtttgtttatcagttcggttgtctggtcgtacattgcctgcatctcctgccccgatgtgggtgcatagcgggcaaactcggcatcggaaagtactttgacggcttcttttattatctcttcgtccacgttcttctctttgagtatggcggagatattctctttgttcagttcggatgtcggtatggacaagcggtcgctaagataggtgagtgcggctttctctattgcttcgtaaaactctgttttcttctgactttcaagttgtttctttgcatcccgtagccgtttttgtgccactttaccggctttcttgtagcgcattctcatgccatcggcgttctcgcgtatgcggcggcggaagacaataaacagcactattgcaccgataagcggtatgagatacagcaggcgaagagtagcactgcttaaagcttgtttaggagccttctgtagagttgtcagttcggcggtgtggatatatcttatatcactgccgagttgtctgatattctctttgcctacgtagttctgtacggtggcagtctgcgcatcgtcgcctgctccgcgcttgatgttcagtgtccacggaccggctgtgagttgtttgtaaccgtcagtggctgtgtcgaaataactgaaagtgatttgcgggatggtatatgtacctgccgcacgtgggatagcgaggtattctatcgtgcgcgtaccgcttgtaccggcagttgtcgtctttaggctgttggttaccttcgggtcgtaggtctcaaacccctcgggccagtcaatggcagggtttttcaccaccttgatattaccattgccgctcaaggtcagtttgatggtaacagcctcgttggtggtcagttcggtagcggagatgtcgctcttaaggtcatacctacctacgccgccggaaaatcctttaggcttacctgtcggcagcggctgcgagtgtatcgttactccgggtgcggtcagttgtttggttacagtggtgtatgaaccgaagaagtcatcgaagatagaccttacctgctgccttacctctacgcgcagtacggcttcaaaggaggcggggtctatctgtatgtcgccgtcgcgctgcggatagagcagagtacggtagagtacggcggtctggtagttgcgcccgttgtagtgttcgagttcggtctgtatgtcgccctgctcgaggtcttgtttgagaaagcctgtgaactccggcagacgggtgttgttggtgaactgcgctacgtccaccccggcaaaatacaatttgtacgtcagcagcaacgcctcctgctcgtgcagggtggatttgcttactatagtgcggataaatatgttctccgatgacactcccgctgtgttttgttgttgcactctgccggtgttaccctgcgctcctgtcggattggtcggttgctcgtccggtggcaggacggttatcttcacgccgttggaggtataactgtcgccgtccacgcgtatagtggcaggaggcagggtgaaactgccttccttcgtcgccataagcgtgtaagtgtaggtgagcgtgaaggtggaagtgcgcttaccgttgataaatgacgtggaagacgactgcgactgatacggaccggctataaagtcaaagtcggtaaactccggcacttgtatgtctcttgcgcgctgattgacagtgtatgtcaactgaaacgctttgcctactatcacctgcgatggggcttgggcgcggaaactcacttcctccgccctcgctcccaacgcaactgctaacagacagaaaatggtaataagaccgctttttttcatttgcttgtgtgcaatcttggggttgttgtgataataataacacaatttcagtacaaagattgtgccacttgtgcaacttttagcgcaattattccgtttttagtccgagaatactcttcacgaaactttccctgtcaaacatctgcaggtcttcctgtctctcgcccaagccaatatacctgacgggtatcttaaacctgtcgcttatgcctatcaccacgccgcctttggctgtgccgtccagtttggtaacggcgagcgatgttacctgcgtagcgcgcgtgaactgctgcgcctgctcaaaggcgttctgaccggtggagccgtcaagcacgagcataacatcgtgcggggcatcgggtacgactttctgcatcacctgctttatctttgtcaactcgttcatcaggtttaccttattgtgcagtctgcctgccgtgtctattatcaccacgtccgcgccgttggctttggctgaagcgagtgtgtcatacgctacgctggcagggtcgctgccttgctgctgttttaccaccggcacgccggtgcgctcgccccatatacacagttgctctacggctgcggcgcggaaagtgtcggcagcaccgagatacactttcttgcccgcctgcttaaactgccaagccatcttgcctatggtagtagtcttgcctacgccgttaacgcccactaccataattacatacggcagacggttaccgttgttgtcggtgcgcggctcggcgtaaccgtcattggcaatcttgttctcttcgagcattgccgcaatctcttccacaagcagtcggttgagttcgccagtaccgatatacttgtcgcgggcaacacgagcctgaatgcgctctattatcttgagggtcgtctccacgcccacatcggatgtaacaagagcctcttcgagtccgtcaagcacgtcatcgtcaatggtcgatttgccgactatggcacgacctatcttgcttagcaccgactccttgcttttctccagacccttgtcaagcgtctcctgttgctccttttttgatttgaataatccgaaaaatgccatatctgcgggtctgtataggttttacttcaggtagtagtccacggtggtaacgacacggatgtgcttgatccacggttgatattcgtcgctttcgatagtgaactgcccttggttggcgcggcggatactgcctaacttacatttggcatcctcggcgaacttgatggctacggcacgggcattggcggtggcttcctctatcattgcgggcttgatgtcggcaagaccgttatactggtagtcgatgctccactcttgtatgtttacgagt

SEQ ID NO: 1401 - DNA, 14805 bp, synthetic construct
  source 1..14805: mol_type = other DNA
  misc_feature 1..14805: note = Synthetic
tgggataagttgctggcccctgccctgtctttgttgagagctgctactgtgcataaagcaggagttgagcaggccctgaacagggggtgaacaggcctttctcggtacatcgcagataacgcagataaatatataaatgccacaatatctaaaaaaagacgacggagtaatacactccgccctcttattagttttcacaacggaataatccttattgtgaattgcttgaaaagtgatgcaaaaatacaacttatttttcacacggcaaaatatttttttgcaaattcctaaaatatacgtacttttgcatttccaacacatcaatcattatggctaaaataataggacttgacctcggcacaaacagcattggatgggcagtggttgacaatgagaaaaaatgcattgaagctgccggctcccgcatcattccaatggacgcaggccgcatgggagacttcgaaaaaggaaattcagtttccttcactgccgaacgtactcagtatcgtggtgtacgcagactacatgagcgctacctgctgcgaagagaacgccttttacgtgttcttcacatcatggaattcttgcctaagcacttcgccgcacaaatagacaggtatggtaaaatatcgtcctcaaaagaacccaaactagcctggagagaaagtgaagacggaatgaatgaattcttatttagggcatcctttgacgaaatggtggccgatttccgtacagcaggatataataacaacattccatacgactggacaatctactatctgcgcaagaaagcccttaccagacccctctcaaaagaggagctatcgtgggtattgatgcaattcaaccaaaaacgaggctactaccagttgcgaggaaaacaagatgagttggacaaccaagcaaacgataaaggagtagagaaagaatatcaggagttaaaagttatctctgtaaaaaatacgggtgaaaaacacaagaatggaagcctttggtatgacatcactctggaaaacggatggatctaccaccggccttgccgcaccgcccccgattgggaaggtaagactcgcggatttattgccacattcaaactggacaaaaatggaaatcgtaaagaagagcaaccatcattgcgtgctccagatgaaaacgactggggactgcgcaaaatacgcacagaggaaacaatccgacaatcaggattgaccataggagaatttatttacaaaagcctattaacaaatcctagccagaaaatcattggagaactcgtccgtgttgttgaccgcaaatactacctcgatgagctccaccgcatactcgacaagcagcgggaatatattccagaactgaacgaccgcgacctttattacagttgtattgaagaattatatccaaataacgacgcctaccgcaacagtattgccaaacgtaacttcacctaccttattgccgacgacatcctcttctaccaacgccctctgaaaagcaaaacggaccttatcaaagactgtccctacgaaaagcgcaatgggaaagccataaaatgcattgccaagtcccacccaatatttcaggagttccgcatatggcaatttctatcaaacctacggattgagcactgtgatacagatgtgacggcactgttgttaccagatacaaacgcatgggaaaatttgtataactggttttcctctcaaaagagcatcaatcagaaaagtctacttaaatatcttaaaatagacaaatctgatattgacacctaccgatggaactacgtacaggacaaagattacccggctggagaaactcgcgccatcttactcggtgggcttcgcaaagcaggaatccctgaagaattcctaaacactgaacatgaactacagctgtggcatattctatattctattgacgaccccacccaatatgacaaagcactccataccttcgcccgaaaacaaaggtgggataatgaaagagaggcgtccttctgtcaagtcttcaaacaactcaccatatacaaagagaaagactatggtgcatactcagcaaaagccatcagtagactactgccattaatgcgctgcgggaaatactggaaagaaggtgatatcgatacacagacacgccaacgcatcacacatctcattactggcgaagctgatgacacacttcctatcgctatccgagaacgctttaaagacctcacaaatatatgtcaatgtcaaaagcttaacacctggcaagcatgctatctcgtctacggccgacattccgaagtcgcagatgccaagatatggacaacccccgatgacatagatttatatcttaaggaattcagacacaattcgctcaacaaccccgtagtggagcaggtcgtaaccgaaagcctacgagtggtaagagacatctggcgacaatacggacatcccgatgagattcatatcgaattggggcgcgaattaaagaaaaccaaggctgaacgagaaagactggcgcaagtcatcaccgaaggcgaagctaccaatcaacgcattcgtctgcttcttacagaactgatgaacccagaataccatgtggagaatgtccgcccacaatcaccatctcaactggagttgctcaaaatatacgaagaaggcgtcctagatagcaatattgaaataccagacgacatcaatgacatccgcaaacgattcacttcagcaaagagccaacccaatcacgccgaaataatccgctataaactatggctcgaccaaaaatacatttcaccctataccggaaaacccatccctttggccaaactcttcacacccgcctaccaaatcgagcatgtcataccacaaagccgttggttcgacgactcgatgagcaacaaggtaatctgtgaagcagaagtaaaccaactcaaagaccgagaacttggacacgagttcattgtaaaccatcatggcgaaagagttcaactaagtctcggtggaactgtcgatattctttctgtcgatgcttacgagaaattgataaccaatttatttgtcaacaatcgtgcaaaatacagaaagatgatgttggacgaaataccggaagacttcaacgctcgccagcttgtagacagccgatatatcagccgtctaatgatgcatctgctctccaacattgtacgttcctccgatgaaaaaggaaaccaagaggatgctgtcacatccaagaatgtcataccttgtaatgggtccattaccgaccgcctcaaacacgattggggtcttgacgatgtgtggaatcgaattatcctctctcgcttccaacgccttaactcaataaccggcacatcattctacactgcaacaaccgccaatgggcaccaaatcccacaggtgcccctcgatatgcgccagggcttcaataaaaaacgcatcgatcatcgacatcacgcaatggatgccatcgttattgcatgttgcacccgcgaccacatcaacctgctcaacaacgaatccgctagagagggctctgctcgttacgatctccaacacaaattaagggaaacagaaaattatcttgacagaagtggaaaacgtcatgagaagttcactaatttcattaaaccttggtccacttttactgaagatacatttaatattcttgcaaatatcattgtaagttttaagcaaaatctacgcatcatcaacaaaaccaccaaccactattatgtaatctgcgacggcaaacacgcaatccacaaacaagaaaaaggagatagctgggctattcgcaaacctctgcataaggagactgtctttggagaagtgaacttgcaacttaaaaagagattgcccataaagaaggcattgctagacatcaacagtattgtaagtcatgaactgaaagaaaaaattaaagaaaagaaagctctcggttacagcgacaaacaagtgttagaattcttagacaagaataaagatgtatggagcgaagccgcagacggaaaggttgaggtttactactatactaagaacagtggcgaccgctatttcgccacacgcaaagatttactttcctacttgtccgactgtacaaccattgcagcagcagagaaagccattgataatatcaccgacagtggcatccgcaccattctgaaagcccatctcgccgtcgaaggcaataatccctccgaagccttctctgccgacggactggaaagaatgaatcacaacattagagtgcttaatggtggtaagaatcatatgccaattaagaaagtgcgcgtttttgaacaggccaacaagttcagtgtcggcaataaaggtcagaaagccaccaagtatgttgaagcagctaaaggcaccaatttattctttgtcatctacactaacgccaaaggactacgaggatatgccaccgtaccactcaacattgttattgacctgcaaaaaagatatgaaaaagcatggagagaccaccttgcagaaaggctgaaagaatccgacttaaaactaatgtccgataatgaccaaatactatacgtactttctcccggagacttggtatatgtgccactgaataaggataacaacgcaaaagatatcagacatttcgatacgaaacagatatacaaaatggtttcatgcggccaattacaatgcatgtgcatacatcaccacgtagcatcaccaattgtaaataaagttgaattttcaacacaaaataaaatggaacgagctctcactggtgaaatgattaaagaagtctgcattcccatacaagtagaccgcctaggaaatatcattaaaataggttaatctatgataaaacgcaccctttgtttctcgcacccagcatatctgtcgctacgtaacggacaactggtggtgaagctggagcctcacgacgacgaaccagaaaagcaagcctcaatacacatcgaggacatcggcattgtggtgctcgaccatagacaaataacaattacccacggcgtgatgtctgcactattggacaacaacgcttccgtagtaacctgcgatgcacagcatatgcctgtagggcttatgttgccacttgaaggtcacaccgtccagcaagaacgcttccaagaccaactcaactcatccgtccccttacgaaaacaactgtggcaacagaccgtgcaacaaaaaatccgaaaccaagctgcacttctctccgagctacatagcatagaaattggaaatatgaaacggtgggctggagaagtgctctctggcgatagcaccaaccttgaagggcgcgccgcagccttttattggagccaaatgttcccttccataccggacttcacccgtagccgcgacggcatctatcccaacgcattgcttaactatggttacgctatactgcgtgccgtcatcgcccgtgctcttgtgagtagcggactcctccccacccttggcatccaccaccataaccgctacaacgcctattgtctcgccgacgatataatggagccataccgtccatatgttgaccgtcttgtggtacagacaatggccgtctgctgcgacacagagattacaacagctataaaaagtcgcctattaaccataccgacacttgaagtgcacataagcagccaacgcagccctttaatggtggctgccagccagacatcagcctctctagcacgatgcttcgcaggagaaagtcgtcgtgtagcttaccctgagatgtagccatggaccgtttcagtgaataccgcatcatgtggatacttgtgttcttcgacctgcctactgacaccaagaaagagcgcaaagccgcaagtgattttcgtaagcaccttatctctgatgggttcacaatgttccagttctccatttacgtacgtcattgcgcaagccgagagaacgccgacgtacacctaaaacgagtcaaatccaaactacccgaatatggccaaataggttgcttgacaattaccgacaaacagttctcggaaatcgagctgtatatctgcaaaaaagaagttgaacccaacgctccaggacaacagctggagttattctgacagaatcgaaaaaacaaaagtaacaataaaaaaatcccacctatactggtgggatttttttagtctttgacagcctatgaaacattgtatatcattacattactgacattgtaatgtcaaagagctattatcaatgtttctttttcaagcaattcacaacgcatcatgttagtagtatggctgtttttcaatgtcaaagagctattatcaatgtttctttttcaagcaattcacaacgctggtggtgattgacgaaagcatatcgcaatgtcaaagagctattatcaatgtttctttttcaagcaattcacaaccaactgacacacctgtgttcacgttgcgaaaatgtcaaagagctattatcaatgtttctttttcaagcaattcacaactaccacagaaatgtattgaaaggaagtaccaatgcaaagaactattatcattttatttcatcaaatttgtagctgcggttacgattgccgccgcgggcttccagatagccatactcggtgagctggcgcaggtagcgcttggcagtggttggcgagaaaccgaaatgacggacgatatcctcggttgtgaactcgcccctgtcggccacaaaatccaaaatatcgaccatttttccggccaaagtgtgttttatcgaccatttatcgaccaggtcctgccacaaagcggctttatcgaccattttctcggaagtcgaattaagatattggtcaatatcggttcgcaaatgctgtacttggagattggccatgcaattctggaaaatactaatatccttcgcctcacgggtgtcgataagagcttggatataggtagctttatcttccttctgtacctttgtgggcaacacaccgaactcccactgcaaaagattcatcagcagacgactggtgcgtccattcccatctgcccatggatggatggtgaccagctcataatgcgcccaaaaactcaggtcatagacagcacaaaggtccgtggggtcgatggccttgcggcggcgattaagttcttcacagaaggtcgccagacgttcgggaaccttgagatatgacatatacgacttgccacccaatccagcggtgacattgagtttgcgcagttctcctttagcagcggagaagttgccacccaacgcgctgtattcactaccagtgctggccatcaccctcgccgccaatgtgataagccattctacggtaatgggttcgtggcgcttgatccactcgcggccgtattcgtaggcaatcttgaggtcgaggttcatcatctgctccaccacggtgcgtttgctggaagtgataccttcgtcgaacagcaattgcgcctctaactcggtcaccgtgctaccctcgatggcggtggaatgcacaatgatagagtacagatagaatttgtcgtaatctatctgcgaggagatgcccaactcacggtgcctgtctatcaattttaataatatgtccctattctcttttgtcatatttcaaattgcaaagatacaaataaaagctcaatcgaccaaattttacaccgaaattgcattttcataccctcggcacaatattttcgacgttatcaaatatatggcaaatcaagacgatttcttcaagaaagtggtggctcacgccaaggaatacggattcatcttcccgagctcggagatctacgacggcctcgccgctgtctacgactacggccagctgggcgtggagctgaagaataatatcaagcagtactggtggaaagctatggtgcagatgcacgagaacatcgtgggtctggacagcgccatcttcatgcacccccgcatctggaaggcctccggccacgtggatgctttcaacgaccccctgatcgacaacaaggacagcaagaagcgctatcgcgccgatgtgctcatcgaggatcatattgccaagatcgaggagaagatcgagaaggagtgcgagaaagcccacaagcgcttcggcgacgccttcgaccgccagcagttcgtcaccaccaacgcccgcgtgctggagcaccaaaagaaaattgacgagatccgcgagcgctatgccgactgcatgaaccgcaatgacctcgacggcctcaagcagctcatcctcgacctcgaaatcgtctgccccatcagcggcacccgcaactggaccgacgtgcgccagttcaacctcatgttcgccaccaagatgggctccgtcatcgatgacagcgacactctctacctgcgtcccgagacggcacagggaatcttcgtgaacttcctcaacgtgcagaagagcggccgcatgaagataccgttcggcatcgcgcagattggcaaagccttccgcaacgagattgtggcccgccagttcatcttccgcatgcgcgagttcgagcagatggagatgcagttcttcgtgcgtccgggctcggagctggaatggtttaagcactggaaggaggagcgcctgcagtggcacctcgccctcggtatcccggccgactgctaccgctaccacgaccacgagaagctggcccactacgccaacgcggccacggatatcgagttcaagttccccttcggcttcaaggaactcgagggcatccacagccgcaccgacttcgacctcggccgccacagcgagttcagcggcaaaaagctgcagtacttcgacagcgagctcaacgagagctacacgccgtatgtcatcgagacctccatcggtgtcgaccgcaccttcctcgccatcttcagccacgcgctgaaggaggagaccctcgaggacggcagcacccgcaccgtgctctcgctgcccgccaagctggcgccctacaaggccgccgtgctgccgctggtcaagaaagacggcttgcccgagaaggcccgcgagatacagcacatcctcatgcccgacatgatggtacagtacgacgaaaaggacgccatcggccgccgctatcgccgtcaggatgccatcggcactcctttctgcatcaccgtcgacaacgacacgctgaccgacaacgccgtcaccgtgcgtcaccgcgacactatgcagcaggagcgtgtcagcatcgaccagctgcccgcctacctcaagagcaaactgtaattaccgaacaacaaataaaaacggggccacattcaaatgcggccccgttttttttattcatacaccagcgacaggatgtcatcgagtattgggttggtctcgtgcggcggcggtgtagcggtggaggcgccggtgaggaggtggcgtgcgatgtcgagggcggcgaggtcgagggcgtcggaggcgagcaggacgtcggtgatgacgccgcgggtctcgtcgacggtgagcgacagctctaccccaccccagtcgaactgggcagagcgctgggcggtaaaggtgcgccagcggccatacttccattccggtgaggcgaaatcttcgtacaaagccttcacctcggggcgggcgatgatatcactgaaaggaacctccatagcctttcctccatacacttcttcgaatgccgaccgcaggtgcggcacaatgctctccgaggttatctcggggttcagctcggcgaggttaaccacacggctgcgcaccgaggcgacgccgtgcttctgcagcttggcgggcttgggcttgaggtaacgctgcaggtcttccatattgcccttaatcaggatagtgccgtgatgcaggtcctggtagcgacccttgctgaaggcgttgccgctgaacttacggccctcggtgaggatgtcattacgacccgacagctcggccacaatgccgaagtcgagcacagcgcgctgtatgacgctgaactgacgcgtctggtcatatattgccttggggacgacgaagctgaagttgatgttgccgtcgtcgtgatagacggcgccaccgccggtgcggcgacgcatcaggtagccaccgtcggcctcgagggcctcgacgttgcactcgctgaaagggttctggttctgtccgatgacgacagtgcgacggttcttccaaagataaagtgtcaccacctccgtctcaggcagcgacaacagataattctcgaccgcgatgttccaataaggattggtctgattagaaacgataaactgtagtttcatattctttttcaacggctaaattgctacgcagtacataatttattgctaatcactcgagttatgcctgcttgattaggccgttttctgtttaaaaatgatagctcaatgtgaagtaattcggcgcttggccgaggtgatagttgcggcgggcgtagctgaactcgaagttcttgacgtggagacccacaccgaacgagaagccgctgaggttgagggcgtcggtgcccctcatctcggccgcctgcctgtagttgtaacccacacgggcgaagagagccgtgccgaggttgagctccacaccgaagaccgtgtggcgcataaggttgtccatgaatcccacaaaaggcttctcctccgtcacctcaccggtgaaggcgtcaacctgcgttgtggggttcagcttgtcgttgtagcgcaggttccacttctgcagctctgtggcggcgaagaagaagcggaacggggccttgctgagcttgtacgacaatgccgccgagagctcgaaaggcacactctccaccttactgtcgaaggtgacaatctgcgcccctatgttgttggccataactgtggcggcgaagcggcggttgtcagacacatagctgccggcaaggtcgatagccaacgacacagccttgtattccgcatactgcgaccacacaggcttgaaggctgtaccgatgctgaagttgctgtcgacccacatgccccaccccacgctcaccgcgtagtcggcggcatagaaatcgccgacatggttctccaactcgtcgtactcctcgaacttgccgtagctgttgaagtggaagccgaagagcacagtacctacatgcttgaagttgtgggcataggccagagagcccatgttgccaccgacaaacatgctgtagtacgacagcatcgccgtgttgcccatgccacttgtcagcagcgacgggttgtcgagacctacggtgatgtcactcgagtagagcggcatatacctcatgccgagggcattggtacgtgccacactgctgcgcttgagcaacgggaggtcgttcaagcctgcaatctgggcttgaatagaattgagaattgagaattgagaattgagaattatggcgaacacaattattcgccataattccctatccttcaaatgattctcaattatcaattctcaattatcaattcttcttgttgcgttcgtggcgcatcaggtggctgggctcgagggccatgcggtcggtctcaagcaggctggcgacgccttcgtccacacggcgcttggcctcgcaggcctcgcagtggcactcctcgtggtactcgcgcggctcggtgtaggtggtgatgacaccctcgaagttgcgcaggatgaccttatcggggctctgcgagattacatactggggcatgacgggcgtcttgccgccgccgccgggagcgtcgaccacgaaggtgggcacagcgtagccgctcgtatggccgcggaggttctcgatgatctcgatacccttgctgacgggggtacggaagtgttccagacccatgctgaggtcgcactggtagatatagtacggacgcacgcggttgcgcaccagctcgtgcatcagtttcttcatcacatggacgcagtcgttcacgccgcgcagcagcacggtctggttgcccagaggaataccggcgttggcgagacgggcaagagcctgctcagcctcgggggtgaactcgttggggtggttgaagtgggtgttgagccagatgggatggtatttcttcaacatctcgcacagctcgggggtgatgcgctgcgggcacacgaccggcgtacggctaccgaggcggacaatctccacgtgcggaatcttgcgcagacggccgatgatgtactcgagcttctggtcgctgaccatcaggcagtcgccaccgctgagcagcacgtcgcgcacctgcggggtcttctcaatgtaagccaggcacttctcgatgcgctcgctggggctctcgtcgtccttctggccggcgaaacgacggcgggtgcagtggcggcagtacatggagcacatatcggtgatgaggaacagcacgcgatccggataacggtgcgtcagtccgggagcgggcgagtcttcgtcctcgtgcagcgggtcgttgaggtcggcgggggcaatgttgcactcctcaccggcggggatagcctgacggcggatggggtcgtacgggtcgttggggtctatcagcgagaggtagtacggtgtgatggccatacggaacttagccagagctttcttgataccctcggcctcttcgggcttgaaggtaaagtatttgctcagctgttcgtaggtctcgatgcggttcttcacctgccatttccagtcgttccactgctcgtcggtgacgttggggaacaattcttttctgcggttaactttcattggttgatattgtttgttttcttgtttttaacttttctctccaccttatcggttacggtctctgcaggaatatctcatccaggcacttgttgatagcgcgggtgatggctcttgcctcgtcgccgcccttgtcgtcggcgcggcatacacatatcagctcattggtctcgccgttcagtacctgtatcgtcacctccacagcgcgctcttcccagaagccctcacgcgaattaccgtcgccgtagttgataatcatcgtctgggcggcattctgctgcttcacctcaggcacacgcacatatccgcggttcatcaggtagcccgcgataaggtcggcggggttcacgctgttcgacctcgtcgagccgtagacgttgccgttatgtccataggtgccacccgtcacagcgttacgctccgaagtcggcgtcacatagaaatacttgtagccgtcgagtgacgcatgcctcgtaatagtcgtcggtgccagcgagaggcagctgctgaggagcagcgtaccaaccaggcagatcatcagtgaataaatcttcttcataatctttttcgtatttattgtttaggttaaagtttcaacactaatcactcatcattcatcactcatcactcacttcacccttccccctttgtagaaatgcttgctccagtagctgtcgtccgtgcggctcacgcagacaccggcactcgtggaggcatgtgcaaacaggccgtccttgaggtagatgcccacatgcgacaccttgcccttcgagttggtgaagaacagcaggtcgccctcgcgcagctgactcttcgctatcagctccacatcgcgcagcatatcgttggccgtgcggcgcagcgtcttaccatatactttcttatacacagtacccacgaaggccgagcagtcgataccgttgcggtcggtgccgccgtacttataggggacaccgagccacgagttcaccgtctcatagaggtcggcattgtcgccgctgttgcacttgaggcccagagcgttgctgcacatcgtgccgtcggcctgccgctgcggcttggcctccacacgcgtggctatcaccggcgtctcgttcaccagctcgtccacatacagctgccctatgatgaagtcctcctcctcgaggtcgcgcgccataaacgacttcacactctcgcatgaggtgagtgcaaatgctgctatcagtatgagcgtcaatcgtttcatttgattacaaatatatcctcgtcggcacgtttcatgtagtagttctcgcggccgtaatgctctttggcatccaggctgcccttcagctcggcattggcggcactgtcggccactatggcatccttcagcgcctgctcctcgccgcgcaactcgttcacctggcggtgcaggcgcgagctcacgcgcagactatattcgtcgaggaacagtatcaccaccagaaacaccaccgtcgccacgatgtatttcaatcccttaaccttcagtatgtccttgtcaatcttcaattctcaattctcaattttcaattctcaattctcaattcctaattcacctcaccttcagcctctgacccacacgtatattgtcgctcttcatgccgttcatcttcttgagcttctgcaccgtgaggccgtgcttggtggcaacgcggaagagcgtgtcgcctttcttcaccgtgtagtacttgccaccgccgccgctcgtcgagccggtattcttgcccttggctctcgcctgcggcgcgatatctatcgggcggcgcgccagactgtcgaccgaatgggcatagatgctgtcctgagccttcaggaacagctccatcttcgacgtcggcaggcacagcggataaggctccgtcgatgccggtatatactccgcgcggtactgcgggttcagcgtcttcagctcgtccatctccatacccacggcatccgccacgtaagtcatcagcacatcgtgatgcaccatcagcgtgtcgctcctgatcggcagattcacacgccccgggcgcaagccgtgctgctcgtagtagttcatcacatacaccaccgctatgaacgccggcacataacccctcgtctcgcgcggcaggttgtagtatatctcccaaaagttgcgcttgccgccgctgcgggctatggccttgttcacattgcccggtccgcagttgtaggccgctatggccagctgccagtcgccgaagacc

SEQ ID NO: 1402 - DNA, 14784 bp, synthetic construct
  source 1..14784: mol_type = other DNA
  misc_feature 1..14784: note = Synthetic
tctgcttctttctgacaatatcaatgagcttggaaacaatagcttctgacgctcttttatgtggattatccattatcttttaacttgttccattaaatcctcaaatccgcaactacgcgcctaatatgatacagaagcgaaaagaatctgcatcgttagtaaaaagggggcacagtgcatcgaatgtcaccataaagacatataaatgccccttaccccaccatgcgacttgaggcaatacgcaaaatcacgaccataagttgtcggtgttatccaaagtcattctggaacacattggcataagcattgttgcatgaatagatattcagcacatacttccttgatgtcctgacccatttggctggcacagagatgaacttaaagacaaacgtcttgatgcggcttgttgctttgagtccgaacctcttcacgtcaagcctcgccatgatgaatttatagaagttgcgtatgagtgccataagcagaagaaacaccgtgttttctcccataaaggattttggaagcctgttccagccgaatccgttattcatatcatcgaagatgcgttccttccctccacggaggttatagaattcgacaatctctttctcggaagactcgtagtcatttgtaaggatgcagcggtaggtgtattctccttcccacaggtcgagttcgccgtctatccgcttctgtctttgaatcacaagacggtatgccttccctttccatttctcgatgagaatggaggccagctcaaactcaatgccgcccaattccactttcttccaacctctgagggcaaagatgtcattgtagagcgaactgcatcggttagcacggatatagaaggtcttgcagtgtttagcaatctcttccactatctcttcagaacacgagccgcaatcagctctgaaacggttgataataagcttgttttgttcaaacctttcaaagaacctcttcagcgtgtccttctggtggaaacggacatttgtgttgccgtcgctgttctcaatgccgacaatcaagttgccaataaccgccacgccagggcgataaccaaggaacttcttgtatgtaggcttcgcatcaaacttctcagcctctatgaactggtggtcgaagtcaacgtcatacccctcgccctctttcagctgccctgtggacaataggcaattgaggagcagtgtattcagcttgtctgccgtgttgaagtcgtaggtcttgccagtgtcggatgtgtaggaaatgttatcctgggtcagttcctttatggctctaagaatcgtgtcggcactgcatgtgcgaagtgtcggatgaagcgaaaggtggtacatcagatgagtggtgacatcctcgatgcatgagccgccacaaaaataaacgctcataagcgaacggatgatttcgctgtattgataaccatacagcctgcatctcataccgagggttgagtcgattacagatgagagtctggagtcaaattgctccattattgaaaatattcctccaaaaggagtgagtttctcggatttaattgctacctttgccatgtctgtcgggtttgatacatattttgatttgcaacactaagataggtgaaaaatctgacatggcaaattcctgagcaactttttgttgctcaggtacttaaaaagttatatttgtaatagtgttgcggaattaaggtaaatctaaaataccgtcaataatcgctctctccgcatatcccggcttacatctggaagagaggacttcgaaggtctgataaccgaatgcggcatcgttgggtatataaccggagtttgcactgccgttggtcacagatacgaccatggtgcgtgaaaaaggggactcttttttcagctgtatggcaatctgactgaagacctctgcatttatagccccaatcgcaatatcgttaaacatcaacagacccagcctgatcctgaccgagtctccgtcaacgtacgttccggcgctgccggccctgccggtgtttgtcctgttgcgtccggggatgactgctgttttctgcgcagcagcgatggttgcagatttttcagggcggtcaatattcctgataacatgtttaacctcttctcccaacatgactcccatggcttttgtgatctctttttgctcgttcataagccgttgcacttcagggttattcctgtccagtcccgtacctcccggaggcattgaattgctgatatcttcacccctctcggcatactcttttatacgaatatcccgcaaatcgaatgtctgttgaaagtaaataggattctgatccccctgacaaccggttgaccataatgctactatcttattatcataggaattttcaatataccttgaagcggcgcccggcgcatcgccgctgaccatatcaagttgacccgtcaataccccatgcattgcataattataatagacggctatcggttttccctctaatgtctcaaaatagagtacggcaacagtcttatcagacggaccgtcatagttcggcccttcccaccagccccgtgttttcggatcaatcatgttcctgtttacattaatataggaaacgccggtaccgtaacccatacgcgcaggttgtaaagccgatttcgcctgcttaacggattcaactattttctgctcaagttgggctccgcccacattaaaagggacactgtgcgtatgtgtggcggtcagcatgatgttctgtgccggaatacccagctcttcttcaatttgtttagtaattgaagaccagttgttgtcgcgcagcatacctacttcgaccgatatgagtgcggcaccggtttctccattatcaatgacaatggctctggtgaaaatactgtcgttaatacccagatagtttcttggaagagcctctttgtcgggcgttatggatacttttgcggcaccggctttaatcggcatagactgcttgttttgagcaatgcaagtcagcgcactgacctggagtaaggctaaaaatagaacaattgatttcattatggttaagtttaggttttctgttagctgcaacatagcattttcaaaagtaccaaattttttataaataacatgatttaaatttaaggatatcatcggtacgttgtccgctctgtttgaataaaaaatcttcattttttctaaatcttacactttgtcagatattcattggaagttgatgaatatgtttgacaaaatgtaataaaataccccgaaaatctgaaaaaacgtaagtaataatggttttgtcattacaaaaatgatgtaaactgttgaaaactttatcaatttttaatataagaatgtttgttttgcatggatattgggagtaattttgcgctcaaatttaaactttaacaaataaaattgtaatgaagcataatttttgcgcaggtcctgctgttcttccgcaggaagtgattgaaaaatcggctcaggccgttcatgattttgccggtacaggtatttcaattctttctatcagtcaccgtgccaaggagttcaaaccgattgttgatgaagctgcggctctagttaaggagatcttagatgttcccgatgattattcggtaattttcctggccggcggcgccagtatggagttctgtcgtgtaccttataattttcttaataagaaagccgcataccttactacaggtttatgggcaagtaaagcactgaaggaggctaaaggtttcggcgaggtggtcgaggtggcttcatcggccgatgccaattacacatatatccctaaggactatgtgatccctgccgatgcggactattttcactttactgcaaacaataccatttacggtaccgaaatccacattgatccggacagtccggttccattgatatcggacatgtcatcggacatcttctcgcgtcctgttgatgtaagcaaatataactgcatatacggcggtgcacagaaaaatctggctcccgcaggaatggcagtcattataatcaaaaacgatgctctgggcaaggtggatcgctatattcctaccatgcttaactatcagacacatattgacaacggctcaatgtacaatacacctcctacatttaccatcctttccgctcttgaatcactgcgctggctcaaggcacagggtggggtaagggagatgtcaaaacgtgccgtgacccgtgctgccaaactctatacggagattgaccataataagctgttcgtcggtacagccgaggttgaggaccgttcctatatgaatatatgctgggttatggctcccgagtaccaagagttggaggaggaattccttcagtttgcacagagcagaggcatggtggagatcaaaggtcaccgtacggtgggcggtttccgtgcttcatgctacaacgctcagccaatggagagtgtcgatgctctgattgcctgcatgagagaatttgaagccaaacattaaatcattcaaacgaatcaaataatatacaatatgaaagtacttgttgcaacagtaaaaccttttgccaaggttgccgttgacggaattcgtaaggttattgaggatgccggctacgaactggctctgcttgaaaattacacagagaaatcagatctgctcaaggctgttgccgatgccgatgccctcataatacgcagcgatattgtggatgccgaggtgtttgatgccgctaagaaacttaagattgtagttcgcgcaggcgccggttacgataacgtcgatctgaaatcggctaccgctcacggcgtatgcgtcatgaatactccgggacagaatgccaatgccgttgccgaaatcgtattcgggtttatgctcaatgccgtacgtaatttttacaaaggcgcatcgggttgtgagctcatgggcaagaagctgggcatacatgctttcggcaatgtgggacgtaatgtagcccgtattgcaaagggattcggcatggaggtatatgcgtatgatgcatactgccccaaggaggttattgaggctgcaggtgtacataccgttgattctattaaggagatgtacaagacctgtcagttcatatccctgcatctgcctgctaccgatgagaccaggaacctgataggccgtgacctggtaggtctgatgcccaagggcgcagtgctgatcaattcggcgcgtaaggagataataaacgaggaggaacttctgcagctcatgaaagagcgcgaggacctgaaattcatttctgacattgctcccgccgccgcttgcaaatttgaagaactctgccctgaccgctattttgcaactcccaaaaagatgggcgccgagactgccgaggccaacatcaatgccggtattgccgctgcaaaacagattgtgggattcctgaaggagggatgcaccaccttcatggtgaacagataacttttgtttttgaaaagattttataaatggctatcgtaaaaccctttcagggcatacgcccacccaaaaaccttgtagaaaaagttcaatgccgtccctatgacgtgctcaactcacaagaggctaaggccgaggctgccggtaacgaagaatccctgtaccgtatcatcaaaccggagatagatttcgatcctattgccgaggagaccgatccgaaagtatatgcaaaggctgccgagaatttccgtatgtttcaggaaaaaggctggctggtacgtgacaaaaaagagcggtattacatctatgcgcagactatgaacaacaagacccagtacggacttgtggtttgcgcttatgttgaagactatctgaaaggcaacatcaagaaacatgagctcacccatcccagcaaggaggaggaccgcatgaaaaatatccttctgaccaatgccaacatcgagccggtctttttcacctatcccgatgatgacgttctggacagactggttgcaaaatatgtcaagggtgctccggaatatgactttacagccaagggtgacggattccgacatcggctgtggataatcgatgccgatgaggatatcgcaaccgtcacggaacgttttgcacagatcccttcgctctatattgctgacggtcatcaccgttcggcggcggccgctctggcatgcgcccagaagggccgccagaatccccaccacaacgggaccgaagagtacaactacttcatggcagtatgtttccccgcttcacagctcacgatcatcgattataaccgtgttgtaaaggacctgaacggcatgacaaccgatgagttcctcaaggcgctggaaaaaaacttcactgtagaaaagcagggcagggagatattcaagccggccgcaatgcataccttctcactctatattgacggagaatggtataagctgaccgtcaaacccggcagattcgatgaaaacgaccctcttgaggtgctcgatgtctcaatcttatcaaaccttatcctcgatgagatactcggcataaaagacctgcgccgcgataagagagtcgattttgtaggcggcatacgcggacttggcgaactgaaacgtcgcgttgacagcggtgaaatgagaatggctcttgccctctatccggtcacaatgaagcagcttatgacaatagccgataccggcaacataatgccgcccaaaaccacctggttcgaacctaaactccgctcaggtctggtaatccactcattagactgacagcgttctatcgggttatttcaaacattgagcttcgagtaataggcggctttctcctgcagcggcatggggtaagcccgcgaggtggagggcatacgccgccactccatatcacgtccggatatgctgagactgactctctccccaaatgcgggcagcttatttatgcttattaccgttgctttttcagatgatgtcaattcccgtattatattcaggaactcttccgatgctttacctccggttgtcactatagtgcggcaatgaggcatggattgaagaaaagagattatcggagccggttccagtatcagcaggaactcgtcgctggcattgcctttcagacggcacaccttacgggcagtatcaaaaaaagccaatccgcgacttgtgcagaattccgttattctgtcaaggtcaaagcgtttttctcctctcttctcaaaatgacgggggtcgccaaaaccgttcagcccctgtatccgccaaaaatcgtttatccagttggggtaaaagaaatccatagaccatcgggcgcggggcggcgggaaactgccgagaaacagaatgcgcccgttggccggcaggaacggctgcatcggatgctcctcaatgactattccgctgcgtgcaagatcgaccttgtcgttcagaaaaacaaccccctctttctccaaaatctgacgctgcacggcaggaccgccgcgtccgaaattcgagcccatacgaccgtcggccccgaccacacgatggcatggcacctttacgggatcggcattggaatgtatcgcattgcccacggcacgtgacgccccaaccgtatagccggccatcacggccacctgaccgtatgtagccacacgtcctttgggaatcagacccacagccttataaaccgcctccttaaatgtcatattgcaaaaataacccttttccgctaagacattccaacagggcggttccattcacccgctttttttctatttttgtatcaaacaaaaatcattacgacaatatttagtcgaattttcagattaaatatggaaaataagtcagaaaaatacagacaactgctcaaagaagcgacttcgctggtaagcggagagagcgacctgatagccaatatggccaatctggcagctcttgtgcatgaaacgatgggcttctggtggacaggattctatattgtgcgtcaggataaagacggcgtggaacaactggttctaggacccttccagggaccggttgcctgcacccgcatcgcattcggccgtggagtatgcggcacagcatggcagcgcatggagacaatcatcgtacccgatgtagagcagttccccggccatatagcctgcagcagtgaatcccgcagcgagatagtcgtcccaatcctaaaagatggcaaagtgattgccgtcttagacatagacagccgccacctaaacagattcgacaacaccgacgctcaccacctggaagcccttgcagccctgctgacagtatagccttataaatataaaagagagagacaccgttagggtgccccgctctaaatgttttcacaacggaataatccttattgtgaattgcttaaatcttgtacaaggcaaatatatatcttttttttcaactattgtatttttttaaagaaattataataattttgaatttatctaataaaaccagtatgctttatgagaaaaatattaggtctggaccttggcaccaacagtataggttgggcaattgtcaatgctaaaccagtgcagcgagaagacggaacagagtatttaaaaccggagagtatagagatggccggcagcagaatcataccaatggatgctgcaacacttggtaattttgatgccggaaattcagtctcacagacagccgccaggacaggctatcgcggtgttcgcagattacgtgaacgttttctgttgaggcgtgaaagactgaatcgggtattggattgcatgggattcctaccggagcactattcggcagaattagaccgttatggaaaattcctttccaaggaaattgagcccaagttggcatggagaccctcaaaggattgtaagtacgaattcatatttatggattcatttaatgagatgcttgaggatttccggcaacaccaacctgatttattgaaagagggttgtaaagttccattggattggacattatactatttacgtaagaaagccctcagcagaccggtaagcggcgaggagcttgcatggatcctgcataattttaaccagaagagaggttattaccaactgcgtggtgaagaagaggaagaaaacgcaaaacagagagtagagtactattcactgggcgtagttaaggtcgaggagtcaggagacaggagaggagacgatgtgtggtataatgtccatttggagaacggttggatttaccgccgttccagcagatatccgttggattgggtaggtaagaagaaggatttcattgtaactacatctcttgatgatgagggaaatcctaaactggacaaggacggaaatgttagacgctcgttccgggcaccaaatgaagatgactggacactgcaaaaaaagaaggcagagatggatatcgaccagtcgggatatgcggtcggagagtatatatataatacgcttttgatcaatccggaacagaagattaagggtaaactggtcaggacaatagagcgtaagtactataagcaggaacttattcaaatactccaaaaacagcttgaactcaataaaacgctacaggacagagaactgtttgagcgttgtcttgaagcgctgtatcctaggaatgaagcacacaggaataacattttatgcaaagactttgtctatctgtttgttgaagacattatcttctaccagcgtcctcttaaaagcaaaaaatcgttgataagcaactgtccttatgaatttacacagtatgtggataaggaaacaggtgagattatcgattctccaatcaagtgtatttcaaaatcacaccagctttatcaggagttcagactatggcagtttattgacaatttaaaaatatatgaacgtaccaaaacagtcaacggacgcttatgttctgacgttgatgttactgacgagttcttgaaggatgaggaaggttatgttgcattgtttgattatctgaatgatagggcttccattactcaggatgtactcttaaacaaacattttaatataaagaaacctaaaggaaaggatgcggtctatccgtatcgctggaattatgttgaggataaggaatatccgtgtaatgaaaccagggcaactatgttggccggtttcaagaaagccggtattcctgcagaacgtctggattataagatgacagaggctctttggcatatactctattcggtaagtgacaagcaggaactgaataaggctctggctaaatttgccaataagaatcaattgggagaggatttcgttgcagcatttgcaaagaccaaaccttatgaccatgattatggagcatattcggcaaaagctatcaagaagctgttgccgcttatgcgtagaggtaaatattggagctacgatgccatagatcagaaaacagcaaagagaattgaaaatattatcaatggcgaatttgatgagtctctggggcaaagggtccgtgaaaaagccatcggtcttaccgaggaatcacatttcagagggttgccggtttggcttgcttgctatattgtctataacagacattccgagtccggggatattgtaaaatgggagcgaccggaggatatcgacgcttatctgaatggtttcaaacaacattcccttcgtaatccgattgttgagcaggtgattcttgagacattgagaaccgtacgcgacatttggaaaaagagcggttccattgatgaaatccatgttgagatgggaagagaaatgaagaaccctgctgacaagcgtgccaaaatgtcacagcaggcggttatcaatgagaatactaaccttagaatcaaatccctgcttgcggagttcgctaatccggaattcaagatagacaatgttagaccgtattcgcctacacaacaggatattttaagaatctacgaagattttgcattgtccaacctaaaacaggacgatgaggattacgagtttgtccgtaagatgtccacaaccgctcagccgacacacaatgaggtactgagatacaaactgtggcttgaacaaaaatatgtttcaccctataccggtcaggtcattccgcttacgaaactctttacatcggcctacgagatagagcatgtgatacctcaatccagatattttgatgattctttctccaacaaagtgatatgtgagtccgaggttaacaaacttaaagacaaacagcttggatatgaattcataaagaatcatgccggtgaaaaggttcagatttcaatgtccaataaatctgttgagatattttcgacacaggcatatgaggagtttgtcaaacagcactattcgggcatcaagcttaagaaactccttatggacgatattcctgataagtttatagaaagacagttaaatgacacccgatatatcagcaaacttattaaaggtttgctgtcaaacgttgtccgtgagaagcttgataatggggagtatgaattggaagcaatatcgaaaaatcttatcccaacgaatggttatattacagacctcctgaaaaaggattggggattgaatgacgtatggaattccatcattttgccacgtttccaaagaatgaatgaaattaccggacgcacatgttttacggcaatcaatcagcagggacacgaaattccggccatgcctcttgagctgcagagaggcttcagcaagaaacggattgaccacagacaccatgctatggatgcaattgccatagcatgtacgacccgtgaccatatcaatctgttgaacaatgaggctgcaaagtccggaaacagtgctaatcgctataagttgtcaaggaaattgcgccgttatgaatcaatccagattgaaaaggacggagagcgtaagaaagttgatgtggcaaaggaattcatcgctccgtggccggcatttgcagttgacgcgagagatgctttgaatgatatagtggtaagtttcaagcagaatcttcgtgtaataaacaaggccacaaactactatcagcgttatgatgattccggttcaaaggtgtttgccgagcagaaagccggtgataatatggctgtgcgtaaaccactgcataaggagaccgtttttggtttggtcaatctaaaactgaagaaaacggtatcactgacagaagcattgaagaacccctcaatgatagttgaccgggatttcaaatatcgtgttaagcagatgtttaaggcgggccttgatgctaaaaatataaagaaggaacttgaatccgacagttcggtagccaatagggtggaggtgtactattatacctctgacactaacgaccgatattatgctacaagaaaaccgttggacagcagttttgacgaaaagactattcttaattccgtaaccgataccggcattcagaaaatactgcttgcacatttgagccggtgtgataacgatccggagttggcattcagtccagacggtattgaccgtatgaacagggatatagtccaattgaatgacggacgttatcaccagccaatctataaggttcgtaaatatgaaaaggccgataagtttgccgtaggccagaccggaaacaagaggaccaaatatgttgaggcggccaagggaaccaatctctactttgccatatacagaacagaaaagattgacaaggaaacgggtgaaactatattaggccgttcttttgaaactattccgctaaatgtggtggtagagagactcaagcaacatttgaaacctgttcctgaggtcaatgagaatggtgacaaactcctgttctggctctcaccgaatgatttggtctatgttcctaccgccgatgagatagaatcaggacgtatctccgaaccgatagataaggagcggatatataagatagtgagctgtactggtgtgaagagtcattatgttccttattatgtagccacgcctattgtggataaattggagttttcttctatgaataagattggtagagcattgactggtgaaatgataaaggatgtttgtcttccggtattaatcaacagattaggcgaactagattataagacatgattaagcgcacgctttgtttcagtaatccggcatacctgtcgcttcagaattctcagttggtaataaaactacctgaggttgaaaagagtgacttgccggactttgtcaaacaggattcgacacgaactatcccgatagaggatattggcgttgttgttcttgacaataggcagattaccataacacagggtgtgattgaaaaattggtggcaaataattgtgcagtcatatcatgtgattccaatcatatgcctataggattgatgcttcctcttgcgagtaacactactcaaagtgagagattccgcatgcagataaattcgtcgcttcctttaaaaaaacagatgtggcagcagactgtccagtgtaaaatcaggaatcaggcggctgttttgagatcgtgtcggggttcagaggtaaggaatatgattgtatggtcgaataatgtaaagagcggagattctgataatcttgaagcacgtgccgcaacctattattggaagaatctatttccggggattccggaattcactcgcggccgtgatggttgtccgccaaacaatctgttaaattacggatatgctattcttagggcggtagtggctcgcagtcttgtagccagtggtttaatccccactttaggaatacaccatcacaaccgttataatgcctactgtctggctgatgatattatggaaccttatcgcccttatgtggacaggatggttgtaaaccttgttgacagtggtattgattacagttccattacaaaggatttaaaacaggaacttcttttaattccggttatggatgttatgataggaggacagcgtagtccattaatgattgctacaggacagacgtcggcatcagtttacagatgttttgccggagaatcccgaaaaatcgtttatccggaaatatgaactattgtgagatttgatagattcagtgaatatagagtaatgtggattcttgtcttttttgatttacctactgaaactaagagagataagaaggcatacgtagattttagaaagagtctgcaaaacgacgggttcaccatgtttcagttttcaatttatgtacgtcattgtgccagttctgagaatgccgatgtacataaaaaacgagtaaggtcttttttgcctaaaaaaggcaaagtaggcatactcacaattacagataaacaattcggatcaatagagttgttcatagggcacagggaagaacagacgagagcagcaggtcagcaattggaactgttttgaatcagttttctacagataaagaaataaaatccagccaaaaagcggctggattttattttgtagaaacaactctaatgccttgtgagtcaattctttactttgaatcagttgttactacatccaaaggtacatgatttttaagcaattcacaacagccagatggaacagagcgcaaagaattgagttgttactacatccaaaggtacatgatttttaagcaattcacaaccggttatgcgaggtctgccaccctttaaccgttgttactacatccaaaggtacatgatttttaagcaattcacaactgcgacaggtttttatcgcgccaaagaatggttgttactacatccaaaggtacatgatttttaagcaattcacaaccggtttttcgaggtctgccaccctttaaccgttgttactacatccaaaggtacatgatttttaagcaattcacaacttaaaaccgattcttatgggaaccaaattagttgttactacatccaaaggtacatgatttttaagcaattcacaactatcacttgtagtgaagtagtctttttcccgttgttactacatccaaagg

SEQ ID NO: 1403 - DNA, 14711 bp, synthetic construct
  misc_feature 1..14711: note = Synthetic
  source 1..14711: mol_type = other DNA
aataacctataaacttactgcttttatccttatagataatatcggtaacgggttgagtgatggttttataggtgtctgtcatgggaagtgaagaatggttagtgaaaaatgaaaagtataatttgaaataaagtgcaaagatataaaaaacaacccctatattactataggggctcctttagatgttttcacaacggaataatccttattgtgagttgctttcaaatatgggacaaaagtacaacttttttctaaataacaaacttaaatatgaatttttttattaaatttgtagcgaattaaacttattaaatatatgaaatacataaaatacatattaggattagacataggttccaactccattggttgggcgcttattcagctagatctcttgcaaaaaacaaaaagaattattgccgcaggaagtagaattattcctatggatcagaaagttttaagtgattttggaaaaggaattactatttcttcgactgctcaaagaacctcctatagaaatgcacgacattgtcgagaacggcatttgctgcgtcgtgaacgtcttcatagggtacttcatattttagattttttgcctgctcactatgataagcagattgatttttcaaaaaaatatggtaaatttgtagataatacagaaccaaaaatagcctataacgaaggaaaattcctctttatggatagttttcaggagatgctagctgattttaaaatacatcagcctgacttattctataccaaaaggaatggagaagaaagcaaaattccctatgactggacaatttattaccttagaaagaaagcgctttcaaggaaaattagtaaagaagaattggcttggattattttaaatttcaaccaaaagagagggtattatcaattacgtgaagaagaggaaaataaggagaatgattttgagattatttcctcaaaaattatatctgttattaagaaagataaagataaaaaatataataagtattggtatgatataattttagaaaatggattggtataccaagctgctttttataatgattttgtatataactggattaatcaagatagagaattcataatagaacgaacttctttaaagaatgggactgaaaaagtaaaactttcatatctacctacttttgatgaaattgataagatggataagaaagaacaggataaatactacaaaaagataaaaattaaaaccgaaaatagtattggaaataaaacagtaggatgctatatctatgatcatattctgcaaaaccctaatgaaaaaatcaaagggaaattagtccgtaccattgagcgaaaatattacaaagaagaactaaaggctattttagaaaaacaaatagctctacagcctcaactatttacagatcaattgttagccgattgtattcgagaactctatagcaagaatgaagcacaacagcgaaatctcgcagcaagagattttgtacatttgtttgtagaagatatcatcttctaccaacgccccttgcgccgtcagaaatcaactattgctaattgtagcttggaatctcgtttctatatagacaaggatagccatacccgcaaagaagcccctttgaaggtatgtcccaaatctaacccttattatcaagagtttagagtactccaatggttacaaaacctcaaaatatacgaaatagagagcgatcgagaggtaacccatgaatttataaagaccttagaagacaaacagcaactctttgattttctaatggctcaaaaagagattgattgtgaggaattattgaaatatttcctgagtctaacttatccaaatgccaaggaaaaagcactaaagagtgagctaaagaaatggaaagatacttatcgctggaactatgtatatgatataggagaaaaatcgtctaagaaatatcctatgaatgagaccagatatgagcttaagcgatatttagaaaaagtggccaacttacctgatgattttctttcctcagaggtagaatacctgctatggcatctgatctattcggttaccgataaggtatcatatgagaaaggtctaaagaaatttgctcaaaaacatcacttagatgaagattcttttgtagagagcttcaaaaaattcaaaccctatcctagtgaatatggtagtttttctgaaaaagctatccgaaagttgcttccactgatgcgttttggctcttattgggacttcaatcatatagataagaatactcaaaagcgtatagacgaccttattacaggggtagaaaacgaggaaatacgcactatcctcagagaaaaagctgaaaaatatcagcttgagaaggaaactgatttccaggacttacccctttggttagctcaatatattgtctataaccgacatgctgaggcttcctctcttgagaaatggacttcagtgaatgacttggagacctaccttaatgagttcaagcaacattctcttagaaaccctatagtagagcaggtagttacggagaccttacgcgtagtcagagatatttggcaacaatatgggcaagggcaagccgatttctttaatgagattcatatagaacttggtagagaacttaagaaaaccgctaaagaaagggaagatctatccaagcaaaaccaaaagaatgaagataccaacctgcgtatcagggcgttacttgcagagttaggtgaagatagtactatagaaaatgtacgtccctactcgcttatgcaacaggaattactcaaactatatgaggaaggcgtatttagttcctctatcgaaatcgaagatgatatagagaaaatacacaagaaagctactcctagcaaagcagaattacaacgctataagctttggctagaacaaaaatacaagtccccttatacaggacagatcatctctctgaaaaggctctttacggaagattatgagatagagcatattatcccacaaagccggtattatgatgatagtctttccaataaagtaatctgtgaatctgttgtaaataaagccccttacaaagacaggcaattaggtttagaattcattaaaaatcaaggaggaagaatagttaaagaactctccaaggaaaataaaaccataaaaatatttactgagaaacaatacagaacatttataaaggaacattatagtaacaaccctgcaaaaacaaagaaacttcttttagaagaaattcctgaaaaaatggttgctcgccaaatgaatgatacgcgctacatcagtaagtttatttcggaaattctttctaagatagtacgttcagatgagcaagacgaaggggttcattccaaaaatgttattctatgcacaggtaaaattacctctatcctcagacaggattgggggcttaatgatgtatgggataaccttatcttgcctcgttttgaacgaatggataatttgttacaaaaagaaaaatttacaatatatagtatagaaaaacagaagaaaattcccgtagttcctatcaatgatcaatttaagagttttcaaaagaagcgtatagatcatcgtcatcacgctttagacgcgattatcattgcttgtgttactggcgaacatatcaattatataaataaccaacatgctttagaaaaaggaaaagataaaaaggaaaaacaaaaagaacatgataaacttagagaaaaactttgcatcaaaaagtacaataaaggaagtgaagaaaattatagttggatattcaaaaaaccttggaatacttttacgcaagaagtacgagctacattagaaggtatggtggtaagtttcaagcaaaacctacgtgtgattaacaaagccaccaactattatgaacgttgggtagaagaaaatggtaagtatattaagaaaatggtcaagcaggagggtactaactgggctattcgaaaacctatgcatgaggaaaccatttcaggtaaaatttatttagatagagaaaaaataactaaaaatgatatacttactgctactagaaaaactgttgatagtagttttgatgaaaaaagaataaaaaaaattacagacacagggattcaaaagatactacttaattatcttgagtataaaagaagtccagaaatagccttttcccctgaaggattagaagaacttaataaaaatttatctatttataatgatgggaagcctcacaaacctatctataaagtaagaatctatgaaaagggaagtggtcgatttgctttaggagaaaaaggtagaaaatataaaaaatatgtacaaggagctcctaatttatattttggaatatatcaaggaaaagacaagcgttctttcgcgaccattccgcttaacgaagtaattgaacgacaaaaacaaggacaatcctctgttcctgaatataatgaaaaaggagatcccttactctttaacctctctcctaatgacttagtatatgtacctatagaaggagaaatcatagaagatattaatttccgaaacctttctaacgaacaaaaagaaagaatatataaaatagtaagttttactaaagggagaatttatggtatccctaatagagttgctatttctatagtgaataagatggaatatactcaactcaataaaatagagtttattaaagaaaaagaagtctgtatcaaactaaaagtagaccgtttaggaaatattagtaaagcataagatttttaatcgttaaatatcaataagctatgttatatcgttctatttatataggtaaccctgcttatttgaagctgaaagacaaacaattaaaggttaccgacccagaaactaaagaataaaaaggcagtatccctatagaagatataggactagtaatgcttgaccattaccaaatcactctctcccaccagctgatacaggaactcatgaagaataatgtaatccttatcagctgtaatgagcggcacctccccttggcaaggagaatgccgaggtacatatcaaccgtgtcaagcaatggttacctccttatgggaaagtagccatactgactattactgacaagcaatttgaaggaatagagatcttctattgccaaacaaagaaagatccacctaaagattgtattcagctcactcttttttaaattttagaaagcgaaaaaccttcctttttattctcaaaatagaataaaagagaaggttttttcttttttaaattttgcgataacctacagacaatcaatctctttttaagattaaggttgtttgaggtcacaaagttacgaatttgaaagcaactcacaacaagagaataatttttgtagtaattttgccagttgtttgaggtcacaaagttacgaatttgaaagcaactcacaaattacttctttcataggacatttttttcattgttgtttgaggtcacaaagttacgaatttgaaagcaactcacaaccgaaaatgtgttgttgcatagacaggatacgttgtttgaggtcacaaagttacgaatttgaaagcaactcacaactaagtattcactttgaatagttatattcgtgttgtttgaggtcacaaagttacgaatttgaaagcaactcacaactatgcaattgtacgttaagcgtaagagcatgttgtttgaggtcacaaagttacgaatttgaaagcaactcacaaccatctatgtacgcttgcgctgtcattttagttgtttgaggtcacaaagttacgaatttaaaagcaactcacaacacaggagcctgccaagattgataattgcggttgtttgaagtcacaaagttacgaatctgaaagcaactcacaacacctccttctcccctgtgtaatacacacgcgttgtttgaggtcacaaaattacgaatttgaaagctactcacaacaggctgattgtttttttcctcctcgtcaagttgtttgaggtcacaaaattatgaatttgaaagcaactcacaactcacgccatcatttatatcaacagtaatgggttgtttgaggtcacaaaattacgaatttgaaagctactcacaactgtgctgatgtgtctccactgtctccaccagttgtttgaggtcacaaagttacgaatttgaaagcaactcacaaccgaagccctaaacagcctaccaggaatagcgttgtttgaggtcacaaagttacgaatttgaaagcaactcacaacttgtcccagtggttggagtttttctcaaagttgtttgagatcacaaagttacgaatttgaaagcaactcacaaccaatctcttgccccacgctttccaatcgttgttgtttgagatcacaaagttacgaatttgaaagcaactcacaacagccaggtcattcattcgtacttcattacagttgtttgagatgacaaagttacgaatttgaaagcaactcacaaccggtcagctgctgcgggtaaaggttatcatgttgtttgagatcacaaagttacgaatttgaaagcaactcacaactagtgccataattggatataatcttcgttcgttgtttgagatcacaaagctacgaatttgaaagcaactcacaacatcaatcatgtgaagtaattcactagtagcgttatttgagatcacaaaattacgaatttgaaagcaactcacaactacaagctgggtaccaccccaaaatagaaagttgtttgagatcacaaagttacgaatttgaaagctactcacaacctttctcctgatacagcgcacggcactgctgttgtttgaggtcacaaagttacgaatttgaaagcaactcacaactaccttatattcttttcctaactccactttgttgtttgaggtcacaaagttacaaatttgaaagcaactcacaacaaagggctgctatgcttgtttgtataaaatgttgtttgaggtcacaaagttacgaatttgaaagtaacttataactagcgctctaaagaaatagaaattaatcacaataggctgacttctgtcttctgccttctgaccactgttaaatacttaacattattttttattgtataaattcttacttctcacaggccttttccttgactttgccctttgtgatatcgtaactttgcaccagttaaatgaaaagtgaaaagtgaataatgaatagagttacttagccattcgtttttcacttttaatttttcactattcatacgtcagtggtcagtcatagagcacaaatagccatcagtcacaatagactgaaaactgacttctgactgctgaaaactgactgctaactactgaaaacttttaagttatggaagaggctttagaaatactttggacatacgctcgtcgtgagccgatagaaagcaatgggaagaccatagtggctaccattaaccaaagcatcgcagctattcgtctcattatacgcttagaagggggactacaaagaagtgagaaacgaaaagtcaatagtgaaaaacaagcaacacctacttatgcaacgccatctatcacaacacatgatttgccaacgcctgtttgtaaggacaaaacccacgacagtggagccggtgagcaatccacccaacccaatatagacgctccaactagtacctgcttagtaagcgcctctcgtaaggaaagaaagttaaggacttctcgccaagagcctaaccatcgtattgacaaagtcgcctatcctgcgagcaaaccccgtaaggtttgtcgtcagcgcccttgtgtcaagaaggataaaagtcctaaccatacgagtaaaccccgtaaggtttgccaccagcactcagctactaaggaagacttgtacaaggaaaacactttgattaggtcttctataaggagagtttctttacatcgcttctctaccctaacactaaccaaggcgctccccccttaaaattacttcactaagtcttttagtaaggtttttcctatgataggtctcaagggaagtagggtgcgtatgaagttgttgggacttatagagggtataataatgagtgagcgcttctctaatagcttgggtatctgttagggaaagagtgatccctgtttgggtttgtgcaataatatcctttacatcccattgcttatagcccaaagcgagtataggtcgctgggaagccatgtattcaaagagttttccgggaataataccctctgttttgggatggttgatctccaagaggagcaaaagttgggattgtcgttgcaaggcaatagcctcagtatgggaaatgtagccttttaagtctagatagtcagtaagctgccatttctgaagactagtgagtacctcatcacttactttccctgccaaacagaggcgtaagtctctcctaaaatcgggctgttcctttgtcatctcacttaagacctgccaaagaggttcgggattgcgttcggagagtagggagcctatatgggaaagcaaaaagtaaggagatagcgaaggggtttgtgtagggaagtcatcatcatagccattggtaatcacctcaatagggcgagaggtcttggcttgaaactctctttgggtactaggactggttacaataagggtatcggcagtttgtaagactgtacgctccatggctaagtgttttcgcgcggaacgcttagtgagccttagttgggagtggtagcctatggtagtccatgggtctctgaaatcggctatccagcgtagagagggaaacttttccttgaggcgtagccctataaagtgtaggctatgagggggtgcagtggtgataatagtatctatggggtgctctgtaaggtattctgataaatattttacagaggggcgtacccatagcacccgtgcatcggggataaagaggttgcctcgtatccagagtaggagcttatcaagtaaggaaggttttttggtggggataatacccgcacttatcttttgggtcttctccttagagaagagagaagccaaggcataaggctcaaaaatcttagtttttaagagggtcaaatcttctggaatatcggccgctatatgggggtctagtatgggataggtaggattctcaggggtatagataatgggttctatcccaaaatcacgtaggtacttgacaaacttaacccagcgctgtaccccaggtcctcccgcaggtggccaatagtaagtgatgataagtacttttttcattccctccttggttatttcctaacgtttttcagcaagacttctcaccgaagccaattccttgtatttcttacgagcttcttcagcaggggaaccaaaataagtttggttgccttcgagtgatttcgtcacaccactttgggcgagaattactgctttttcacctatggtaaccccactggtgattcccacttgtccccatagggtaaccctatcctcaatcaccacacagcctgctatacctacttgagaagcaatcagacactcctgccccactaccgtatcatgacctatatgtacatggttgtctatcttagtgcctcgcttaatagttgtatcacctgttacgccgcggtctatcgtacagagggctcccaagtccacatgatcttctatcactacgcgccctcctgagaggagtttgtcaaaaccttcaggacgttttttataatagaaagcatcggcaccgagcgtagtacctgcatgtatcgttacatgatttcctatcttgcagccatcatatatagtcacattagcatgaatgagacagtggtcgcctatctctacatggtttcctacaaaagcaccaggttgtataacggtatgttgtcctatcttcgccgttggggatacttgtgcaaccgccttctcaaagggcttgaagaattgggtgagcttattgaaatccctaaaggggtcatctgagataagaagcgctttgccctctggacaaggtacttccttatttatcagcactatagttgctttagactgcaaggctttgtcatagtacttagggtgatccacgaagacaatatcgccctgttctaccacatgtatctcattcattcccagtacaggaaaagtactgtcccctacaaagggacaattgataatggtagctatttgctctaaagtataaggttgcggaaatttcatataattataaataatatggttgcaaagataaaaaaaatatgaatacccaaatagtgaattttttctaaaaaaaatacatcctccatttgttaataaaaatacttctttatatgattattctcagtgcatttattactatctttgccctaccgattatatattatttcactgatgaataataaaaaagcgcaattatttattatcctcaaaatcagttgtattgttctcttaccaatattattccagtcttttgctaaccaccgaaataatattcgcaaagtacagaaaataatcatcaatcgtgaggcgccgcttgacaaggtgcaatatatcactaatgatgccattgaaaacttgctattttctgccaagaatgccgaagaatactctcttaaagagctgaaaataaatttgttggaaaaaaaactagacgctgatcccatggtagaaaatgcagatatttatctcactattgatggtatactgaaggtagttgttaagcagcgtgagcccatagcaagaattatcgccaataaccaattctattatatggatatgcaaggcaaacagatgcctctttcgaaagctacttcagcgcgtgtacctattgtacggggtgttagtgaaaagctatgggaggatgctcacctaatcctaaagcacatctatacagatccttttctaaaagaaaatatcatagaattgaccgccaataagggagctttttatacaaaacttcgaggagctaatttcttaatttgcttgggaaaagctgatgatatccaactgaagttcaacaacttaaaggcattttacaaaaaagcagataaggatcatttcttagagaaatatacaagagtagatttacaatataacaatcaggttgtctgccatagagcagagcatttcactgaacatgaaaatcagtaaggaattaaaaatattcataaaagaattaaaaaacgcacaaaataacagatttgatattatttagaaatgaaaacagaaaataaaatgaatcagagaaaatactttgctggtattgacataggtactactaagattgtggcgattattggatgtgagaatcagtatggcaaattggaaatcttaggctatggaaaggctaagagtcaaggtattttccgtggtatggtgggaaatataggaaaaactattgattctatagaacaagcagtagcacaagcacaagccaaggccggggtggtcatctccgaggcttatgtagggattgctggacaacatatcaagagtaatgaggcatctgactatatcactcgcgagaatgccgatgagattatcaccgttaaggacttagaaagtctctgccaatgtgtgatgagcagcaagaaccgatacccaggtgaagaagtgattcatatactcccccaagaatataaggttgataaccaagaagatatacatgatcctatcggaatggtaggtgcacgcttggagggtactttccatattgtaactggtcaagtagcccctatcaagaatatacagcgttgtgtaaccaaggcgggtatttcgctaaaaggacttaccttggaacctattgcttcttcagcttctgttttgagcgaggaggaaaaagaagcaggagttgctttggtagatatcggaggaggtaccactgatcttgctatcttcaaggaaggttatatccgctatacagcggtggttcctttcggtggaaatattattgataaagatattagggaaggctgtggagtctttgacaaacaagcggaacaactcaaaatccgttttggctctgcatggcctgaatatactaaagagaatgaggttattaatatccaaatgttcaaaggacgtgagcctcaagaaatacaagtcaccaacttagcgcgcattatccgctgccgtatggaagaaatcattgaagccattttcaatgaaatcaaaaactatggctatgatcaacctcgcaaaaaactcattgcagggattgtacttacaggaggaggtagcgaactgaaggatctccctcagctagtagaatacctcacaggactacctacacgtattggtcaccccaacgaacacttggcgagcaatacccctaccgaactctcttcaccaatctatgcaacagccattggactcctattggacggtattgagcgcgaacacagtgagggacagcgtattgacttctcccaactgagtgatgcctctgtacaagatgctatcccacatgtagaggcagaggaagaagcagctcctatcatccccgagcctgttgttcttcctgtagctgaacaacaagaaccagaaaaggcaaaagaagaagaacagaagaccgaaaagaaaactatcataaagaccatctctgataagtttaccgactttttcaaaaccatggaatagccatacttgatttttatactacattaacgtaaaaaatagggattatatttgttaggtacaattataatccttatttttgtctcttaatttattactttacactatggaacaaaaagatgtatatctaaatgattttcagtccttttttgaaaaattcatggacaaaattatcggtttcttacccagtataataggagctattattgtcctttttgtagggatatggatatgtcgatttatccgaaaattcgtaagacgcttgatgatcgcgcgttcagtagatattaccatacagaactttgtcaatgagttactacgctgggtgctctatatcatcctctttttgacagttattcaaaaggtaggggtacctgtttcctctttcttaggtgctttagctgctgcaggtgttgccataggcttggctttgcagggatcgctatccaattttgctggaggtatcatgctcctaatactcaagcctttccgtataggtgattctattgaagccaagggacatataggcacagtggagcgcataggtatgttctatactacccttatcaagtttggaaacgaacgtgtcattatccctaatggaccgctattctctgataatatcattaattattctcaaaatacaacccgccgagataatattattgttggtattggctatggctcagatcttaaaaaagcaaaggaaattctctattcacttatcaaaagttgccctactgcgcttcaagatcctgctcccgtggtttatgtaaatgaattggcagatagttctgtaaacttcactgtacgtgtatggtcaaagacagaacactattgggatactcacttttacctcatagaacagataaaattaacctttgataaggaaggtattgagattcctttccctcaaagagacgtacatatcatttcaaaataaaatatctaactaaattaagaatatggcaaccattttagtaacaggtggtttgggctttatcggctctcataccacagttgccatgcaacaagcaggtcatcaagtgattatcattgacaatttgtccaatgcttccattgaagtgaaagacagaattgccaaaatcacaggaaaaacacctatttttgagcaaatagacctaagagaaaaagaaaaagtacaagacttcttccgccgttatccccatatagatggtgtgattcattttgctgcctccaaggcagtaggcgaaagtgtagaaaaaccacttttgtactatgaaaacaacatcgcttctcttatctatatccttcaagaactccaaaaaagagaaaatacagctttcatcttcagttcttcttgtactgtatatggacaagccgacaagcttcctgtaaccgaagatgcccctttcaagcaggccgaatgcccttatggaaataccaagcaggtcaatgaagaaatcatccgtgatacttgtgccatagcacctaatatcaaggctatttccctacgctatttcaatcctattggagcccatgagtctgcccttattggggagttgcctaatggagtccctcaaaacctgattccttacattacccaaaccgccattggtttgcgtgaatccctctctgtatatggagacgactaccctacccctgatggcacttgtatccgagattatatccatgtggttgatctagcggaagcacacttggctgcccttgagtacattctccaaggaaagatacaaggaaattatgaggtgttcaacgtaggtaccggtaagggaagttctgtcttggaagtaatcaaagcctttgaaaaagtaagcggacagccacttccttacaaaattgtaggtcgtcgtgcaggagatgtcattgctgcctatgctgatacccaaaaagcaaaccgagaattacagtggaaggctaagcaatccctcgaggatgcactactttcggcttggaattgggagaagaaactaagagaaaaataaccttatttaatttttatcctatgaaaataaaaaaactcctctcactgctaacactctccctttcagggatagccttagcacaagagaaatccctctccacccttgtcaatgagaaagatgctttcttggtagatgtgcgttctgaaaaagagtttgaggaaggaagtgctgcacatgcagtgaatattcctttg

SEQ ID NO: 1404 - DNA, 14643 bp, synthetic construct
  source 1..14643: mol_type = other DNA
  misc_feature 1..14643: note = Synthetic
gaatatgcaaaattacaaaataaatatcttataccattagtgtccggtaaaaaatcataaaagttctttgaaaatattgagagttaggtatttataggaatttttcgagtcaaccgatttgaatttatctttgccggactaacgtagaatggcatatgcataaagaaaaatatgtgttctctcagcttttagacttcctcgatcgcaatgatttcaactatctcgcaaggaaatatggcggtgacaaatatgtcaaacagtttacctgctacaaccagctttgtgtactgatgttcggccagctttccaatcgcgaaagtctccgagatgttatcctggcaactcaggcacacgcatcaaaggcgtatcaccttggatttggcaagcatgctgccaagagtactcttgctgatgctaacaccaagcgcgattaccgcatcttcgaggagtttgcctacaaggtcattgcagaagctcagcggtgcagggtagtcgatatcttcaagcttaacgggaatgtctatgcctttgattctacaacagttgacctatgtttaagtacctttgagtgggctttgttcagaaagaagaaaggaggcatcaagatgcatacattgtataatctggaaacacagattcccacactctttcacataacaccggcaaaggttcatgatacaaaagcgatggatgaaataccgtatgaggagaactcgttctacatcttcgaccgtacctacaatgacttcgggaggctattcaccattaacggcgtgggtgcatacttcgtggtcaggggcaagaagaacaacgacttcaagcccatgagatggaagcgcaggctgcctgccggtgtcatgtccgatgcaataggatatatgggcggccagctgacaatggagaagtatcctgataagctccgcagagtcatatacctggacaaggacagcaagaagaagttcatattcttcacgaatgcgatgacaatcagcccggtaatggttgcggaactctatcataacagatggcagatcgagcttttcttcaaatggatcaagcagcatctgaagataaaaaagttctggggtacgtcagaaaacgcagtccgtattcagatatactctgcaattatagcctattgcatgatggccattgtgcagaaaaagatgaatgttgaacgttctatctatgagatgctacagattgtaagtatctcactcacagacgcaactccacttaaagacctctttgcaaaacctaactacaatattgtcaatgaacttgatgattcaaccgaaccaagtttgttttaattcgttaaactttataataatcgcccggaacttttaccggacagcagtgatcttatactattgttcttttcaagaaaatccgtaactttgtcatattaaagagagttgtatggcagaataacattgcaaattgcagaaattgtaactgttgccaagtcattaccctgttctttgagagatgttcataagtggctcatttctaatttattcctatttgcatatcggatttttcctaaaaaaatcatttcagaagcccatgaaacccactttttacgctattccttgcactttcacctttctttcctacccaatcttcaccaggctttttccgaattctcactcccccactttccacataaataccttccacccgcaccattctccagtcatcaaaagaaaagaaagaaatatttttgtaaaaactttcgacaatcgtcctttcatttgaacagaaatgtgtatatttgcactccgaattatgacgtgacaaaagagcttgatggattactggttaagacatagaaagaatacacacatattcggagttccggcggactggatgaatgccggaagccattcttttttttcttcatgtcattttttccctgaatatttgagtttccctttatatacacccggaattgcttttcggcaaatccgggcgttttttcgtatatacgaatgcaagagaataataatacaagatatataagattatttgtaataaggtgatgagaaatgtaacattaatcctcgacgacgggagccgctttcatggcaagtcgttcggctatgagaaaccggtagccggtgaagtggtgttcaacacggcaatgaccggataccctgaaagcttgaccgacccttcgtatgccggtcagttgatgacactgacctatccgctggtcggtaactacggcgtgcctccgttcacgttcgaagcaaacggactgcccactttcatggaaagcgaaaaaatccatgccgaagcgattatcgtgagcgactacagcgaaaagtattcccactggaatgcagtagaaagcctggccgactggctgaagcgtgaacagattccaggtatcacgggcatcgacacacgcgaactgaccaaggtgctgcgtgaacatggtgtgatgatgggaaaaatcgtgttcgacgatgaaccggacaacatccctgaagccacttatgctggcgtaaactacgtagacaaagtttcctgcaaagaaatcatccgctacaatgaaggcgaaggcaagaaaaaagtagtgctcgtagactgcggcgtgaaatcaaacatcatccgttgcctgctcaagcgcgacgtagaagtgattcgcgtgccttgggactacgacttcaactccctgcaattcgacggtttgttcatctccaacggtccgggcgaccctgacacctgcgatgcggctgtacagaacatccgcaaagccatgcagaacgaaaaacttcctatcttcggaatctgtatgggtaaccagttgctttcaaaggcaggaggcgctaaaatctacaaactgaagtacggacaccgcagccataaccagccggtacgtctggtgggcacagacaaatgcttcatcacctcacagaaccacggttatgcagtggacaacaacacactgggagccgactgggaaccgctcttcatcaacatgaacgacggctccaacgaaggtatccgccacaagaagaacccttggttctctgcacagttccacccagaagctgccagcggtccgaccgatacagaattcctgttcgacgaatttgtaaagttgctgtaatccattaaaacaaagaagacaatgaaagaaaatataaagaaagtattgctgttaggttcaggagccctgaaaatcggtgaagcaggtgaattcgactactccggctcacaggccctgaaagccttgaaggaagaaggtatcgaaaccatcctgatcaacccgaacatcgccaccgtgcagacctcggaaggtgtggccgacaaaatttacttcctgcccgtcactccttatttcgtagagaaagtcatcgccaaggaacgtcccgatggtgtgctgctgtcgttcggtggacagacagccctgaactgcggtgtggctctttacaaggcaggtgtattcgaaaaatacaatgcccgcgtactcggtactccggtacaggccatcatggatacggaagaccgtgagctgttcgtacagaaactggacgaaatccatgtaaagactatcaagagtgaagcggtagaaaacatcgaagatgcccgccgtgctgccaaggaactgggttatccggtcatcatccgtgcagcatacgcactgggaggtctgggttccggcttctgcgacaacgaagaagaactgaacgtgctggccgaaaaagcattctctttctctccgcaggtattggtagaaaagagcttgaaaggctggaaggaagtagaatacgaagtagtgcgcgatcgctttgacaactgtatcacggtctgcaacatggagaacttcgacccgctgggtatccacaccggtgaaagtatcgttatcgcaccttcacagacactgaccaacagtgaataccataaactccgtgaactggctatccgcatcatccgccacatcggtatcgtgggtgaatgtaacgtgcaatacgctttcgacccggaatcagaagactaccgtgtgattgaagtaaatgcccgtctgagccgttcttctgccttggcatctaaagcaaccggttatccgctggctttcgtcgctgccaaactgggtctgggctacgggctgttcgacttgaagaactcggttacaaagacaacctcagccttctttgaaccggcattggactacgtggtatgtaagattcctcgctgggacttgggcaagttccacggcgtagaccgcgagctgggttccagcatgaagtcagtaggtgaagtcatggccatcggacgtactttcgaagaagccatccagaagggtctgcgtatgattggtcagggcatgcacggtttcgtagaaaacaaggaacttcagattgccgatgtagacaaggcactgcgcgaaccgaccgacaagcgtatcttcgtcatctcaaaagctatgcgtgccggctacaccgtagaccagattcacgaccttaccaagattgacaaatggttcctcgacaagctgatgaacatcatgcagacttccaaagagctgcacgagtggggcaacaaccacaaactgctgtcacagcttccgaacgaacttctttataaagcaaaacgtcagggattctctgacttccaggtggcacgtgccatcggttacgaaggcgacatggaagatgccatcctcgacatccgcaagcaccgtaagagcgtaggtatcgttccggtagtgaaacaaatcgatacactggctgctgaatatccggcacagaccaactacctgtatctgacttacagcggtgtggccaacgatgtacactacctgggcgaccacaagagcatcgttgtactcggttcgggtgcttaccgtatcggttcatccgtagaattcgactggtgcggcgtacaggcactgaacaccatccgcaaggaaggctaccgttccgtgatgattaactacaacccggaaaccgtatctaccgactacgatatgtgcgaccgtctgtacttcgacgaactgaccttcgaacgtgtgatggatattctcgacctggagaacccacacggtgtcattgtatctaccggcggacagattccgaacaacttggcactccgtctggatgcacagcacatccacattctgggaacttccgccaagagcatcgacaacgcagaagaccgcgacaagttctcggctatgctcgaccgcatcggcgtagaccagccggaatggagcgcactgacttccatggaagacatcaacgccttcattcagaaagttggcttcccggtactggttcgtccgtcatacgtactttccggtgctgccatgaacgtatgctccaaccaggaagaactggaacgcttcctgcagctggctgccaacgtatccaagaagcatccggtagtagtgagccagttcatcgaacatgccaaagaagtagaaatggatgccgtggcacagaatggtgaaatcgttgcctacgccatcagtgaacacatcgagtttgccggagttcactcaggtgacgccactatccagttcccgccgcagaaactatacgtagaaaccgtacgccgcatcaagcgcatcagccgtcagattgcgaaagaactgaacatctccggtccgtttaacatccagttccttgcccgcgaaaacgacatcaaggtgattgaatgtaacctgcgtgccagccgttcattcccgtttgtcagcaaggtattgaagatcaacttcatcgaactggctacgaaagttatgctgggactgccggtagaaaagccagaaaagaacctcttcgaactcgactatgtaggtatcaaggccagccagttctccttcaaccgtctgcaaaaagccgaccctgtattgggtgtcgacatggcttctaccggtgaagtgggctgtatcggtgaagacacttcttgcgccgttctgaaatccatgctttccgtaggctaccgcatcccggaaaagaacatcctgatgtctaccggtacgccgaagcagaaagtggaaatgctgaaagctgcacaggaactgaaggacaaaggctacaacatcttcgccacaggcggtacttccaagttcctcactgaaaacggcatcgaaaatacccgtgtattctggccaagcgaagaaggcaaaccgcaggcactggaaatgttgcacaagaaagaaatcgacatggtagtcaacatcccgcgcgacctgactgccggcgaactcgacaatggttacaagattcgccgtgccgccatcgacctgaacattccgttgattacgaatgcccgtctggcaagtgccttcatccatgccttctgcacgatgagcatcgacgacatcgaaatcaagagctgggacgaatataaataatccgtacagctagatacagaaaaagttatcccctcctgaacgcttcgttatgaatgaattcgggaggggattttttgtgtctggcactgcaaaaaatactttagaaatgacaatcaaatttccaccaaaagatattaattcatatttttgtctcatacacaataacaatcatgaaagtagtagaagtaatagtagaaaacgcatgtaacaacttgagtgcctacatcgaaggagctcccattttcacagtcggtaatgacctgaaagagattgaaaagcacatgacagaagccattgatttatatctggaagaaagcccaaatccttgtgaaatactcaaaggagaatttacgctgagattcaaaacagaaacggcataaaaaaaagcccaccgataaaggacgatgggccagagcctaaatgttttcacaacggaataatccttattgtgatttgcttcattttagtgttacaaagttagaaagaaaaacgggagaaacaaacatttctcataaaaagttagtagctttgggaaacaacccaaaagaccaaagtcatgaagcacattttaggattagatttaggaaccaacagcataggatgggcagttattaatgccacaactgatgaaaacactcacaaagaacaactcataggaatcaacgctgcaggcagcagaattattcctatggatgccgcccaattaggagatttcaataaaggaaataccgtttcacaaactgccaaccgcacacaataccgcagtacccgacgattacatgaacgaaaaaaacttcgccgggaaagactacaccgcgtattacaactattgggcttccttccaccccattacgctgctcaattagaccgctatggaaaatttatagctaattcagaacccaaattagcctgggtaaagaataccaatcatttatatcattttatctttcaggaatcattccaagaaatgctaaacgattttactcaagcagatggaagcgctaaaaaaataccgtatgactggactcttttttatttacgcaagaaagctctcacacaaaaaataaagaaagaagaactggcctggattctcctaaatttcaaccaaaaacgagggtaccatcaactacgggaagaagagactgaaaaaccaacatccaagacacggctatattttgacagccaaacaatcacagacatcgttgatacaggagaaacttacaaaggattaaaaatatttaccctcactttagcaaatggagaaaaaggtaaatggtatgggaaaaacatacccgactggaaaggtcaaaagaaagatatcattgtaagcatagatttggataaaaacgggaatgacaaatgtgatgaaagcggagaacccatccgccgctttaagattcctacagaacaagaatgggaagaacaatggggacttgtcaaagccaagactgaaaaagacctgaatacttcaggaaagaaagttggtacttatatttacgatacattattacaagcacccgaccaaaaaattcgaggaaaactgattcgcaccatcgaacgtaagtattacaaggaagaactctatcaaatactaacgacacaagaaaagttccaccccgaactacaggacaaaaacttgttgcaagcctgcattgaagaattgtatcccagcaacgaagcacatcgcaatacaatttctaaatatagtatgtccaaattgctcgttgaggatgtcatattctatcaacgtccactgaaaagcaagaaatcactcatcagcgattgtccgtatgaggagcatacttatgtagataaggaaaccggagaaatccataccgtcccggtgaaatgtattgccaaatctcatcccctcttccaagaattccgtctttggcaattcctgtccaatttaagaatctatcaaaaagaaggaaccctcaatggaaagcttaccactgatatagacgtaactaatgaatttctgaaaaatgcagacgattatgtgaatctttttgattggctcaaccaaaagaaagaaatcaaacaagatgcgtttttcaaatatccagcatttggattaaagaaaaatgcggcaaattatcgctggaattatgtagaggataaaacatacccctgcaatgagacacattctagaatattgttccattgggtaaaaacagatatagaccaatctcttctgaccattgatttggaggaaaaattgtggcatatcttatactccatctcagataaaaatgagcttcaaaaagcactgcaacattttgctgataaaaacaagttgggacataagtttgtagacactttccaacaaatacctccattcaaaaaagattatggttcctattctgctaaagccatcaaaagattgcttcctctcatgagaatgggaaaatactggcatcctgaatcaatagataatacaaccctcacccacatccatcaaattttgaacggagaaaaggacgaagtaaccgcaagcagaataaaaggaaaagccatccatttggacaacctttcttcattccaaggactacctacatggttggcatgctatatcgtatataaccgacactctgaaataaaaaacattacgaaatggcagcagccttcagatattgatgcttacttacaatcattcaagcaacattcactgcataatcctatcgtggagcagattataatggaaactttacgtactgtacgcgatatatggaaacaaataggtcatatcgatgaaattcatgtcgaattgggacgtgaaatgaagaatcctgccgacaaacgtaaaaaacttactcagcagatacaagaaaacgaaaacaccaacctccgtattaaggcacttctcactgagtttgtaaatcctgagtttgagattgagaatgtacgcccccactctccaagccaacaagatttattacgcatatatgaagaagaggttttaaacgaatcagctaaaaatatgccggaagatatagccactatcctgaaaaagtttaatgaaactgatgccaaaaaacgcccctctacttctgatgtattacgctacaaatgctggctggaacagaaatatcgctcaccttatacgggagccatgattccattgggaaaactgtttactcctgcctacgaaattgaacatattatcccacaatctcgctactttgatgattcattcacaaacaaagttatttgtgaagcagaggtcaacaagctcaaaggaaatatgctaggctatgagttcataaaaaacaactcagggaaaatagttgaattaggcttcggacaaaaagtaaaaatacaaaccgtggaggactatgaattgtttgtaaaagaacactactcatacaacccggtcaagatgaagaaactgttgatggaagatattcctgaacagtttatccaacggcagttaaacgacagtcgttacatcagcaagtttatcaaatcactattatcgaatattgttcgtgaagaaggagaatctgaggccacatccaaaaatatcattgtctgtaccgggggcgttaccgaccgtctgaaaaaagactggggagtcaatgatgtatggaataaaattattctgcctcgtttcttacggttaaatgaaatcacaaacagcaacctcttcaccacaaccaacacaaacaataagataatccccaccatgccattagcattacaaaaaggattcaacaaaaagcgtattgaccatcgtcatcacgccatggatgccattgtcatagcctgtgccaatcgcaatatagtcaattatctgagcaatgaatcagccagcaaaaatgcaaaaatctcacgtttggacttgcgtcagattttatgcacaaggacaaaacccgacacatttggaaattatcaatggataataaacaaaccgtgggaaacatttacccaagatgttcacacaatcctggagaacatgattgtcagtttcaagcaaaatttacgtatcatcaataaaacgactaatcactatttccgttatcaaaacgggaaaaaagtacaatgtgtacaagaaacaggagactgttgggctatccgcaaacccatgcacaaagagactgtatatggagagattaatttacgcaaaataaccaccgtccctctaaaatccgctctagagaatccacaaaggattgtagaaaaagatttaaagaaaaaaataaaagaattattgcaacaaggattaaacgaaaagcaaataaaaaaatattttgaggaaaataaagatacttggcaggatgtaaacctgaagaaaatccaattctattctttcacaaaagagggaaaagaacgtttctttgcaagccgcgaatccctagatacaagtttcaataacaagaaaattgaagaaaaagttgcggatacaggaatacaacaaattctattacatcatctagagcaaaataataacgatccaaaccaagcattttcccctgaaggcattgaatggatgaacaaaaacattatatccttaaataatggcaaatggcatcaaccaatatataaagtgcggacatacgaacaagctgaaaagtttacagtaggacaaacgggtaacaaatcagaaaagttcgtagaagctgctaaaggtacaaacttattttttgccatatacgaaacagagcacaaacgcagtttcgcctctgtttcattaaatgtggtcattgaacggctgaaaaaaggattgtcattggcacctgaaaacagtaaaggaaatctgcctaaatatgttttgtctcctaatgatttagtatatgttccaactcaagaggaaataaaatgtgggcacatcaatcaaccaatacaaaaagacaggatttacaagatggtaagttgtacagagggggaatgtcatttcataccatactttgtagcaaatcccataattcagactattgaactcgggagtaataacaaagcacaaaaatcttggcaaaatgaaatgataaaagaaatatgcattcccattaaaatagacaggctaggaaatataacttcatcaattagcttatgataaaaaaaacattgtattttggaaatccggcatacctatccttacgaaatgcccaacttgtcataaaattaccggaagtggagaaaaacgcttcacttccggaaaccatgaagcgccaatctgaaatcacacgaccaattgaagatataggagtagtggtattggacaataaacaaatcacaatcacttctggagctattgaagccctactcgaaaacaattgtgcccttatcacctgtgatagcaagagtatgcccgtagggttaatgcttcccctctatgggaatactactcaaaacgaacgcttccgaaagcaactggatgcttctcttcctttaaagaaacagctatggcaacaaaccatccaatccaaaattaataaccaagcagctgtcctaacctcatgcataaaagaagacatcaaatgcatgcgaatatgggctaatgatgtccgtagtggagacccagataaccttgaagcccgggccgcagccttttactggaaaacactttttcaccacattgaaggattcacaagagaacgggatggcattcctcccaataaccttttaaactatggctatgccattcttcgcgcagtgattgcacgaagccttgtaacaagtggtttattgcctacattagggattcaccatcataaccgatataacgcctattgcttagctgatgacatcatggaaccctatcgaccgtttgtagaccagattgtctataccttatacgctaaaaatactctggaacttactaaagaagcaaaagcgaccttattatctatccccaccatagaggtcagaatcaacggaaaaagaagccctttaatggtagcagcaggtcagactacagcttctttatacaaatgtttttctggagaaatacgtaaaatcatctatccagaattataatggaccgtttcagtgaatacagagttatgtggattctagttctttttgatttaccaaccgaaacaaagaaagataaaaaagcctatacggactttcgcaagaatctacaaaaagatggattcaccatgtttcaattttccatctatgtacgtcactgcgccagtagtgaaaatgcagccgttcatataaaaagagttaaatcttttcttccagaacatggacaagtaggaatcctatgcattacagacaaacaatttggtgaaatcgaactattttatgggaaaaaagccagtggggtaaaaacgccaggtcaacaattagaactcttttaaaataataaatcccatattgagtatgggatttattatttaagaaacaacaaattcttttttctaaaattcattctaaatcattgaaaaacaacaaataactacaatcgggttgtttccaatgattcaaagatactaaaatgaaagcaaatcacaacattcgtcaagaacttgtataaatctgaaagttgtttccaatgattcaaagatactaaaatgaaagcaaatcacaactgtacgccacataaccctccacccatatcgttgtttccaatgattcaaagatactaaaatgaaagcaaatcacaacccggtcagaacatcaccaccaagaaagcagttgtttccaatgattcaaagatactaaaatgaaagcaaatcacaactgggtttacagtagttgatattgttgcccagttgtttccaatgattcaaagatactaaaatgaaagcaaatcacaacgaagaataatgcgaactctacgcagaaaggttgtttccaatgattcaaagatactaaaatgaaagcaaatcacaaccacatgcaggatttaacccgtatggagttggttgtttccaatgattcaaagatactaaaatgaaagcaaatcacaaccacatgcaggatttaacccgtatggagttggttgtttccaatgattcaaaaatagcgaaataaaacaaaaagtctacataaatctcggtctacattcctcttccaccataaaaaccaacaaaaaaagctgccatccccaaagggtaatgacagcctttcttcttaataaaaatctaaaactaatcaacaagcgggaatacaaacccctttccgtcattattatcaaatttggcaccaggagccatcttcaaatgcttctcattgttactccagtcccaaagcatgctttcgtcttctgtaatttcacccgtttctatattacgcttcttaccgttcaacggataatacagcagcaaattctcatcatttccatctaccatcttccacatgaactgcttcaactgctgttgcgtacgagccgttttccagaaacgaacttctcttaccagttcattggcaccgccaatccagaaaccaaccagcccataaggacccgttctaatctcacggtcggccaccagttcaccattcacatacacatagttcttcttgccatcgtacacaaatgccagcatataccatgtatcaggttgagctgtaaacacatcagccggcacatcaatctgagagctacccgtcttaatctgaagctggtccggacgaatggttacatcaccgaaacgaggatagatttcatcaagggtacttgaattagacaccagtttagttccacaaatagaacggttattcgcattgtaaagatgacgatttatcatcacctccatcgtccattgatccactttgaaatctgacgggaacatatttgtatcttcacttcctgatccgttcatacgcagacacttcgtattgatacgctgttccaacacaattatcgattcggcctcacccgacacgacaggcactgtaccgttgttcagtttcacaggtaaagcatagcttccctgcaaagaaaacttcacatccttcaatttcacaggcaagaactgcgaagtctgttttgcatcaaagacaacttccttgcccacttcatacatttcagaaggaagcatcaaatattctgtaccgtgtttcttgttataggcttccaactgttccttattaccaacttctaccgacactgtctgtgcatgattttcctgtcgcaccaaggatacagtaatcgatttcaagttcacttcttgtccctcttccacaaacacctgtgcagattcgcctccctttatataagccccctgctctgactgaaactcacttgtcggatctttatataattcattctggcaagaacaaaccaacatagttcctgctaaaactccgagatataatat

SEQ ID NO: 1405 - DNA, 14609 bp, synthetic construct
  source 1..14609: mol_type = other DNA
  misc_feature 1..14609: note = Synthetic
aggtcatcgactgagcagatgccgtcaacgaagttggtgcatctgaatgagtgaaggagataatgttcaatgttcaatcttcaaccgaaggtcatcgactgagtagatgctatcggcaaagccggtgcatctgaatagacgaaggagataatagcgaagctccgctgcgcgcagtggatgggagaggctttattttgagcttgcgaggctccctccctgcaggggagggcggggggagaggtcgtcaattcggtatcacaatatactcgctccaatgtttagccttgttctccgaacttttgcttagtttgccctcaatatattgttccatgatgatgcttgccattggtgccgccatttcggctccaaatcccccattctcgatatacacgcatactgcaatctttgggttgttcattggagcgaaaccaatgaatatagagtggtcgtcgcctgtgttctcagctgttcccgttttaccgcaaatgtcgaagaggggagtgtttatgtcggcacaggtgccagccttcacagccctgcgcataccgtcgatgaccacttggtaagccttagcattcaccttagtgacatgcttctcattatatttcctgtatagttcatccttcaccccatatctatgaatgtgtggtgtgaagaaaaagccacgattggctatcgatgcagcaaggttgcacagctgcagcggagtagtctgtacctcaccttgtcccatacccacccacatgatggtttgctcgttccagcgcccgttaaacgttcgccatagtgaagccgagttgggcatctcgcccgaaacctctcctggcaggtcaacgcctaaaggcacacccagtcccatgcttttcatatacgaaaaccaagtgtctatagcatcaattttgcttttgtagttagaacgattggcgagcatagccatgaaccccttgcagaaataagcattgcacgagtgagccaaggcattagtcatgctcattggcgatgggtgcttgtggcaaccaatgtgcacctttccacgccagaaaccttcttgacaggtgtattcactcttctcgttcaaaatatgttccgatagcagtgtcagagcctgagccgttttgaatgtagaaccaggagaataagccacaccaacgcttcggttcatggcatccgagaaaaacgagtttgaagccatacactttatctcgcctgttcgcggatcaatagcaacaatgcttccctgtttgcagtcgagcatgtcctcggcaagcttctgcagtttttcatcaagcgttgttggctgcttgtgatggttgtttcccgctgttacattcgtgttgaccaaaaagaaaaaagctaatatacttatcgattgtttaacctgtttaatcattattacctttgataaatttactgcaaaggtagcattttttcagatttaatggttaattttgcattgataaatcactcctccccttagaaaggggaggttgtgtgtgagtaaaaatattacaaggaaaataaacaattaatgaacaataaagaaaaaatacgttctctgctcgaagaagcattgccattagtggatttcgattccgatttcctctttagtgagctcgattcactgggtgtcaccactattcttatgattctttctaaagaatttgatatcgaactcgaatcgcgtgacgccacccccaaaaactttaaaacactcgatagcctggttgcgctttgcgaggcaaagctaagtgcgcggcaaagccgctaaatgataaatgaaaaatgataaaggggcacaaagcgcataaaaaagaaaaaccaagaaaacacctcgaagcatggcgatgcctacggcatctatgcgagaatatgctttcgggcttatgaaagcaaactttcatcgccctcaccatcttctctctgcgttatcgcaagcgataccgccttacttcgagagaaatacagagcctctcccatccccagcgcgaagtaaacttcgctattgaagattgaacattgaatattgaaaatgaagcgcaaagcgctttaaatatttccatctttcattctttcaatatttaaattttacttggggctaaccaacagttcgctaattacaagttttgatttgattatgaatgttgagttagggtttttacaggcacgaagtgccgtggtttatctctgaaaaggtttctgccgtaaggcttgtgattgaaaaatgctaatgaaagcttgctttctaattagcatctttaaagcacaaccatttcgaagaaatgaaaacctttgaaggtgttttctcggtttttcttaaattcggattaggttttttcttaacttaatgtgagggcatagataaaaaagggaaatgcaaattttagtagattacataaaacataataatcctgaaaaggtagcagttcgttgtggcgaagttcaactcagctacagccagttgaatacactcgtagaagaacgggcaaagcagtttgctgccaataagcacaaggcagtcgtctttcgttgcagtcaagacgaacagttcgttatcaactatcttgccattcatcgtgcacaagccgtagccgttccacttgaaaaagatattcccgatgatcgctttgacgaaatctcagcgttattgcgcgacatggagtttccggcacatatcgccgacatacttttcaccactggcaccacaggcacacaaaaaggcgttatgataagtcatagtgccattgttgccgatggcgagaatctaatacaagcacaaggattcagtgcacacacacatttcatcatctgtggaccgctaaaccatataggctgcctttctaagctctatcccattatcatgcaaggcgcaagcttcaccatccttccaggtatgaaagaccacaatgccttcttcgaagccattgacgaagcacagggtagggtagccacattccttgtaccagctaatatccgcatgcttcttgccttcagtcgcaagcgccttgccgagtgtgcacacaaaatagactttatagaaacaggtgcggcagccatcttcaagagcgatatgcagcagctctgcgacactctgccatccactcgtctttacaacacctacgcatccaccgagacaggcatcatagccacctacgattttcagcaaggcgaatgtgttgaaggctgtttgggtaagccaatgaaaaactcgtcattctatataagtaacgaaggaaccattgtttgtcagggtaaaaccctcatgagcggatatgtaggcaatcaggaactcacctcaagagtgctacatgatgattgccttttcacatccgacaaaggacagatagacacccatggacgccttcatcttcaaggacgtgccgacgatgtcatcaataccggcggcttcaaggtcaatccccttgaagtagagaacgtagccatgcagcttccagcaatctccgattgcgtttgcgttgcagcccaacatcccgtcatgggtattgttcccaagctccttgttgtccttgctccccatgccgagttcagcaagcgtgccattgccaaagcccttgcccagcaactcgagtcctataaagtaccacttatctacgaacaggtagcaagcatccagcgcacgtataatggaaagataaacagacgcgcctacgctgaataaatctgcgcgaagcatagcttcgctaaatgataaacgaaaaagggagcctctcccatcccctgcgcgcagcggagcttcgctattgaagattgaagattgaacattgaagattagtcggctatgccgatataatatttaaatctttcattctttcaatatttccatcttttattctgctcggtcgatgaccttcggttcaattttttcattctttcaatatttccatctagcgcttctaggctttctatccccccctagttcttctataatctctagaaattctagaagaactaaaaagactagaaggctatagaaaatctatagcctcaaaaaagccctaatattttatccctgccttatcaagaatctcacgcaggcgcgcaagctctcttttaaggcaagcattttcgctttcgagcttgtgcatgcgctcatcctgttccttgcggtagccagtgcgagctttgtacatgcgctcttttattccaccattctccacaaagtctttttcaagcttctgtaggaaggtagtcatcattttgtcggtcatgtggcatagcgtaagcccgatatttgccatttcttcgtcgccccatttgtagaaataaggctcgtaatcggcgggcttgttgtgctttctgcaaaactttagcataccatcgtagcgtggatgctccacactccatgtttgcagttggcgagtgtttaggtagtcggcaaagtcgcgttgtagctcctgtaaactcgatcgccccacattaagcagtttcaattgcatctcggtgcttgtaacaccatctgcaagaccttctacaatattttgcttacccgaacgagcagcctgcaccatctggtcaactgtgcggtcgccatattgaggcaaaaaacgcttgcagaaagcaaatgtgagttgatagagcacatccgatttctggtagaagaacagctcgtcccagtttatctgcgttagcaacaccttgtgttcatttcctttttctgtgtcgtttttcatgggcacagcatcattagttttatgcatagttctttcacggattaaactttatcgcacaaaactaataattttttctatacgcaacaatagcagtatgggaaaaagtgatgtttagaagaaaacagagaaaaaacaaccgcatttttcatcaaaagaaaagagtgaacacaaaaaaaagtaacaaacttgttagtaataaagttgttacttgctaaaaaatgaatatcttgtcgtatttatacaaatttaacgttagtatttgacaaaaagaaaaataatcattatctttgcagctgaaacattacgaaatacagacatcattatgctattatctgctaaattcgaaaacatatattcgttcaacgaggagactcgcatcttgttcacagccagcaagagcgaccaattgccgttgcaagtatcacgtgccgaaaaacgggatgatatttccgtgttacgcatgggtttgatttatggtgccaatgcttcgggtaagtcaaacatcattaagtgtttggcaatcatcaaggagtttgctttaaatggttggagcaaccgaaagtacaattacttcaagatgacagacactccacaagagcgttcaagcattgaacttgaattcaaagtggatggtcagttctttgcttatggcattgctttctctaaaggtggtttgttggaggagtggttgtataagactggcagtcgtactgatactctgatttttgaacgcaaacgtaatggtgatggttgggaaaacaccattgccccacagttcatgaagggtgaggacggacaattcttgaagttcttgattgatggtacaccaacaaagggcactttcctaagcgagtatataaagcgtaacggaaagggcattgatgtgattaaatcggcgcgcaagtggttcgagaatttgaacattattttcccagatacacacagagcagatttcccattccgtgtggtgaacgatactcagttcagaaccgtgatgcgtgaattgctcaactatttcggcacaggtatttccgatcttcgtcgcgtggagtcaaaatccgaagaattgggtattccagatgaagttaggcagaagatagaggaaagtcttgaaggcaaggatgaaaaaactggtgttgtgattcacaatgagagccgcttcatctttgtggaaaaagacgaagcgaagaacttgaagtggtatgaactgaaaactattcacaaaacggaaggcagcaactccgactatattttcgaaatgttcgaggaatctgatggaacgtcacgtttgctcgatttcattccaatgctcatcgatatgcgcgtcaacgatgcagtttatgtgattgacgaagtagatagaagtttgcacccaatgctgactttgaaactgttggagatgtataatagtctgctcaaaagcgattcgcaaatgcagttgatttgtaccacacacgagtctaatctgctttctactgctcctatccgtcaggatgaagtatggtttgtggagaaagacaagaagggtgaaagtcatttgtcttcactttgcgagtacaagccaagggagaatgtgcaaaagggctatctgaatggacgatacggagcaattccgttctttggcgaacttaataatattcattgggacgatgcgaagcaggaatagtttgatgcgtgagcgccaagaggcattttgcgacgctcgtctaattgtcatagcctccgaaggcaaagacacggaacgtatatatttcaaggcattagccaaggaatatactaatccccgtgtgcatgtgcatatcttggaacggagtgcgacagaaaagaataactccagcccggagcacgtgttgaagcagctgaacgactataaggaacagtatgcgttggaggctgacgatgaactttggcttgtagttgataaagaccgttggacagaagcaatgctgtctcgtgtggctacagaatgttcgcaacacgactatatgcacatggctttaagtaacccttgcattgagctatggttactcttgcatctgatagatgcaacttcattgacactcgaagaacagcaacaatggttggagaacagacgaaagtcgagaaatgccgctccgtacctgaaagtccgattgcgtcaagagatggactcttaccatgaatctgcatacgatgccaaaatgctgattgtccatgtagaggaggcgatagagcgagcaaaagcgttggataagaatcctgctgaccgctggccacagacacttggcacacgagtgtatttgttggcagagagtgtgatgaataggaagtaatactttgaacgcaatggtggaagccttgaaaaaggctgttgctaatgccgatcgatcaataaaagaaatgcaaaggacgatagatattatacttactgcgagttgggaaggttgataaggaagttgtaggagttgtaaagtaatgaaaataaactgattaactgatagaaacagccaggtagattttacttggttgttgtataatattgtggtattttattgtggcaggttgtgtatttaataagaaaagggtgacttacgccaccctgaatgttttcacaacggaataatccttattgtgattagctaaaaatgctggatgcaaagtaatatatttttttttataaaaccaaattttattgatatttttttcattatgtcttataaaaacgctatatttgcttagaattaatctaaatagcattatttatgaaaaatatattaggattagatttgggaaccaatagtattggttgggctttgatagatgacgaaaataagaatataattaaagctggtagccgtattattcctatggatgcggctgcaatgagtgcttacgaaaaaggtaaccttcagtcttccgcatctgttagaacagtatttagaggaacacgtaggctttatcaacgtgcaactcttcgtcgagagcgtttgttgcgtattcttaatattatgggatttcttccagatcattttaaagaacaaattgattttgaaaagcatcctggtaaatttaaaaataatgcagaacctttgttgccatatagaagaacagctgaaggaaatgtagaatttatttttatgtcatcttttcaagagatgttaaatgattttagaagtattcatcctgatcttgtctctaatgggaagaaagtgccttatgattggacaatatattatcttcgcaagaaagcattaaaacaacctatcagtcgtgaagaacttgcatggattgttttgaattttaatacgaaacgtggttattatcaactccgtggtaacgatgaaacgacaactaagaaaaatgaagaatataagattcttagtgttagccaagttgttaaattggaagctgataagcgtaaaaaaaacttctattggtatgaaataacttacgagaatggtgcaacgcaaagaaaactatctgctgctgctcctaagcaagtaggtgagaaagttgaattgattgttacaacaacagaaaagaaagacggaactataaaaatttcattaagagatcccaaagatgatgactggactcttcgtaaaaagcgtgcagaaagtattatagataaagaagataagacagtaggcgaatacatttatgattccattttatctgaccctaatgttaaagttagaggtaaattgattcatactattgagcgagcttattacaaaaaagaactggaacgcattctcgagaaacaagcagaatttattccagaattagaggatcatgatttaatgatgcgttgtgtatgtgaattgtatcataataacgaagctcatcgtgatgcgttgaaggatcgtactttttgtcagtttatagttgaggatataatattctatcagcgtccattaaagagtaagaaaagtgaaatatcagattgtccatttgagtattatatttacaaggataaagatgggaatatacatcagaagcatttgaagtgtattcctaagtccaatccaatttatcaagagtttcgcttatggcaatttgtgcaaaatcttagaatatttgaaagagagagacatgataatggaaaactgaaatccaatgtagatgttacaaatgagtttattcggtcggaaagcgatattgtagctttgttcgaatggttgagcgagcaaaaagatatttcgcaagataagctattgaagtcatcaatatttaatattggaaagagatcaaaagagtatcgctggaattatgtggaagataaggtttatccttgtaatagcactcatgctgaatttaccaagcgacttgctgaagttaagaatactccagttttgaataaagaacaggaaatgaacctgtggcatattctttattctgttgaagatcgattagaattgggtaaagctttgcatcattttgctaacaagaatggcattgatgaagaaagttttgttaatgcatttgttaatatagaaccatacggatctgattatggtgcttattctgaaaaagcaacaaaaaaaatgcttgcattgattcgttgtggtaaatattggagtttagataatatagataataaaacaaaagatagaatacaacatattttggatggagaagttgacgaatcaatttctttacgagtaagggaaaaatcgttagctatgcagtcagttgatgattttcgtaatcttccagtttggctggctagttacgttgtttataattgtcattcagaatcgtttgaaacttctcgttgggaatctccaaatgatattgatacattcttgaaaaatggttttaaagcagggggcttgcgtaatcccgttgtggagagtgtgttatcagaatcgttgcgtgttgttcgagatatatggaaaaagtatggcaagatagatgaggttcatattgaaatgggacgtaatctgaagcagaacaaagagcaacgtacgaaggcaacaaatcgtcaacttgaaaatcagcgcacaaatttccgtattcgtgctttacttcaggaattcgtatcaccagattacaaaataaaggatgtgcgtccaaattcgccaagtcaacaagaaatatttaagatatttgaagaaaatatccttaatagcgatatagaaattccagatgatattcagagtactgttgatgctttagctaatccaacatcacatgtagaaaagaacgatataatgaaatatcgtttatggttggagcagaaatatctttctccatacacaggacaaccaattcctttgtctaagttatttacttcagcttatgaaatagagcatgtgatacctcaatcacgatattttgacgactcgttaagtaataaagtaatatgtgaaagcgaggttaataaagaaaagggaagtatgctcgcctatgagtttattcagaaaaagggttcaagtatcataaaaggttctgaaggaaaggaatataaagtgcttgacaaaacccagtatgaggattttgttaaggcacattattcaaaaaatgcgtctaaaaagcgcatactattgatggatgatataccagataactttattgctaagcaacttaacgatagtcggtatatcgcaaaagttgcattgcacatattctctcatttggtaagagaaaaaggcgagatggaaacagtttccaagcatgtcgttgctaccaatggtagtataaccgatcgattaaaaaaagattggggcttgaatgatgtttggaatagaatcattacacctcgttttgagcgaatgaatgaaatcaccaatagtaataattatggtgaatgggttaataaagatggaaagcaattctttaggatcaatattccattagaaatttctcaaggtttcagcaaaaagcgtatagatcaccgtcatcatgctatggatgcaattgttatagcatgtgcatcacgcgatcatattaattatttgaataatgtagcagcattatcaaataaaaaagatgagcgttatgatcttcgtgctaagctatgttataaaaataaaacagatgatagaggtaattatcaatggcaatttaagaaaccatgggatagttttacacaagatgcttataacgaacttgatagtataattataagtttcaaacaagatcttcgtgtaattaattcaatgacaaattattattggcattatgtttatggcaaaaaagtattaagtaagcagactgttggtgatagttggtcaataaggaagtcgcttcataaggcaactgtatctggtgctgtacgaattcaagaagtaagaaaggtaaaactaatagatgctcttgaacatattgaatttataaaagataagcagattcgtaagcatatcttaaaggtaaagcgtgacgtacttaataatacttcaaataaaaaggagataataaactattacaagaaacagaaatttttgattaataaaaaagatatttcaaaactcgaagtttactatataccagatattccaaataaaacagctacacgagttgctgttgatacctcttttacccaaaagataattgattctgtcaccgatagtggtattcgtagaatacttacaaagcatttacatctgtatgatgatgataaagggaaagaacatccagaattggcattttctcctgaaggacttgaagctatgaacaagaatatacaagctttaaatagtggcaaagagcataaacctatagtgaaggttcgtaagagtgaggctcttggcgcaaaattcaatgttggagaacaaggtagtaaaccgaaaaaatatgtagaggccgataaaggtactaatttgttctttgccgtttatgtagatgaaaaaggtaatcgtagttttgaaagtattccttttaatgaagctgtggagcgtttgaagcaaggtatgagtgtcgcagatgacgttaaggctactggagaaaagctattgtttactctgtcgcctaatgatattgttattttagaaggaggtggttctacattatattatagatttgtttcgtgtacaaatactagagcatattttattccaatgtcaattgcaagtgttatcagtgataaggtagaatatgggacgttaaataaaatagaaaataatgaaaaccgtttaagtataaagcactattgccaaaaggttatagttgatagattaggagaaatatcaagagttataaaataagtatgataaagaaaaccttatattttggtaatcctgcttatttgtctctgcgtaatggacaattagttattaaactgcccgaagttgagagacaaaaagatatatctgatatccttaaaaaggaatcagttcgtactattcctattgaggatataggtgtaatagtgttggatcataaggaaattactataacacaggcgttaatagcatcattgttagataattctgttgctttagtaacttgtaatgataagcgcatgcctacaggcatgctcttgccattgcaaggtaatacactccaaaatgaacgttttcgtaatcaaatagatgcttctcttccattaaagaaacaattgtggcagcaaacagttaaagcaaaaatagaaaatcaagcatatttattatcaaaagaaactgaatgtccttctgcatgtatgtataagtgggcaaaagatgtaaagagtgatgattctgaaaatcttgaagcacgtgctgctgcttattattggaaaaacatttttgtaggctatcctgactttgtaagaggtcgggaagaaaaatatcccaataatattctaaattatggatatgcaatacttagagctgttgttgcacgtgctttagttgttagtggcttgttgcctgtagcaggaatacaccatcataataaatataacgcatattgcttagctgatgatattatggagccttatagaccatttgtagatagggttgttattgaaataatgaaatcatcggaacccacagagaatctaacaaaagaaataaaaacacagttgctatctattcctgtgattgatgtaaggataggtggaaaacgtagccctcttatggttgctgttgctcaaactactgcaagtttagcaaaatgctttaatggagaattacgtaaaattacatatccagaattcgtttgaaaaatcgattaaatgaatatcgtgttatgtgggtacttgttttttatgatttacctacagatacagcaaaagaacgtaaagcagctgcccgttttcgaaaagaaataatgggagatggttttacaatgtttcagttttctatttatgttcgtcattgtgcaagtatggagaatgcgcaagttcatattagaagagttaaggcattactaccagagacaggtaatgtaggtattttatgtattacagataaacagtttgctgatattcaaattttcttttgtaagaaagaaaaaatccctaatgctccaggccaacagttggaattgttctaaaaatgaaaaagagaatatcattcgaatgaatggtattctctttttttacaaccgatttttttgttttctaatttgttgtataatgatttgataatcattggattagatgaatcgagttgtttgcaataatgcaaagataggcattttttagctaatcacaacaatatgctttcacttcaaacaaataatctgttgtttgcaataatgcaaagataggcattttttagctaatcacaacagttatggaaaatagggtatttctttatagttgtttgcaataatgcaaagataggcattttttagctaatcacaaccccaatcctggtctgtagccgattggtgcagttgtttgcaataatgcaaagataggcattttttagctaatcacaactaagtctgtgtacttatccagcagttctgcgttgtttgcaataatgcaaagataggcattttttagctaatcacaacagcgctgggcgcagaaaataaccttttttagttgtttgcaataatgcaaagataggcattttttagctaatcacaacaagtatgttactaaggatatgagctatttgttgtttgcaataatgcaaagataggcattttttagctaatcacaacagctatgggcgcagaaaataaccttttttagttgtttgcaataatgcaaagataggcattttttagctaatcacaacgctattggtcgcctcgaaaacctgtatgcgttgtttgcaataatgcaaagataggcattttttagctaatcacaactatcccgagcttcttgctttacttccccaagttgtttgcaataatgcaaagataggcattttttagctaatcacaactggttgaccaggaggtcgcatcttcaacctgttgtttgcaataatgcaaagataggcattttttagctaatcacaacgcaagcaaatatgaatacgttggtttctggttgtttgcaataatgcaaagataggcattttttagctaatcacaaccttaaatttatcagttatggttaaatcaagttgtttgcaataatgcaaagataggcattttttagctaatcacaacctatttctaaccttcgtagtgcttatgcttgttgtttgcaataatgcaaagataggcattttttagctaatcacaacttactattgtatctcctttaaacgtcatagttgtttgcaataatgcaaagataggcattttttagctaatcacaactcctgataatatcgttatcctcatcgttgtgttgtttgcaataatgcaaagataggcattttttagctaatcacaactgtttccattatcagtttgcacatctttttgttgtttgcaataatgcaaagataggcattttttagctaatcacaactataaccgcggtgcattaggtgcagttccgttgtttgcaataatgcaaagataggcattttttagctaatcacaacg

SEQ ID NO: 1406 - DNA, 14389 bp, synthetic construct
  misc_feature 1..14389: note = Synthetic
  variation 14338: note = n is a, c, g, or t
  source 1..14389: mol_type = other DNA
accttttacggcggaaggcctgctgcgtgcccagcatcgtggcatgcagcgcggtatcagggggcagaggtgaccatcgtccatcattcctacctccgctggctgcacacacagggtgtgcccctgaaggaaatgcctgcgcagggggtctacgatcctgcaggcggctggttgctgagacgcaaaagcctttttgcgcagcgcgcgccaggcttacctgtctgtcggccctcgcttcgggaaaggcgggcagcatgaggagccgattaacgacagcaaaggctgtggcacggttatgcggatgcacctgtgggctgatgtatgcgcaggacatgcaagcggcctttgagatggggtgccagctttccgccctcacgcatgggcacccgtcaggctatctcagtggaggttttttcgccgcggtgatctcggggctttgtcaacatatacccttgaataccagtgtgtataaggctttggaactgctgatcggtcggcccggatttcaagaagtggagcggctcatatttcgtgctttggacctgcatgagaagttaaaaggcatgccgctgagcccgcagcacctcgaatctctgggaggggcctgggttgcggaggaggccctcgcgatcagtctgctctgttccctgcattatgtggaggattttaaagtgggtgttttggcagctgtaaaccatggtggagacagcgattctactggcgcctgacgggcaatatcctcggcttgatccatggcctatcgggcattccaagtgagtggatctccggtctgcgcgatgcggatatcgtcttggagatgggcgaagaccttgctatcagtgtacagggagctaccttcgcgcccgatgcagcgtgggaagagaagtattcccccttttaggttttggtgcccagaagcaggtcgcaacctttctccaagtgtttttttagggagtcattccccaactttaaaaggcaaaaaatccaacttagttctcctaattttgaactgaagtctctatatttgcaacaatgttgaaacaactgcttcttttaggtatgaccttgctgcttgtggtaaacggaatgctctattccgttatacagggagcctatgtcctaaataaagcagcgatcatcgaaaatttctgcgtgaacaccacccagcctgagctgaaatgcgatgggaaatgctacctagcccagcagttggaagcagaaaaagaacggcaggagcaaaacaagacacatgccttcgggatggatttcggtcaatttatagcgcctgagcaagttccagtgcttcaccttcctgtatttctaggggagggcagcttttccagtctttacatcgagcggatcttctctatttttaccggtgccctggatattcctcccaagctctaatttttataggtttcagaagcctacatgcactcgcttcgtccgcaggtaggtctgcgctaagcggctctctctcgccttttcctttgcgctatgcgcaaaaaaaaatagcctctctctaaggccactccaatggataaagtaggctgtttttccttttaacttccatgagctatcgctagtaaagcatttagacgacactatggtgcgtacgctgttccttatttgcatgtcttggatgatcctactgaatagtatggtttattccgttatctgtgtgaattttcaactaaacaggtcctttataacggaaatgttttgtgaaaataaaggccttcccctgtccagctgcggaggcgcctgctacatggagcggcagctggagcatgcttcccaagaatcggaaggcgacgtgatgcgttttcgatcggattttaacgcttatacgttggcctgcctacctgttttttccatgaaaagggaaggcaagggggtgccgacgcaaaaggccttctatcaatttcctttctatggtctggtctccatgccgctggagaaacctcctaaatgctaagcagaaattcgcccgcacatgaagacaactcatcgtatagtgaaaacgaaaactgcttaaaatgaaatttaacgctttatttatatgtattgccgtctttttgatggcagtgggggaccttacggcccaaattagaatggagggaaatgtgatcgatggcaacagtcaggagcctattcctggtgtggccattaaggttaggggcacgacgacgggcactgtaacagacctgaatggaggctttacactggacgtgcaagaggaggcccggaacttagagttctctttaatcggctatgaaacgaaactcgtttccatcaccaacttcccctcgaacggccgtgtcatcttacagccctcctctttggatctggccgaggtaaccgttttgggttttgaaaacaaccgatctctattagaatccacgggagctatcgccatcgccggccctagggattttgacagagctgacaaaacggaccttgcccagatgctcaatcatattcccggggtacaggtgagaggggcaaatgtgctgcggccggcaaccatctccattcgaggccagggggccagaggtccggggcagacgggcaggataaaaatatacttaaatgacctcatgctgacgaatgcagatggaacgaacgcctgggaagatatcgatccctataccatcggttctgtggaggttattaaaggtccagggagtagtatctacggtgcgtccgtaggaggtgtgttaaatattcgaacagagactgcgccttatggggaacacagcgtagaagccttttcgctgctgggttcttttaattccatgcgtgtaggaaccacttatcgggtaagtaatgagaaggtaaatatcctagctaccgtcggaacgcagtccacggatggctttcgggagcattcgcaagaacagcgggactttgttaccttcttaggcacattttcgaatgcggaaaacaatacgactacgctctttttaaatcgaaataggtacgactccagggctccaggtgcgctaacgccgcagcaggtggaagaaaacccgagacaggccttgccgctcgctgtactccaaaacgcgggcagaatcgcgacctttactcggatgggcatgagtaacgattggcagataagcgatcgctggagaaatgtaacctcgctcaccatgtccttttcggacttagatcatccgataaactttctctacatctatcagtgggcccaagacgtagggggtaggacgcggtttatccatgatacgaacgtgttcgggaaaaaggcctcattcactgtgggtggtgagtaccttaccggtgtcgtgcgaacgaatttttatggcatcgaagcaggaagacctacgggtgtggccataggcgacagagaggcgagaatacaaaatgggattctctttgggcaagcagagttagaggcgacggaaaaactcctcgtcaccgcaggaatgagcgtgaatttctatgagttcgcgaatctggagctgacacttccaggggctgagaatcaagtgagacgttttgacccctttgtagcccctcgggtagcctttaattacaggccctaaaaaccttagcgattcatggaaatatttctgcagggtttacccgccggcggtaggggatattaaccgacccgatgggacagtgaatctggacctcagagaagagacggcgctgaatttcgagatcggcagtaggggagcggcgcttaacggctggctggaatatgatgtcaatgtgtaccgaatgaacctcacgaatgagatcctcacccgaacgcccgaaattggctttgcgattcgagaaaatgccggagagaccagctacacaggcttggaggtgtaccttaagtctaatctggcgcgaaacgctaagggatttatccagacggtgatgccttctttctcgcttacgctgcaagaaacggtgtttgtcgatttccgcgaaaccctcacacaggcaggacaaatcgtggaatcggatcttcaagggaatcaagtacccggaaatgctccctctagaatctttagcaatctggaaatcggggctaaaaatggcttgtatgcctttgccaacatcgagtgggtcgatcgaacacccatcaataataccaatacactctttaatgacgcgttcaccttcgtctccgctaaagtgggctggagaggctatctcagcccccgattggaagcgaatctaaacgtgggggtgaataacctgctcgatcaaatctattcggatagtcctgcgcttaaccccaacccgattcctggggggccactggcagggcagtttcctttccttattccgaactgggggagaaattattatgcaggattaaatgtaaagtatcatttctaaagtacaggataaggctgggagagaactcccagccgctaccttccaaagcgtatggaatcaaagctaaaagataaaaaaacgacacgtgcggctactttaaagcgaatctataagtggcatagtgtgctcggtatgctaacactcctccggttatcttctggacagtctctggcttgatgcacccgtttatggcccactggtttaagcctgaaatagctaaaaccttcctcatccccacacctattcccgaggagaaggtgcagctcagtccacaggaagcactggagaccaatggcatcacctcctttaaaaacctgcgcctggtgcagtgggaagagcaggtctattaccaagtaaaagacgatcaagcgcagctcgtctacatcgatgcccaaaatggggccttgaaagaaaatggtgatcgcttgtatgccgaatacttggccagaattttcttggatgacccctccagcccggtgaaaaacgcggtgatccaggaggagtttgatgatcagtacaagtacatcaaccgcctgctgccagtttggaagctcgacttcgatcgcccagatgcgatgacgctctatgtggaaaccctatcggatcgcttaggaacctttaacccgaggagtagaaaggccttcatttggttctttagtttctttcataattggtcctggctagagtccatcaccaacctgcatgtgcgaaccacggtcatgctgctctttttagggcttattactgcttccgccttggcgggcctgctcatctatggctttatgtggaaacgtttcagtagcccaaggccagagaataaaagaggactcctacgccagtaccatcgacaaatcggtttggccaccgccttcgttaccctgacctttgcctttagtggagggtatcaagccacagccaagtataccccgaatacattgcctgaaatgcgcgtggaacccagtatacgcaccgctgatttgatggttccgctccaggagctggaccttgccaaaggcagcttggttaatttcgaggtcgtacagatgcagggcgaaaccttctatcaggtacacaaacatgaggggagggaaaacccgcttcgctatgcctattatgccgccagctcgggggggcaacttgaagacggtgacacccagtatgcccagttcctcgccgatacctttgcggaaaaattagggcttaacctccgcacctcagcgctccaaagccaggaggtcctacgtaccttcgaccatgaatatgggtttatctttaaaaggttacccgtacataagttagcctttactaccccgaacgcacagaccctttacatcgagaccggcacctcgcgcttagcggcgagcatcgcgaatgcagatcgggtcagaggattctcctttgccgtactccataagtttttctttatggactgggccgggaaaaccgtccgtgacctcgtgatgctggtcagcgctttaggtgttctggtggtgagcttatttggtctggcactcttcgtgaaacaaaacagcttgttctgactagttacagcaagaaagggcagttaatgactgctccttcttttttctaaccttataaaacaacatacacacatgaaaaaactacttttactggcactcttaggcggcttctttgggagctgcacctctgaagtacaagaaatgtctcctcaatttgaccatgcaggggcgattttagcgtccttagaaaagtccaaggcctatacctatgcgattttagatcaaatgcccgatagcctgtacgactataaaccgactccagagttgatgacattttctgaacattatgtgcataatgccctattcacgtgtaatcagctggcgaatcggctccaactcgaaaacccctataaggattttaaacgggagcgggactttactaaggaggaaaccatccaggaagtggaccggatgtacgctttcatgaccaaaaccttagaagcgatgactaccgaggacttggaaaaagaaatagagttcggaaaggaaaatattcctgcttggagacttttccatatagtggaaaatcataacaatcatcatagagggtactctctggtgtatctgcggatgaatgggatcgttccgaaaggatattttggttggtaagcacaaaacaaaacgtatgaaaaatttcggtatttacgcactaatgctcctcctcttctcctgcgggaagccagagtctgaagcaacacagtcttttcctccagcgctgcagttccttcttatggatgattcggacagcatctacttggcttctctggaagcagatgcactcctcctgcgcgcgagtgctccgaacgaggcatccgccagtttgtatctgagtgaagaccgctcccttctcttttcgatggaacgggcctccggccaaattaatatcatggagctcgctcgtttcgggaaatggctgccccagcccatagagcggccgctccccacgcattggacaggcgtccaaaaccacgccctaatttttaatgatggggacgggagtgtcctctatacgcaggcggacacggctgttaccgcaggcttttccctgagggttttagagctggaggaaagcagtgcccaccacggcgcagcactgtatctgaacagcgggaccgtggccatgacagtaaagggggagcaggaagagggggtgcttccgcagcgggtagccctggtggacctccgcagtcagcagaaactcctcagcaccgaggccctggcacttggaggcattcacggcgcacagtcgaacggcacctacgccctttttggcaccatggagggcattttatggataaaagaggacctcagctatggcctgatcgcctatcccgagcctttacaaaacagttcgggtaactggatcggcagcctgaagggggcgggctccacctttgtggggagtgccaggaatttaggtttatttcaacttgacccggaggcgcagactatcgtcagcctttacgcctcggatcaggtggcagactatcaggtgagcgcggatgggcgctacacggtggtgctgcgcaaagataatcgcctggctctgctcgataatacttccttggccctgttacaggagatgcctattccggatcagccggagaccgctaaggggtataagatcgcactatctgagcagctgctggtggtggcagcgctggggtatagacagctccagttctttgacatctccactctgcagccgctggggcagttttcttccgatgtggtgcttcgggatttcctcgttttttaggctgcgggcgataggcctttttggggggagttcagacgccttagggtgtcggtgaactccccccttttatccatatgcaggtcagaagcgggtcgctgccgctccaaaggccatgagcgtgctcatttttcgcttgggttaaaaaagaaagcaaacgaaaccaatcgaacatggaaaagaaagcaaacgaagccaaacgatcacggttttagcaaaatcgaaagcaaacgaaagttaaaaaagaaagcaaacgaacattttgtggttttaggggagaaaagaattaaaacctgtcaatggctgacaattctgtactttttaagtaataagtgttggaatacttaaattatcaccctatcttaaactaaaattacgggtataaaaccaaaaagacccctaaaactaatgttgaaggggccttttgaaatgttttcacaacggaataatccttattgtgaattgcttcaaattggtttttaaagatagtaaaagattttcaaatttttaaggacttatgaaaaagattttaggtttagatttaggtacgaacagcgttggctgggcgcttatcgcgcaagatacaagcgagcgtaagggggaaatcatcggcttgggctctcgtattattcccatgtctcaggatctgctcggcgacttcgggaaaggcaattctgtttctcagacggctgagcggacaagattgcggggggtgaggcgtctgcgcgagcggtatttattacgaagagagcggctgcatcgggtgcttcatattttagggtttttgcctgaaaattacgcttcacagatagattttactgagcgtgtaggtaaattttttcctgaaaaagagccgaaattagcttatgacgattcgggcaactttctattcagtgcgtattttgaagaaatgctgaccgtttttaacgctaggcagcccgaactactttcccaaggaagaagacttcctcagggttggacactttactacttaaggaaaaaagcactcactgaaaagatatctaaagaggctttggcttgggttcttttaaattttaatcaaaaaaggggctattatcagctgcgaggagaggagcaagaagaaaatccacataaacttgtggagtttcatacgttgaaagtggttaaaatagaaaaagatcccgaagtgaacagtaagggagatacttggtattcgctccatttagaaaatgaatgggtgtataggaggtcgagtaaggtgcctttggatgattggctcggtaaagaaagggattttatagtgaccaccgatttagataaagaaggtaaccctaaattggatcgagatggacagataaaaagaagttttcgtgccccaagtgaagatgattgggggcttgtgaagaaaaaaacagagcgcgaactcgaacgctcaggaaccacagtaggagcgtatatttttgagcagttacttctgaatccacaagtcaaggttaaaggtaagctcattaagacgattgagcgtaagttctataaagaagagctattaaaaataatgcgtacgcaagaggcttttcatcctgagttacgtgatgagcaattattagcagatgcagtacgggaactatacaagcataataagggacatcaacatgtattgctggggaaggacctaagtcatttacttatagaagacatcctattttaccagcgtcctttaaaaagtcagaaatccagtatcgcaaattgtcctttagaaaaaaggtattatgaaaaagagggagagcaggtagagctcccccaaaaggttacatctaagtcgcatccattattccaagagtttcgactgctgcagtggctggccaatctaagaatacttcgaaaggccgataataaggatgtgactgctgcatttattagaagttgggaggaaaaagaacagctacttcattacctgtcttcagtagaaaaaatatcgaatgatatagttcttaaatttttattgggtttacatggttttaaaggtaaggcattacaggcggaagtccagaagtaccgctggaactatgtttttgactcagagaccaatgagtctaaagagtatcctggaaatacaacgcgcgcggacttcatggcccgattaaatcgggtagtgaattttgataaggagcaatatactccggagtttgaggaatctttatggcatatcgtttatagtgtgactgataagcaggagtttgaacgtgcgctgaaaagattcgcaagaaaatggagtcttgatgaggaaacctttttcgcggcatttagaaaaataccgccctttaaaagcgattatgcatcctactctctaaaagcaattaaaaaactgcttcctcttatgcgttttggttctagctggaatgaatcggctattgacactgaatcaagaagaaggattgaccttgttttagatggtgaatatgacccagaagtaaaggataaagttcgagagctgtccgttgacttcacttcggtagctgaatttcaagggcttcctttatggtttgcgagttacttggtttatggccgtcatgctgaagcttctgagctagtgaagtggaactctagtgaagaactagctcagtttatcaaggattttaagcagcatagtttaagaaaccctatagtagaacaagtaatcgtagaaacgctacgcgtggtaaaggatatttgggatacttatggtgaagggcgtaaggatttttttgatgaaattcatattgaactgggtagggaaatgaaaaacccagctgaggttcgtcagcgtatgacgcgtcagcaatctgagcaggaaaatactaatcttcgcatcaaggcatttcttctagagctattaaaagatcctgatgtagaagatgtaaggccatattcgcccatgcagcaagatattttaaaactatacgaagagggagctttattagcagcagaagatattccagaagatattttgaaaatcagcaaagcgccacagccttctcgatccgattttcagcggtataagatttggctcgaacagcagtattgttctccatatactggaaagctgatacctcttaataagctatttacccctgcctatgaaatcgagcatgtgataccccagtcgcgttatttcgatgacagcatgagtaataaggtaatctgtgaggcagctgtcaataaattaaaaggtaataaactaggcctcgagtttatacaggcacacggtggagaaagaattcagcttggctatggagaagaggtcacgattttcacagaagcgcagtataaagggtttatcgaggacaagtacgcgaggcatcccgtgaaaaagcgtaagttactagccgatgaactacccgaaagtatgattgagcggcagttaaatgatacacgctacatcagtaagtatatagcgggcatactttcttgcatagttcgcgctgaagaacaggatacagggtttaactcgaaaaacgttgtcccaggttccggcaaagttacgggagttctcaaacaagattggggcttgaatgatgtttggaattcgcttattcttccacggtttgagcgaatgaatcagctatcgggttcaaatgactataccgcgtggaatgagaagcatcaaaagttcctacccaccgttccgctggaaatggcaaaagggtttcagaaaaaaagaatagatcatcggcatcatgctttagatgctttagtggtagcttgtactaccagaacacatatccaatacatgaataatgagcatgcacgcaaaaaaagtctataaaaatgatgaggagaaaaaagcaaggcgttatgatctaagaaataaactgtgttataaaaacaagtctcttgataatgggcagtatacctggcaattttataaaccgtgggagtcctttacagcagatgcgaaagagaagttagagcaagtaatcgtcagttttaaacagaatttacgtgttatcaatcgcaccaccaacttctattattcttatagagatgagacaggggccttgcgtctagatagtcaagggaatccgaaaaaggcactgattaaacaagtaaaaggcgatgcttgggctattcgtaaacccatgcataaagatacagttacagctcatattcacttacgcgatgtgaagaaggtgcgtctgagtctggctatggagaatccggaacagcttgtgaataaacgcttaaaaaaacatgttgcaggactcattgctttaaactacgacgcaaaattactagtcaaatattttaaggatcgtaagtatcagtttgagggagaggatgtttctaaagtagacgtctactacatgagagaggatttagctgctactagagttgtcttagatacttcgtttaataagaaaaagatcgaaaccgttacagatacgggtattcgtaaaattcttttaaaacatctcgaaagctatacgggaatattagacgctaaaggaaaagaaattcctgcagaaacgcttgcgtttactcccgaaggaatcgatgatatgaataagtctattcgggaattgaatgatgggaaagatcatcaacctatttataaggtgcgaactttcgaagtaaagggtgctaaatttcctgtcggattaactggtaataaaagcaaaaagttagtagaagcggctaagggaacgaatctttactttgctatttatatcgatgaaaacggcaaacgtaattatgaaagtattccttttaatgtggttttagagcgctcaagcaaggggagggacccgttccagaacgtaatgataagggccataggctattgtttcacttgtcgccaaatgatttggtttatattccagagaaagattttatagataaatcggtgaaaacagaaccaatgcctttaagactacctgaaagagtttataagatgattagtagcactggtgctgaatgtcattttcttccagttaacgtgtcgtctttaatcaaagggtatgatgcaaagtctaagctcggagagtttggtagtcaaaataagcaggaagtaacgagtgattcatttattcgggttaaagagcggtgttataaattagaaataaaccggctaggaataccattaaatagattaaaatgataaagcgaactctattcttcggtaatcctgctcatttaagtacaacgaatcagcagttaaaaatcagctttcgtgatgcgtcacttcctgatcggcaggtgcccattgaagacattggagtcatcgttttagaggatcagcagattaccgtcaccaatgcgcttttagccaagctaactgcgcataaggtggctgtaatttgctgtaatgcagcccatttaccagaagggctcttactgcctatgcatgcacatacagagcatacagaacggattcgacatcagttgaatgcatcactgcctttaaaaaagaatttatggcaacaaacaataagcgccaagatcaaaaatcaacatgcgttattggttgaacgtggtattgagattaagcgaatggagtacctgtaccggaatgttaagtcgggtgacactgggggccatgaagcgcaggcggcagccatctactgggatcatttaatcgatattcctggttttaggagagagcagactggaattcctccgaataacttacttaattatggctatgcgatccttcgtgctgtgatcgctagggcactggtttcatcggggatgttaccaagtgttggaatttggcatcggaataaatacaatccgtattgtttggcggatgacataatggaaccctatcgtccgtatgtggatttagttgttcatgctatcgtcgaaagcggggaaagtatagaagagctcagcacagccttaaaacgagagcttttgcaaataccggcgatggatgtacagatagaggggcagaagagtccgttatttatcgcagcttcacgaactacctcttctctcttcgattgtttcgtaggagttagcaggaagattagttatcctgactatggaggctaatcatttttcaaggctaaatcaatatcgttctatgtgggtacttgttttctttgatttgccgacagatactaagcgagatcgtaaggtggcagctggttttcgaaaaaaacttttagaagatggttttgcgatgtttcagttctccatttacacgcgtttttgcccaagtcgggagaatgctgatgtgcatatacgccggacaaagataaatcttcctccaaagggaaaggtaggtatcatggccattacggataggcaatttggtatgatggagattttctacggaaaaaagaaacaggatacggagccgccctctcagcaacttgaattattttagggccaatataaagtaaccttcttgaactttgaaagattttttacgcttacttttttaatcctgaaaatcaagttaagtcacagcttaccagcagtttagactgcggtaagctgtgactcttagactaagataccaatttgagagcaattcacaacaaaacgtactgaacgtgaaagcgaacaaggctgtgactcttagactaagataccaatttgagagcaattcacaacccttgtcgagatcgtcgttggcgaatccatagctgtgactcttagactaagataccaatttgagagcaattcacaacctggatgagctgacttnctcgaatcaccactgcctatacgatgtacagcacgtacgtctgagcatcga

SEQ ID NO: 1407 - DNA, 14103 bp, synthetic construct
  source 1..14103: mol_type = other DNA
  misc_feature 1..14103: note = Synthetic
atacaagaagggcgttctcttttttgtggagactatgaattattcaggctaaaaaagtaccgtatgactggacattattctatctacgcaaaaaagcccttacacaaaaaatagagaaagaagaattagcctggattcttctaaatttcaaccaaaaaagaggatactaccaattacgggaagaagaagctgaaaagtccacttccaaaacacgacaatattttgacagccaaattgtaatagacatcgttgacacagaagaaacttataaaggattaaaaatatttaccctcactctagcaaatggagaaaaaggtaaatggtatgggaaaaacatacccgattggaaaggtcaaaagaaagaaatcattgtaagcatagacctggataaaaatgggaatgacaaatgtgatgagaacggagaacctgtcagacactttaaaattcccacagaaaaggaatgggaagaacaatggggacttgtcaaagctaaaaccgaaaaggacctgaacacttctaaaaagacagtaggcacttatatttacgatacattattacgaacccccgaccaaaaaattcggggtaaactcattcgcaccattgaacgtaagtattacaaagatgaactctatcaaatactaacgacacaagaaaagtttcaccccgaactaagagatggaaacctgttacagtcttgtattgaagagttgtatcacaacaacgaagcacatcgcaatacaatttctaaatatagtatgtccaaattactcgttgaggatgtcatattctaccaacgtccactgaaaagcaagaaatcactcatcagcaactgcccgtatgaagagcatacttatgtagataaggaaacaggggaaatccatacagcttctgtaaaatgtattgctaaatctcatcctctttttcaagaattccgtctttggcagtttctgtccaatttacgaatatatcaaaaagaaggaatcctcaatggtaagttcaccactgacatagatgtaaccaatgaatttctgaaaaatgcagacgattatacgaatcttttcgactggctcaatcaaaagaaagaaatcaaacaagatgcatttctcagatatccgccatttggattaaagaaaaatgtggcaaattatcgctggaattatgtggaggataaaacatatccttgtaatgagacacattctaggatattgctctattgggagaaagcaggtatagatcaatcgattctgaccaccgatatagaagaaaaactctggcatatcttatattctatttcagataaaaatgagctccagaaagcactgaaacattttgctgataaaaacaagttagaagataaatttgcagatattttccaacaaataccaccattcaagaaagactatggttcctactctgccaaagccatcaaaaaactgcttcctcttatgcgaatgggaaaatactggcatctagaatcaatagataatgcaaccctcacccgcatccatcaaattctgaacggagaaatggacgaagcaacggcaagcagaataaaagaaaaatacatccatttagataacttctcttcatttcagggacttcctacatggttggcatgctatatcgtatataatcggcactctgaaataaaagacatcacgaaatggaagcaaccttcagacattgatgcttacatacaatcgttcaagcagcattcactgcacaaccctatcgtggagcagattataatggaaactttacgtactgtacgcgatatatggaaacaaatagggcatatcgatgagattcatgtcgaattaggacgtgagatgaagaatcctgccgacaaacgtaaaaaactcacccggcaaatacaagaaaacgaaaataccaatctgcgcatcaaggcacttctcactgagtttgcaaatccggagtttgaaatcgaaaatgtacgtcctcactctcccagccaacaagatttattacgcatatatgaagaagaggtcttaaacgaatcagctaaaaatatgccagaagatatagtcactatactaaaaaaattcaatgagacagatgcaaaaaaacgtccgtctacttctgatgtattacgctacaaatgctggctggaacagaaatatcgctcaccttatacgggagccatgattccattgggtaaattattcactcctgcctacgaaattgagcatgtcattccaaaatctcgttactttgacgattcattcacaaacaaggttatttgcgagacagcagtaaacaaattaaaagacaacatgttaggttatgagtttataaagaatcattccggacaaataatagaactaggctttggacaaaaaatacaaatacaaaccgtagaagcctatgagcaatttgtaaaagaacactactcatacaatcctgttaaaatgaagaaactattgatggaagatattccagaacaattcatccagcgtcagttaaacgacagtcgttacatcagcaagtttattaaatcactattatctaacattgtccgtgaagaaggagaatctgaggccacttccaagaatattattgtttgtaatggaagtattaccgaccgtctgaaaaaagactggggggttaatgatgtatggaataaaattattctacctcgtttcttgcggttaaatgaaattacgaacagtgaccactttaccacaaccaataccaacaataagataatccccaccatgccattagcattacaaaagggattcaacaaaaagcgtattgaccatcgccatcataccatggatgccattgtcatagcctgtgccaatcgcaatatagtcaattatctgaataacgaatcagccagcaaaaatgcaaaaatctcacgtatggatttacgtcagattttatgtaaaaagacagaacctgacgcattagggaattatcaatggataataaacaaaccgtgggaaacatttacccaagatgtttatgcagttctagcaaatatcattatcagtttcaagcaaaatttacgcatcatcaataaaacaaccaaccattatttccgttatcaaaacgggaagaaagtacaatgtgtacaagaaaaaggagacaattgggctatccgtaaacccatgcacagagaaacattctatggagaaattaacttacgtaaagtaaacactgtgtcactgaaagtagcgctagaaaatccacagagaattgtagaaaaagatttaaagaaaaaaataaaagaattattgcaacaaggactcagcgaaaagcaaatcaaaaaatattttgaagaaaacaatgatatttggcaagatgtaaacctgaagaaaatccaattctattctttcacaaaagaaagaaaagaacgcttttttgcaagccgtgaatctatagatacaagtttcaatcaaaagaaaattgaaaagcaagtttccgatacaggtattcaacaaattctattacgtcacttaaggcaaaataataacgatccaaacctagcattttcccctgagggtattgaatggatgaacaaaaacattatatccttaaacaatggcaaatggcatcaacctatatataaggtaagaatatacaaacaagctacaaagtttgcaataggacaaactggcaataaaaccacacaattcgtagaagcagcacaaaatacaaacttattttttgccatatacgaaacagagcacaaccgcagtttcgcctctgttccattaaatgtggtcattgaacggctgaaaaaaggattgccaccgacacctgaagacagtaaagggaatccgcctaaatatgtattgtctcctaatgatttagtctatgttccaacaaaagaagaaatggaaaatagacatattaatcaacccatacaaaaagatagaatttataagatggtaagttgtactgaaggggaatgtcatttcattccatatttcgttgcaaagcccataattcaaactattgagttgggaagtaataacaaagcacaaaaatcttggcaagatgaaatgataaaagaaacatgcattcctatcaaaacagatagactaggaaatattataacgttaattagcctatgataaagaaaacaatgtattttggcaaccctgcatacttatctttacgtaatgcccaacttgtcataaaacttccggaagtggagaaatgttcttcacttccagaagcgatgaaacgtcaatctgaaataaccaaacctattgaagatataggggttgttattttggataataaacaaatcaccattacttccggagcaattgaagcattgcttgaaaataattgtgcacttattacttgtgacagtaaaagtatgcctgtagggttaatgcttcctctctatggaaacactacccaaaacgagcgttttcggaaacaactagatgcttctttgcctttaaagaaacaattatggcaacaaaccattcaagcaaaaatcaataatcaagcatcttccttagccttatgtacaaacgaagatataaaatgtatgcgtatatgggctaacgatgtacgaagtggagaccccgacaacctggaagcacgtgctgcagctttctactggaaaacacttttccatgatatcgaaaactttacaaggggccgagatggcatacctcctaataatcttttaaattatggttatgctattctccgtgcagttatcgcacgttctcttgtaacaagcggattattacccacattaggcattcaccatcataaccgatacaatgcctattgcttagcagacgatataatggaaccttatcgcccgttcatagaccgactggtctatcaactatactctgaaaacaaaatggaacttacaaaagaagtaaaagccagtttattatccatccccacaatagatgtcagaatcagtgggaaaagaagtcctcttatgatagcagcaagcctaacaacggcatcactatataaatgcttttctggagaatcacgaaaaatcatttatcctgaattttaatggaacgtttcagcgaatatagagttatgtggattttagttctttttgatctaccaacagaaacaaagaaagacaaaaaagcttatactgattttcgcaaaaatctacaaaaagatggattcacaatgtttcaattctctatctatgtacgccattgtgcaagtagtgaaaatgcagctgtgcatataaaaagagtaaaatcctttctacctgaatatggtcaagttggaattatatgtatcacagacaaacaatttggagaaattgaactattttatggcaagaaagcaagtgggataaaaacaccaggacaacaattagaactcttttaaaataataaatcccatggttaatatgggacttattacttcaagaaacaacttttactttttctaaatttacttataaccaactgatagacaacaagaaacaaccaataagttgtttccaatggttcaaagatactaaaatgaaagcaaatcacaactgatagagtataatagacatattgacattagttgtttccaatggttcaaagatactaaaatgaaagcaaatcacaactggactgaaaaggatgtatgggactacttggttgtttccaatggttcaaagatactaaaatgaaagcaaatcacaaccgacgagcagaaaaaacgggtggaagtctgttgtttccaatggttcaaagatactaaaatgaaagcaaatcacaaccagtggtataaggttcttccgcagcagattgttgtttccaatggttcaaagatactaaaatgaaagcaaatcacaacaatatttgtcccgcattccttcaaatggagttgtttccaatggttcaaagatactaaaatgaaagcaaatcacaaccgacgtggtgagagaccgcgcaagaaagtgttgtttccaatggttcaaagatactaaaatgaaagcaaatcacaacgtgcttctgtaaatcagtttggtttttatgttgtttccaatggttcaaagatactaaaatgaaagcaaatcacaaccgaactttgtctgcggcgtgcgtctcttgagttgtttccaatggttcaaagatactaaaatgaaagcaaatcacaaccggtgcgaagtatgccagcgtgatgctgaagttgtttccaatggttcaaagatactaaaatgaaagcaaatcacaactccgtcgtctgtcataaaataacatctgtgttgtttccaatggctcaaagatactaaaatgaaagcaaatcacaacagaatttacaaatcccataaagtagactcgttgtttccaatggttcaaagatactaaaatgaaagcaaatcacaactttcttcccaattttgcatcaaaacagcaaattgtttccaatggttcgaagatactaaaagtttttctacatttaaatatcatttgtccctaaaataacacataaaaaactgcctccacaccagagtgttggagacagactttcttcattaataaaacctataattaatcaaccaaagggaacataaagccttttccgtcattatcatcaaacttagcttttgaaggaagaggcagatgtttggcattgttgctgaaatcccagagcatggtttcgtcctcggtgatttctcctgtgtcaaggttgcgtttctttccgttcaacggataatacagcaccagattctcgtcacttccgtctaccgttttccacatgaactgcttcaactgctgaggtgtgcgggccgtcttccagaaacggatttcacgaaccagctcgttcgcaccgccaatccagaaacctaccagaccgtaaggccctgtacggatttcacggtcggccaccaattccccattcacatatacgtaatttttcttaccgtcgtacacgaaagctatcatgtaccaggtgtcgggctgcgctgtaaagacatccgccggcacgtcaatctgagaaccaccagtcttaaactgaagttggtcgggacggatagtcacgtcaccgaagcgaggatagatttcatcgagtgcaccggacccagacacgagtttggtaccacagatggaacggttgttgctctggtatgcactacggttcaccataacctccatcgtccactggtccaccttgaaatcgtccgggaacatcttggcatcttcactgccgtatccgtcaatgcgaagacacttcgtcttgatgcgctgctccagtacaatcagtgactcagattcactgtcaatcacgggtaccgtaccgcccctcagttttaccggcaaggcgtagcttccctgcaaggagaatttcacatccttgaactttaccggcagatattgcagtgtctgcttggagttgaacaccacttccttgcccacctcatacatttcgggcggaagcatcaggtaatccgttccgtgcttcttgttgtatgcttccagctgctccttgttgccggcctctaccgtcaccgtcttagtatcattttcctgctgtaccagtgatacggtgatagacttcacgtcgacttcctttccttcttccacgaatacctgagaagattcgccagtcttgatgtaagccccctgtgccgaccggtactcactggttgcatccttgtataattcattctggcaggaacaaatcagcaaggttcctgcgaatatgctgaaatataaattctttttcataattcaaattttaatctaacttacccggataaaccacatttcccaagcgcaaggcttctctgagccatttgtaaggaggtgtatttccatagtcgtattccatgtgatacgtaccgatgccaccgatgcgtctgccgtcgggaaggtccagcgtggcataatcaaaaatctgacgcccttccggataagcattgatttccggacgtacgctggtgtaattatctactccacctgtctgccagccttgctcaaactctacggtgataatggtcttccgctcccagttttcaaggtgaggctgattgattttcctaagaacctgctcggtggaacgttcccagtacgcctgataaatatagtggtcgatgtacttggaagcctcggtagaaagtttctcaggctgaccgtccattaccagcattctgccggccggacgcaaacggtctgaaagggttttgataaatacgaacatgttcgtattgcccgaattttcgctgataatctccccgttagccatcgaacctgaatgaccatagccaggttcgtagtctatgtcgaaaccatccagattatacttttcaatcgtatcgcagatggcatttgcataagccttcacaccttccacaaaattaccacctcccttttccacaatccagtaattcttcgggtcttgtcccggaggagtcatctggtcgcccaggtcctgtacaatccaacacagcagcgcttttcctcccttgatttcctggaaaaacttcaagtcttttttctgctcttccgaaaggtttcctcgcgtaccccacaaggatacgaagtctacgctgtcgggtagcatcttcaggtagttctgtgcattgctgcctcgtccggtccagttgccgaaccagccgaaccccttcacatgaggtgtctgacggtattctctcagtttggcaaaataatcgcgcatggagggagtcaggtcggcttcactttccgcctccagcaagggaatgtatttctccaggttctcctggttttcgaacgtttctctttcaggcacgttccattcggaacaggccacgaagcctgccgccagcagcagggctcctgcatatcttatgattcttttcatcacttcatttgtttgacatttccgtaaaactcatttctcatttcggctgtttcggacggttattgcgcacccaccacagcttggttgctccctggtcttcaccacccagcagcgccggcacttccgacatgttggggtttgtaccatattcggccggagcaaagcggaatctttcgggcgtgatggcatcttcttcacctcctatactcacgtaagctttgtcataagccggtttgagcaggtaaggatagccagtccggcgatattcggtccaggcttccacggcattgggatagagtgccaggtatttctgggtaatgattttctgcaacttcacttcgtccgaatccgcatcgttccacttgggagacacatttccggtagaaagcttgcaggaatactgacggttgtaaggcaacatagaccggctgatgtcataaggaaaatctgtaacctccagataggcagccactccacttactccgttttcttcgaacgacttggtaacaccttcttcatacagtgctttcggattacctcctgccagtttgtaaagtgcggcttctgccttcaggaaagacacttccgaagcacgcagccagaacaaaggagaagccgcatcgaccttgggcttggaggctcccgtcttggcagcggagctaagggcattgttgttcgtaggaggaagaggcatgaaatagccgtaagaatcggacgtgaacaaggcactcagacgcggatcgtcatacccctgcatgtaggcccagatggtagctcccaggcgacattctccgtagtcctctacagtcggcagcatggagttcatcagcggtaacttgtccgtactccgtattttggcctcctgtgccacggtttcaatgacacctccgtgagaagggtcaagggcaaacgtgatgtattcctttgccaatgcctcatccttgaaatgcacgcggacggctatgcgcaacatgagcgagttagccagtcgtacccagttggaagcgtttccgttataaatcacatcgtacgacggaagcactttcgatgcggtattgaccagcagcagcgaagcatccttcaaatcggccagcatcgccttgtacacggtctcctgagaatccagtttcggagcaatgtctccgttgccggcattggtatatacaatcggaccgaacacatccgtcgcacggagccaggcagtcaccttgacaatattggctacagcctgcacttccttgtcggcagggtcttccgaattcttcgtatgcttgtagatgtcattccatgcacggaacagtttcgaatagaaattctggtaagcatagctcatacgggcatccgtaaagttccacgtagcctccgtgttgaaattccagttgttgttcatgccccagtaaccgatgtagttaccggccgacatgatgtctgtattggccaggtcgttacccggtcctgtcgattcagtgggcgaaccgatgggaataaccagcttctgcatgtccatgaaaggagccccatacagcagtccgcccgtcttcattccttcttccgtcacaccatagatatttgtattgatctgctcatagttgcaagatgcaagtgccaatacggagaatacaggtatcaaatagtttcttatcttcatattatacgttgtttttcatgatttgttagaatccaaatttaaggctcactccatacgtgcgctggctgggcaacataaagtaatcgtatccctgtccgaaggtaccggtagaagccgtcagttccggatcaaaaggagctttgttgtaaatcatccagaggttggtgccatacacggaaaggttcacgctatggaacggggtacccttgaaccaggaattagggaaggtgtatcccaggctggcctcctgcaggcggacgttggtagcagagtacacattgtacgcatccaggttcaccaccgattcatagtagtcctttggctgaactgccacattgcccaccatgacttttccggcatcacgcgcatcggccgaagcctgcgacacaccgaactggtcgagcacggcctgtgtcttggatatcacgatacctcccagacgggcagtcacaaggaagttcaggttaaagcctttgtaggtaaagccgtttctccagcccaggttccacttggcattgacactgcccagcttgtaaggttccgtagattccgtggtaatggtctgaccttcgttgtacacgatgtaaccgtcctgatcacgtttcaggcgttcttccgcataaatcgtaccaacttcttctccttcgcgcagacggaaacgtcccaccttgatgtcactcaggtcgagtgcctctccggtcacgggattcttcacgttcgaagccagtgcgatgattttattacggttggcagtagccgtcagcgaagtgctgtaagagaacttgccaaaagtctggtcgtatcccagcgtcagttcgataccccggttttctacgttaccggcctgcacgaacatatagtcataacccgacgtttccgacaacttggcttcgagcaactggtcgtaggtattcgatttatacagcgtcacaccgagcgacacggtattgttcagccatttggagtcgatacctacctcataagagcgggttctctccggtttcagttccggaagcggataatacttgaaaggtttgattacacctccttcaatggagtgcgtaatggtgccgggagtcagtccggtgtaaggaataggcgaacccacctccgtataggaagcacgtactttcaggaagcccagcaccggtgaaatggactggcgcatggtttcgggcaacaagtccgtcacaatagccgaaagtccgacagaaggatagaatatccagggcgacttgctgttgaccagctgagaaggcttgtcggcacgaccggtcagtgtgagatacacggccgacttccatgagatttccgcagagccgaacacaccgagattcatcttacggttgtcacctcccgtctgtgaaggtacaccggtagaagggtctatgttatcataagcaaacagattcggcaccttaagcagctgtccgccatatcctcttccttttgtatcgtattcctcgaaagaagcacccacgttgacattggcataaaaatctccggcaaaaggcttcgaaaggttggccataatgtctgcatatttctggcggaaagtctcattcgaataagcataacgtcccagcggcttggcaaacgtaccgtgcgtagaggcataacgcttgtcttccttctccgtgtaggtattatccagacggcctcgtgcactcacgttcaggtaatcggtaatttcatatttcaacgatgcatacagcatgtagcggtctttcacctcaggacgcaaattgcggtaagccacccagtaagggttctgcacagccataccgaagtcgcccggtgtccacgactgcacattgtagcccagctcggcatcatagcgttcgaaatacgtttccttctcaaaattctctccgcgcggatacagataagctcccagaagagggttgaaatacgtaccgtaggacagcatgttgttgtaatactcacgcacgtagctggcagacaagtccatggtcagcttatcgttgaagaacttggtggtatttcgcaccatggcattgtagcggtggtatttgttgttgggcacgatacccttggcattgaccgccgaaccggacacatacgtctgattcttgtcatttcccacagacagattaaaagagttggtaaaagtggttccggtattgaagaagtcggccggattatatgaagaaggtaccggcagtttttctccccacgaggcagcctccccactcacgtttccgtaggtgttctggaagcgcggcagcacgaaaggattcgagaattcagccgatgacgacacgttgacattcacctttccggcagcacctttcttcgtggtaatcaggatgacaccgttggccgcattggctccgtagagtgcagcagccgagggacctgtcagcaccgacagactttcaatatcttcagggttgaagctggcaataccttcactcgacgtgcgtcctgcgccgaagcccgtaccgtcgcctgtgcgatcggcctgattgcccatgggcacaccgtcaatcacatacagcacgttgttgtctcccttgatagacttgtttccacgcatcacgacgcgggtacctccacccacacccgaagcactgcgctgaatgctcacaccggctacttttccattcaggctgttcacgaagttggcatcctttacctttgtcagcacatcattcttcacctcctgcacattgtagctcaaagccttctgtgagcgcttgatacccaatgccgttaccaccacttcatccagttgttcggtatcttccttcatgaccagaacacccagtgtttccttggcggaaaccgtcaggttctgatatcccacgtaagaaatttcaagcgtggccccttcgcctgctgacaaggtaaagttcccgtccatgtcggtaatcgtaccgtttccggtacccttttccagcacactcacccctaccagaggttctccgttgacgtcaacgactgttccactcactgtgattttgtttgcttgcgccgacacctgtacgggagacgcactggctcctcgcggaaggttggcataggccgcatttcctccctgacttatcagcaaaaggaatagcagctgagtagctctttctattttcatagatgatttaagattttgttggacaattaagtttagttatcgcggtttagtggtaccctgaggaagggaatccccctcctcaggtaccggttaaaaaacaatcctgcacaggtacctccctcaactgcgaaaacagtctgcgggctgtatctgtccttcttgtcagttttattcttcgattttagaagaacgctttctctatcctttcaaatgatataatacaggctcgtttgtaatcggccttatgaagtgatttttttctgtagtttagcttaagctcgttcagtttgtgtccgtaaaaacaaggtcggtagttttatcggggtgcaaatatatgcaattttaataaacttacaaacatttataaaagaaaaagagaaaaccaacgatattttcaccgcttgattttctcttattttccgtgattccgctgcgattcgaacgcaggacccacgccttagaagggcgttgctctatccagctgagctacggaaccatccttgtaatttgtaaagctttcagtgattccgct

SEQ ID NO: 1408 - DNA, 14077 bp, synthetic construct
  source 1..14077: mol_type = other DNA
  misc_feature 1..14077: note = Synthetic
ccgaacgtgttccatgtgttcggagaagtatccgtacttaacgtcacatttggaaaaggctttccaggcattgccaatgagtacatgttccagttttcaagtggtgttacgcctaccgtcctgaatcttcctgaaggtgtgaaatggataggaagcagtgttgtcagggccaacaggacgtatcaggtaagtattcttaataatatagctgtgatgggaggtactttatgattttgttaagacgcagattgcttatactggcggccatgaataatggactgcctaatatgccgattcggtttaagaccggcgaaagggcggtattcagtgacgggaagcatggatatttttcgatggacagaagatttgttcgtgataagaacatgtcacgaatgtatttcaaagacgggaaacggattagtgtgctgaagaaaaggaactgaactaaactaaaataaaataaaataggagtgccactgcactccttgtaataaattttttattaaccatcctaccattggcagaactccacaaatatagatgtaattttattatgaacaaaatagattcaataataattcactgttcagccacacgtgctgggctggacattggtaagaaggaaatcactcagatgcacctgcagaaagggttttctacaattggttataattacgttatccggctggatggtacggtagaagttggccgttcgctcactattgacggggcgcactgtaatagcaagggattctcaggtgtgtcgtacaacaaacattcaattggtatctgctatgtgggcggtctggacgcgcacggtaaggcagctgacacccgaacaccggaacagaagaaagcgttagccaaactgattaaggagctttgcggaaagtaccagattgtggaagtgttgggccatcgtgacacatcgcctgacctggacggagatggaatcgttgaacctgaagaatggacaaagatgtgtccttgcttcgatgtgcgtgcggaatatccatttatccaggaaatcattgtaaagccatgaaactattgtattacctaattattgctgcattagccctgttacttatcataagccgtaggaatgatgcaagtagtgtgaataaggatgcggatactattactataacgaacacggtcagaaaaatacaagtagatacaatgtatattctgtctccacagccttatcttgcatggattgataattcagatacgattcatgcaagcgacacctgctatcatctgcgtgaatacaaagaataccgtgatagtagctattatgcaaagattagcggtgtagcaccacgtttggacgaaattcgagtgtatccgcgtaccatctaccagactgaatacatttaccgtgacatcgtacaaaaaaacaaacgctgggggcttggtctatctgctggctatggtatcggtagaaacgggttgtctcctatcttggcggtaacggtaaactacaatttatttcaatggtaattcccatttgctatttaacaaaaaaatattgttagttttgtaacttaaaatcgaattattatttacatttgtctcgttgtaaaaaataataaaactatggctgattttaaggatttagaactgattaaaagctcaaaagaaacagagattgttaattgtaatattttgggtgtaaaagttgcgacaaatggatattgtggtggcgattccgggcatggatcaagaacctattttagattagaggatttacagtttctcttgcttttttagtggcggctatttattttggagttttagttattttaggaggagatgctgaattagaaactttcatacaggctttaagatgggctgctgataatttggaagaaatggcaaaaaaataaagtgtctaatataaatgactatctttgtcgtgtagaagtttgcttttattgcaaacgaaagccccaaccagattaatatccggaaggggcttttattgacttatactttaggctattttacattaaaagatacaagcacttcacgcggtttacccttgtaaaattgatatacatagcactccaccatttcgcctttgtacttttggagtctcttgtataaatactccttcacttcaaccttacgagagaagtaaagattctgttcgctaaagacaggttcatctgccccaacccaagcttctaacgagcatgggcatttgttgataattcttttcatattacaataaatattatgtagtggctccattgcctcatacataacataacagataaagtgtcagacaaattaccctctcatcatcataatatcagacctcagttcgatatattctttgtacttttccgggttgttcacgtaatcaatcacacgagatatggccatatcagcctgtttctgccggactttggtgtagtatcgtataactccttttgatttgtctgagtggcctaagcagtagtctattatcccgtcaggaatacctatttcagaggcgtactgagcgaaagacttgcgggccgaataaaatgtaacacgttcatcaatatttaactcttcagccaaatctccaagagaatacgtaacatactgagaaaagttgtgatatgtgaatttatacccaaaatcaagtttccccgtccttttatccatccacctgcatattatctctcttgcttgagacggtattgtaaatgtgattacactatccgactgcattcgccctttagtctttgagcgtgaatattccaatacatcttttctaaagtctgtttgcataatgtctataagattcatccctcccaggtaaaaggaaaggcaaaaaaggtcacgtgccataatcagctttcttttttctggtgaagattcacgaatcttgttaaaactctgtactgtcaaatcaagcttcctgataggggctgcagatattcttgttgttacaaaaggatgtatatcgtaagatatattccactctcttatcgctctgttgatgacagatttcatctgggcgagcattgtgtttactgtggtttcagtcacttttcgcttccgtatgaatgcagcaaaattctggactagtgatggggttaaatctgagagaagtatgtcacctcttgcaaagtcacgaaaatacctccccaccctttcaatagacaatgcgtatgaatctcttccctcagacttgagatagtctacaaaattgctacatgctgatgaaaaggtttgctcatcggaaagattgtctgtagaaatgatttctttaatttgccggcaggaataaagttcaagatgttttattgagtccagtttctcttgaaggtcatcaaggatgttcctaagtttccggtttatcgcagatgcctctggatgcttcacgacctgaccgttcttaaactggttctctgaaataatgaatcgtgtgacgatatatgttgtttcatgcttgtgacggagtgcaattcttatcttatgtcttccgtcttttaatgcttttgccttgaaaatggtaagtgatagagttgccataatgattaaaaaatttaaggatactccagggatactcacagaattgtaaatttacaattcaaatccttttttttaatcatcgtaataagcagtagaaaatagaaaaaccgcctaattcacaatgtaataagcggttttaagtcggagccgaaagcgggactcgaacccgcgacttactcattacgaatgagttactctaccaactgagttatttcggcaacgtgtttcgttgaaaacggttgcaaaattactcttttcttgaaacctgccaaataaaaaagagatttttttccgaaaaactacatttttccggcccgtacaacccgtttccgttacatcacaagagcatttgacacattattacgtgtaatttgtacaatagtcccttgtctgccttctgccgattttctacttttacccgcaaaatgaaacattacactaccatgaaaaagaaactgataatttcactgctggcactggcttcgctgggagccggagcacaaaacttgcaaaagggagactacggatacttgtactgccacatgagcggacgaggagaatggacggcctacgccctgagccgtgacggcgtacactttcacgacctgattgatggcgaccccgtatacaatgtagaagaaatgtcaaaaatagagggaggagcacgcgatgcctttatctgccgtacgtccgacggaaagggctacctgatggtgactaccgacatgagcaacgccaagagccgctcgtggttcaactacggcatcaacctgctgaaaagtgacgacctgattcactggacttctaccaccttcgacttccgccagggaccggacattttctgtgaccctcagtcgcccgacgtctataaggactacagcaccatcaaacgcgtatgggcaccgcaaattttctgggacccttcgtacgtatgggccgatggcatgaagggcggatacatgatatactattcactgcttaatccggcagaagaccagtacgaccgcgtgttctattcctatgccgacgccacctttacacgtctcactaaaccccgcctgctggtggactggggatatgctaccatcgatgccgacattaactatgtgccggccgacggactctatcacatgctcatcaagaaagaaggaggtacacccggcatctttgccgctacagctacaaaactgaccggtccttataaaataaaagatgaaaacgactatgtgaagtttgaaggcaacaaaaagtgtgagggctgctctgccttccagttggtgggcgactctacctggcgcgtggcctacatcgaatactcctccaagcccaaaagatatcgcatctgccaggccgatgaaaaactcgccaacttccactcccccgtcaccatggagggcgtgaaacatccgcagcacggctcgttcatgcgactcaccgaagaagaatacaagcgcctgcaagagtggtcggacagcatcatgcgcgaaagagccgcccgaaacagcggagaaaagaaataaaaagaggaaaatgaaatatttttgtaaaaacttttggcaaacatcctttcatttgagcagaaaacattatctttgcactccgaattatgacgtgacaaaagagtttgatgtattactgtataacacatagtaaaaagaataagcgcacattcggagttccggcggaatggacaaatgccggaagctatttcttttttcttttatgtcacttatttcctgaatatttaagatttcctattttttcaaacacccggaactgcttttcggcaagtccgggcgttttttcgtatatacgagagtagaatagaaaaaatacaagatataaagattattagtaacaaggtaatgagaaatgtaacattgatcctcgacgacgggagccgctttcatggcaagtcgttcggctatgagaaaccggtagccggtgaagtagttttcaatacggcaatgaccggataccccgaaagcttgaccgacccttcgtatgccggtcagttgatgacactgacttacccgctggtaggtaactatggtgtgcctcccttcacattcgaagcaaacggactacccactttcatggaaagcgagaaaatccatgccgaagcgattatcgtaagcgattacagtgaaaaatactctcactggaatgcagtggaaagtctgggcgactggttgaaacgcgaacagattccgggcatcacgggcatcgacacacgcgaactgacaaaggtattgcgcgagcatggagtgatgatgggaaaaatcgtgttcgacgatgagccggacaacattcccgaagctacctatgcaggtgtgaactacgtagacaaggtttcttgcaaggaagtgattcgctacaacgaaggcgaaggcaagaaaaaagtagtactggtagactgcggcgtgaaatcaaacattatccgttacctgctcaagcgcgacgtggaaatcatccgcgtgccttggaactacgacttcaactctctgcagttcgacggtctgttcatctccaacggtccgggcgaccctgacacctgcgatgcagccgtgcagaacatccgcaaggccatgcagaacgaaaaacttcctatcttcggtatctgtatgggtaaccagttgctttcaaaggcaggaggtgccaaaatctacaaactgaaatacggtcaccgcagccataaccagccggtacgcatggtaggcacggaaaagtgcttcatcacctcacagaaccacggttatgccgtagacaacaacacactgggagccgactgggaaccgctcttcatcaacatgaacgacggttcgaacgaaggtatccgtcacaaaaagaacccctggttctcggctcagttccatccggaagctgccagcggtcctaccgacacggaattcctgttcgatgagtttgtaaagttgctgtaatccactaaaaaacaaagaagacaatgaaagaaaacataaagaaagtattgctgttaggttcaggagccctgaaaatcggtgaagctggtgaattcgactactctggttcgcaggctctgaaagcgctgaaggaagaaggtatcgaaaccatcctgattaacccgaacatcgccaccgtgcagacttcggaaggtgtggcagacaaaatctacttcttgcccgttactccgtatttcgtagaaaaggtcatcgacaaggaacgtcccgacggcgtgctgctgtcattcggtggacagactgccttgaactgcggtgtggctctctacaaagccggtgtgttcgagaaatacaacacccgcgtactgggtactccggtacaggccatcatggatacggaagaccgtgagctcttcgtacagaaactggacgaaatcaacgtgaagaccatcaagagtgaggcggtagaaaacatcgaagatgcccgccgtgcagcgaaggaactgggttatccggtcatcatccgtgcagcttacgcactgggaggtctgggttcaggtttctgcgacaacgaagaagaactgaacgtgctggccgaaaaagcgttctctttctctccgcaggtgctggtagaaaagagtctgaaaggctggaaggaagtggaatacgaagtagtgcgcgaccgtttcgacaactgtatcacggtctgcaacatggaaaacttcgacccgctgggtatccacaccggtgagtctatcgttatcgctccgtcacagacgctgaccaacagcgaataccacaaactgcgcgaactggccatccgtatcatccgtcacatcggtatcgtgggtgaatgtaacgtacagtacgcgttcgaccctgaatcagaagactaccgcgtaatcgaggtaaatgcccgtctgagccgttcttctgcactggcatctaaggctacaggttatcctctggctttcgttgcagctaagttgggattgggttacggactgttcgacctgaagaactcggtaacaaaaacaacttctgccttcttcgagccggcactggactactgcgtatgtaaaattcctcgctgggacttgggtaagttccacggcgtagaccgcgaactgggctccagcatgaagtcggtaggtgaagtcatggccatcggacgtaccttcgaagaagccatccagaaaggtcttcgtatgattggtcagggcatgcacggtttcgtggaaaacaaggagctggttatcgaagacatcgacaaagcactgcgcgaaccgaccgacaagcgtatcttcgtcatctcaaaggctatgcgtgcaggctacacagtagaccaaattcacgacctcaccaagattgacaagtggttcctcgacaagctgatgaacatcatgcagacttctaaggaactccacgagtggggcaacaaccatacacagctttcacagcttccgaacgagctgctctacaaagcaaaacgtcagggattctctgacttccaggtggcacgtgccatcggctacgaaggcgatatggaagacggtatcctggaagttcgtaaccaccgcaagagcgtaggcatcgtgccggtagtaaaacagattgacacgctggcagccgaatatccggcacagaccaactacctgtacctgacttacagcggcgtggccaacgatgtacactacctgggcgaccacaagagtatcgttgtactgggttcaggtgcttaccgtatcggttcatccgtagagttcgactggtgcggcgtgcaggcactgaacaccatccgcaaggaaggctaccgctcagtaatgatcaactacaaccctgaaaccgtatcgaccgactacgatatgtgcgaccgtctgtacttcgacgaactgactttcgaacgtgtgatggatatcctcgacctggaaaacccgcacggagtcatcgtatctaccggcggacagattccgaacaacctggcattgcgcctggatgcacagaaggtaaacatcctaggaacttctgccaagagcatcgacaacgctgaagaccgcgacaagttctcggctatgctcgaccgtatcggcgtagaccagcctgaatggagcgcactgacttcaatggaagacatcaacgcatttatcgaaaaggtaggcttccctgtattggttcgtccgtcatacgtgctttctggtgcagccatgaacgtatgttctaaccaggaagagctggaacgcttcctgcagctggccgctaacgtatcgaagaaacatccggtagtagtaagccagttcatcgaacacgccaaggaagtagaaatggatgccgtggcacagaacggtgaaatcgtagcttacgccatctctgaacacatcgaatttgccggtgtacactcaggtgacgctaccatccagttcccgccgcagaaactgtacgtagaaaccgtacgtcgcatcaagcgtatctctcgtcagattgcgaaagagctgaacatctctggtccgttcaacatccagttcctggctcgtgaaaacgacatcaaggtaatcgaatgtaacctgcgtgccagccgttcgttcccgttcgtcagcaaggtgctgaagattaacttcatcgaactggctaccaaagtcatgttaggcttgccggtagaaaagcctgaaaagaacctcttcgacctcgactacgtaggtatcaaggccagccagttctcgttcaaccgtttgcagaaggccgaccctgtgctgggtgtagacatggcttctacaggtgaagttggctgtatcggcgacgatacttcatgtgccgtactgaaagccatgctgtctgtaggctaccgcattccggaaaagaacgtcctgatgtctaccggtacactgaaacagaaagtagatttgctgcaggcagcgcgcgccctcaaggccaaaggttacaacatcttcgctaccggcggttcttctaagttcctggcagaaaacggagtggaaaacacccgcgtatactggccaagcgaagaaggtcagcctcaggcacttgaaatgctgcacaagaaagaaatcgacatggtggtaaacattccgcgtgacctcactcctaccgagttggaaaacggatacaagatccgccgtgccgcagtcgacctgaacattcctctggtaaccaatgcccgtctggcaagtgcattcatcaatgccttctgctctatgagcattgacgacatcgctatcaagagctgggacgaatacaaataatccgtaccgcttaaaaatatagataaaattaatcccctccggaactatttgtaatgaatgagttctggaggggattttttatttatagaaaaataagacaataaaaaagcccaccgataaaggacgatgggcaagcgcctaaatgttttcacaacggaataatccttattgtgatttgcttcattttagttttacaaaaataaaaagaaacaacacaaaagacaagttttttcataaaaaattagtagttttgagaaaattgaaaatacaactatgaaacatattttaggtttagacttaggcacaaacagtataggatgggcagttatcaattcaaactttgacgaagcaacccaaaaagaacaactaaaaggtatagaggcagcaggaagcagaataattcctatggatgccgcccaattaggagacttcaataaaggaaattcagtttcacaaacagccaaccgtactcaataccgcagtacccggcgattatatgagcgaaaaaaacttcgcagagaaaggctgcaccgcgtattgcaactattgggcttcctcccatcccattacgctggccaattagaccgatatggaaaatttatagctaactcagagccaaagttagcttgggaaaaaggcgcaaataatttatcctactttatctttcaggaatcttttcaggaaatgctgaaagacttttcacaagaagatagatgtactaaaaaagtaccgtatgactggacattattctatctacgcaaaaaagcccttacacaaaaaatagagaaagaagaattagcctggattcttctaaatttcaaccaaaaaagaggatactaccaattacgggaagaagaagctgaaaagtccacttccaaaacacgacaatattttgacagccaaattgtaatagacatcgttgacacagaagaaacttataaaggattaaaaatatttaccctcactctagcaaatggagaaaaaggtaaatggtatgggaaaaacatacccgattggaaaggtcaaaagaaagaaatcattgtaagcatagacctggataaaaatgggaatgacaaatgtgatgagaacggagaacctgtcagacactttaaaattcccacagaaaaggaatgggaagaacaatggggacttgtcaaagctaaaaccgaaaaggacctgaacacttctaaaaagacagtaggcacttatatttacgatacattattacgaacccccgaccaaaaaattcggggtaaactcattcgcaccattgaacgtaagtattacaaagatgaactctatcaaatactaacgacacaagaaaagtttcaccccgaactaagagatggaaacctgttacagtcttgtattgaagagttgtatcacaacaacgaagcacatcgcaatacaatttctaaatatagtatgtccaaattactcgttgaggatgtcatattctaccaacgtccactgaaaagcaagaaatcactcatcagcaactgcccgtatgaagagcatacttatgtagataaggaaacaggggaaatccatacagcttctgtaaaatgtattgctaaatctcatcctctttttcaagaattccgtctttggcagtttctgtccaatttacgaatatatcaaaaagaaggaatcctcaatggtaagttcaccactgacatagatgtaaccaatgaatttctgaaaaatgcagacgattatacgaatcttttcgactggctcaatcaaaagaaagaaatcaaacaagatgcatttctcagatatccgccatttggattaaagaaaaatgtggcaaattatcgctggaattatgtggaggataaaacatatccttgtaatgagacacattctaggatattgctctattgggagaaagcaggtatagatcaatcgattctgaccaccgatatagaagaaaaactctggcatatcttatattctatttcagataaaaatgagctccagaaagcactgaaacattttgctgataaaaacaagttagaagataaatttgcagatattttccaacaaataccaccattcaagaaagactatggttcctactctgccaaagccatcaaaaaactgcttcctcttatgcgaatgggaaaatactggcatctagaatcaatagataatgcaaccctcacccgcatccatcaaattctgaacggagaaatggacgaagcaacggcaagcagaataaaagaaaaatacatccatttagataacttctcttcatttcagggacttcctacatggttggcatgctatatcgtatataatcggcactctgaaataaaagacatcacgaaatggaagcaaccttcagacattgatgcttacatacaatcgttcaagcagcattcactgcacaaccctatcgtggagcagattataatggaaactttacgtactgtacgcgatatatggaaacaaatagggcatatcgatgagattcatgtcgaattaggacgtgagatgaagaatcctgccgacaaacgtaaaaaactcacccggcaaatacaagaaaacgaaaataccaatctgcgcatcaaggcacttctcactgagtttgcaaatccggagtttgaaatcgaaaatgtacgtcctcactctcccagccaacaagatttattacgcatatatgaagaagaggtcttaaacgaatcagctaaaaatatgccagaagatatagtcactatactaaaaaaattcaatgagacagatgcaaaaaaacgtccgtctacttctgatgtattacgctacaaatgctggctggaacagaaatatcgctcaccttatacgggagccatgattccattgggtaaattattcactcctgcctacgaaattgagcatgtcattccaaaatctcgttactttgacgattcattcacaaacaaggttatttgcgagacagcagtaaacaaattaaaagacaacatgttaggttatgagtttataaagaatcattccggacaaataatagaactaggctttggacaaaaaatacaaatacaaaccgtagaagcctatgagcaatttgtaaaagaacactactcatacaatcctgttaaaatgaagaaactattgatggaagatattccagaacaattcatccagcgtcagttaaacgacagtcgttacatcagcaagtttattaaatcactattatctaacattgtccgtgaagaaggagaatctgaggccacttccaagaatattattgtttgtaatggaagtattaccgaccgtctgaaaaaagactggggggttaatgatgtatggaataaaattattctacctcgtttcttgcggttaaatgaaattacgaacagtgaccactttaccacaaccaataccaacaataagataatccccaccatgccattagcattacaaaagggattcaacaaaaagcgtattgaccatcgccatcataccatggatgccattgtcatagcctgtgccaatcgcaatatagtcaattatctgaataacgaatcagccagcaaaaatgcaaaaatctcacgtatggatttacgtcagattttatgtaaaaagacagaacctgacgcattagggaattatcaatggataataaacaaaccgtgggaaacatttacccaagatgtttatgcagttctagcaaatatcattatcagtttcaagcaaaatttacgcatcatcaataaaacaaccaaccattatttccgttatcaaaacgggaagaaagtacaatgtgtacaagaaaaaggagacaattgggctatccgtaaacccatgcacagagaaacattctatggagaaattaacttacgtaaagtaaacactgtgtcactgaaagtagcgctagaaaatccacagagaattgtagaaaaagatttaaagaaaaaaataaaagaattattgcaacaaggactcagcgaaaagcaaatcaaaaaatattttgaagaaaacaatgttaaaattgcacaaaaaataacgtcaaaaaactaacaaagtatgagaaggtgatttgacaaatggccattgggctggtaaaataagactcgctcaacggaaccaacagacgttgcagcgtttaaaatttatctggatgaagtaaaaagccgtcttatatacggcgcggcgcgggcagatggggtccgggccgggagggtaactgcaccctccgcagcggagtccaaattgtatacgatgctcgattttaccaaaaagagggcatcgtatttgattgtggggccagatggcttctgcccgccccgcagtccgggcggccggggcatgaaaaacatgtccgcagccgcagccaattttgaaaagaga

SEQ ID NO: 1409 - DNA, 14031 bp, synthetic construct
  source 1..14031: mol_type = other DNA
  misc_feature 1..14031: note = Synthetic
caactatttaacattgaataactatacaactaactgatattaaccacattgactttctttaattcaaataaattattttagaaactgatatgaaaaaaattatttcaacctccaacgctccggcggcaatcggaccttacagccaagctgtagaaatcaacaacacgctttatctttccggacaaatcccaatcaacccgacatcagggaaagtagaagcaaccgatgtttcaggtcaaacggaacaaattttcaagaacatagaagctgttctctacgaagcgggatattcttttgaaaatgtagtaaaaacaactgtttttctttcggatatggcgaattttgcagaaatgaacgctgtttacggtaaatactatgaaaccaacagtccggccagatctaccgtagctgtaaaaggattaccgttaggcgtgctcgtggagatagagacagtggcggcaaaacccctctaaatctccccaaagaggaggctttaagaagctccaatccccccaatcccgttttccctttgagggaaaaggggattacagtaacgcatttaagtgattcattgtaaataatttgactttcgcaaaccactcataaagcttccccatcggctactgatctatgttcaagtattggggagttttgagtgacttttaggggttaggggtagttatcaccacccattttccctcagttattgcctgctcattcggtgcatacatggctccgcacgataccggcggaaggtagaatactccacggtaagcagcctgcaaacgaactgaaaatgttttggtttgtccggcagcaaggttgaaataggtgagtacgcggtcatcacggatatcacggtagttgtaattttcattgccggtagagcttccgtttatcagtctttcgttaaaaatttcccatcccgatgggaatatctgcaccaatgccaagtctgtgaatgcttgtacccgagaattttccacgatcacagtggcgttaaattccgttccttgcttcaaggaatttacatcaatcgtgtttccggcaacatctgtatagtgaactttaatgctaaaagacgcctcttgaggttgcacatcgataatttcgagtggttgcgtttgagcggtaagacgagcataaaccattgcagtgccctgattcgttatatttgtcgaaagattttctgccggctgtaattctatgtgatggaacggctgcggtgtgttaacggttttcattgactttccgttgagcgaccatttcacatcaatattccctttgcccatctttttagccagcttagccatagccgataaaccaaaggaagccgtctgagtggaaacatactctctcgacaatgcctgagcaaccgttttggctaattccaacgccttttcggtttgacctaaaagcaaataagtttccatcatcatcgactggtcacgcgccggacttccatatgtatcattattgaatgaataatcgggaacatcagtcgaagtattgaatatcagctcattcgccacgtcttttttacctgtcaagacataggctgaagctaattgccatcgggcttgcagattcaagtcattcatttcgcgaagacgattcatggctcccggttccggtttttcagccaaagccaacgtgtatagtcggtaggcttgctgaagctcagtgaaagacatgctataataatgacgataaggattagtctttgtccagtttttagccaatcttttctggaaatcaatccatctatttatcacataatcagagacttcatatcctttacttttagcttctattaaaaaatgtcccgcgtaagaagatgtccattccgaggcataattatttcccgaccagtacataaatccgccatccgatagttgacgagaagatagaatccgaatcacttccgatattttctcggaatagatttttttctcatcatcggtagttgagataagttcatcaatgtaaagaagtggaaatccttgggaagtaacctgctctgtacagccgtgaggataggtaaggaggaagttaagatttttattgaaatgaatacttggcaatcgtgaaagttcgagtttcgcccaatcatactgcccgatattctccattttcactgctaagtcaaccgatttccccggatcaatcaacatagtctgtgaaagaatcaccggaggatttggattacgaatgccaatgttgatagtttcagtgaatgtttcgccaccacccgatgatttgatggtaatctcttcttctcccgttttttcacctgctttcagcttgaagtaaacgattttatcgccttgcttatcaaacgaaacggttttcgacagaccgtcagcagcttgtaacatccctttggtctgaatagaaacattcacatttttcactttattgtccatcgcgaagacattgaccggaagatatacctcttcgtttggtccaaggacacgtggaagcgtagatagtgtcatcaaagcattgcgtacggcaacggttttttcagcacttccgtaagcaccgtttcctcccgccacaaccataacacggacagaaccaacgtaaggcggaagtttgattttgtgtgattttgtttcaccgctttttatagtgaatggtcctatgaatttcaccaccggtttgaagcgattcactctatcgctcgaagcttttaatgcctcatcgccgccgatacttagaagtggtcccatcataccgctgtttgcgccaaacacacggtcaaataaatcccaagttcgcacacctaacgcttcgcgcgagtaaaattcattccagacattgggtgttttgaatgcagtaaggtcaagcagtccatcatccacaatagctaaagtgtaactcatcggtttacgagatttctcggaaacggaaaccgtgaattctttctccggccgtagttcattgggcattgtaataagaggagtaagtttactctctttattctcaatattcaaattgaccacgccatacatcctgatcggcaatccatttactgcctgttggtgtggctgcagtagcgttgcaaaaacatagcaattcggattcatttcttcagtaattttgaaggaatattttgtatcttccttatcagagacatcaatccactcacgctgaataatacctgtaccgttttcgatactcacaagcgcacgacctttcgagcttttcggtataaataccgtcgctgtttcacctacggaataaccgtctttatctgttgagaatgaaagcatggtagctccgctcgggtcggttttattggatcgaccacgccaagaaggccaatctacgtaaaaaattgttccggatgtatgtccgctttcatcggcaactaagagaagatatcgcccccaatcgggataatcaacttgaaaattgattttcccactaccgtttttcatcgacacatttcctttatcaatcggtctaacagccgtattatttacatatgaacctaaattttcttgtgtagagttccaccaccaactccactccaacttaaagactctataagtaaggtttccttttgcggttttttgtccgtttttatttaaagtaactacgtcaaatacaacaggcttatctgtttccagaaactctccttttcttgctgacggtgatttcacacccacataggtgctgtatggtgaataaaatacagtttgcgaataaaagctcatatcgccacccgtctcaaaaacacgagacaacagatttccccgaagcatacccggagccatttcggctaacggaattttggcatttacacccgctactccggcactattcaagatcccatcgaaaaccttgtagtttgccgattcaaatttgattaacggattgttaaaattgtagtcggcataggcgctgaaaggattgttggttttggaaagggtgagttctacatcggctctaagattggaagcaggcgaaccgtgaagccactccgacttgagcgtacccgaaatagtaccttggcttgcatctattatgctatcagtttcaaaacggattttcaaccggtttggttttattgtttcaacacgaagtcctttgtagaaagaagttccaccaaccttaacatatgcttgccaggtacctgtttcggccatcggatcggtgggaatgacaaaagtataaaagccgttttgattgtcggtttttacttggcgttgataaaactgccgtttcggcgtgaaaacttccaatgagaccggatgatctttcgggaggttttgagttttgtcctcgagaataaaagtaaggtaaatcgtgtcacctggacgccaaacgccccgttcaccatagatgtagccttttagtccggcttgaatttcttttccgcttacatcaaaactactcatcgaaagcgatgtttcgtctttcacttcgaggtagccggcatcttttcctttctcagctttgagcacaaacggcttggtttttccggtttcaatttccaaaaatccgttgccgtcggtatttccattcgcaatgggctgcatctggtagttgaaaacagtaactttagcacctgaaacaggcttggtagtgatgatatcagttaccgccacaaacatccggttgtcttttcctgctttggcaattatcccaagatttgatgccatgaccactgtttgcacactgcgattattgttcatataataggacggcttacatggattatcacgatcttcccaattgtaatcccaccaattatagtcattataatcatccgctccgacagcatcccacttggcttgatcttcatccgaaaactcattgaaaccatgcatggaaataccggaaggtatttgcggttttacgcctccacagcggtaaagcgagtattcctgcttcatatttagctgaacgatgtacatcgctccgggatcttgatcaaaaagggtggaaagatcgatggagaaattattccaactattcaaattcatacttttgtcggaatcaagtcgaatttgtttctgaataattacacgtccgaatcggcggatttcattttgatattcattcccaaaagaattggattgaagataataaagtatgttgttttgataaattttagttacgcgtacatccactgcccaaaggttaactgccgaaaatgggagaaacaactgggcggaattgggcaatatatttccattggagttaatcttaatttctggcttgtcgctttctatcgcgagcaaaaatgaataggacttatccaaattcaatccttcactgctcctcaatccgctgtcaatcttcacattgacctccttttcggggaaaacctcaggaaaaatacggatgacgtttttatcaatctgaaatgtaaaattttgtattccctccggaacaattaagccctgaatatcttgcccttgcgccataggatcacttagggtgattcgtaaatgaggagaagtacgctgtgccaaacgaacatcaattaccgaaaaataatctttcgacaacggaggtatttctatcgtaaatttttgtttcttatcggctcctacagaatttccgtttacggtaacttcgtatttcccggggttagcagttctggggatattatcaaggaaaactcgaaaattgttaccgctattttgttcctgcaccacacggactgagacatttttcggcatgttgcccaattcaatcatctctttaacctgatccgcagttcttgcgttggcgagattcaactccaactccactgtgttcttggtcaagtcagcaattgacattggcgagtacggatagatatacgcagtgaaattctgcttatttacccgaacgggaaattctaaggttttgaatttgttttcgacctgaagaagtttgttcagatgaaatttcacatcgtaggttttacccggtttcagcgctcccgcttcaggtgtgaagcggagggtgttactgtttatccacactgtttttccttttacggtgggagaaaatgagaagagcttttcgggcacttcggcattcagctccacagcgggcatttcttgcgtcagttccacctgaatgtacgactctggcgagatatttccgtaagtgaaagcagagatgtaccgggagaattcggggtcgatagacgctgtagtttttttactgcatgattggaaggagaaaatggtaattgtgctgatagcgagaattaccgataaacagattcgacttggtttcataattctacattttaagtggatcgaaaggaaagttttgtaaatgtagaaagaattttttgaaatcgggcgagaaaggtggagaatttaaaagaattgagaaattttgagctaaaaaaatgccccgcagataggcgaggcgctaaatgttttcacaacggaataatccttattgtgaattgctttcaaaaatttgtatgttgcaaatgtaaataaataaatttgaataaaaaagtttttttatgttaaaacaaatttttacctttgaaaaacctattttaaaaacaaataatactatgtatgaatagagccgaattccttaaaatcatgagtgtcggagccggaagttttcttttctccagttttaatttggatactgaaaacctgaaatacgatttgaaaaaagttaagatttatgacaactatgttaggggcgtaaattttaggaaacaggactttttttcggcagcgcttaaagtgaatgatccgctacaattgcaacgcgacgtggaaaacgtttacgacagctatgccattaaggtgctgaaaaacagccaattcctcggctacattgccgcgtatgaaaatattgttatggctatgctaatggatcaaggcgtacaactggaggccagcgtttgcaatattcgtgaagtaatagacgaaaacaaatacctcgataaggttttttcagtacaagtttttgccaaattgcttgtgccgtttaatcatatcggttcaaacgacttgaggacgaaacgtgcagatgacgcgaaagatatttatagaagtgagaaatattaaaaacatagattcatgaaaaccattttaggcttagatttaggcaccaacagtattgggtgggcgttgattcgccataattttgaaaataaagaaggtgaaattttgggaatgggaagtaggattattcctatgtcacaagatgttttgggaaaatttgattcaggacaatccatttcacaaacagcagagagaacaggatttagaggtgttcgtcgattgcttgagcgagatttacttcgtagagaacgactacatcgagttttgaatattatcggctttttgcccgagcattatgcgaacgatatagattttgaatttcgtttagggcagttcaaagagaataaagagcctaaaatcgcgtataaagaaatttcccctaagaaatttgaattcatctttcaaaacagcttcaatgagatgcttgaggatttcaaaactcaccaaccggaactcgttgaagatgggaaaaaagttccttacgattggacgatatattatttgaggaaaaaagcccttacgcaacgaattgaaaaaggtgaacttgcttggatattattgaatttcaatcaaaaacgcggatattatcaattgcgtggcgaagacgaggaagtggatgcatcaaaatcgataaatttttatgctctcaaagtggagaaggtagaagaagctgaaaagggcaaaaataatgatgtttggtacaatgtgcatttagaaaacggatgggtttatagacgttcgagcaaaacctttttagattgggagggcaaaataaaggaatttatcgtcaccgaaaatctgaacaaagacggcacaataaaagtggataaggaaggtaaggaaagcagaagctttaaagcagtcgattctgaacaagattggattgccataaagaaaagtacagaagaaaaaattgaaaattcagataaaactgtcggagcatatatttacgatacgcttctgcaaaaacccaatcagaaaatcagaggcaaactcatacgcaccatagaacgtcagttttataaaaatgaactaaaaaagattctcgaaaaacaaaaagaatttcaccctgaattacaagacaggaatttgtacaactcctgtttagaagaactttatgcttataacgaagcacaccgcagaagtatagccgacagagattttacttatctttttttggatgatattattttttatcagcgtccgttgaaaagcaagaaatccctaatcagccaatgttcgttggaaacaagaacctaccgttcagacgatggaacatacaagacggaaggcgtaaggtgtatagcaaaaagtaatccattgtatcaagaattcagactgcttcaatggatgaaaaacttgaaaattttcagaaaagacgataccgaggataaggatattacagcagacctgttgactgcaaatgattgggaaaaactgtatgagtggttaaacgataaaagtgaaatttctcagatagaattattgaaatatccgtcttttggattggaggaagtgctaaggaaagaaatcggtcagggcttgagaaaagtaacaaaaaaagaaatagaggaaaaattgttggagaaataccgttggaattatgtagaggataaagtatatccgctcaatgaaacccgtggtgaaatattgaaaagactgcaaaaagcaaaaattccatttgactttctaactttcgcaaacgaattgcgtttgtggcatattctgtattcagtggaagataaaaatgaaattgaaagtgctttgaaaaaatatgcggaaaagaatgaattaccagaaagttttgttgaaactttcagaaagttcccaagaattgacaaagaatatggctctttttcagaaaaagcaattaagaaattattgcccttgatgcgtttcggaaaatggtggaacttctcagcgattgatgcaaaaacgaaaggtagaattgagaaaattcaaacaggagaatttgacaatagtattaaaaatcgcgttcgtgataaagccattcatttaacccaaaatgaagattttcaaaatcttccgctttggttggctagctatatcgtgtacgacagacattcagaaagcgccgatgtccagtattggaacacagcagacaaaatagaattattaaaacagcactcacttcgcaatccaattgtggagcaagtgattaatgaaacgctacaaaccgttcgggatatttggaaagagtttggcgaaggaaaagaaaagtttttcgatgaaattcacgtggagttaggtagagaaatgaaaaatcctgccgacaaacgaaagaaaatgactgagcgtattaccgaaaacgaaaacaccaacattcggctcaaaaccattttgttagaattgttgaatgacggcgacaccaatgttcgtccttactctcccatgcaacaagaaattctaaaaatttatgaagaaggcgtctatggtagcgaaacaagacaggacgagttggatgaaattgataaaattcgcaaaaaagcacaaccctccttatcagaattaagacgctacaaattatggttggagcaaggttacaaatcaccctataccggtgagataataccgctttcaaaactgtttacgccggcttacgaaatagaacatattataccgcaatcgcgcttttttgatgacagtttaagtaacaaaattatttgcgaaacagaagtcaatgaactaaaaggcaatcaactggcttgtgagttcatcaaaaacaataatgagcttaaaatagaacttagtcacgggaaattcgtaaaacttctttcgccggatgcctatgaagagaatgtaaaacgatattatgctaagaacaaagccaagctacagaaacttctgttggaggatattcctgaaaaattcattgaacgccaactcaacgacagccgatacataagcaaagtggtaacagccttgctttccaatattatgcgacaagaaggcgaaagcgaaggaactgccaggaatgttatagtatcttccggaggaatcactgcaagattaaagcaagattgggggttgaatgatgtttggaacactttgataactccacgttttgagcgactgaacaaaatggcaggttatgaaaagtacggttcgtgggaaaataaagacggaaagaatgttttccaaatcaacaccatagaaccggaactgctaaaactcaacaaaaaacgaattgaccaccgacaccacgcattagatgcactcattgtggcttgtagcagcagaaaccatatcaattacctaaacaatcaatcggctgcaaaagataaaaaatccgagcggtttgatttacggaacaagttgcgacatatagaaacctatatcgacaaagatgggaaacgacgaactgctgccaaagaatttttgaaaccttgggaaacctttactcaaaacacgaaagaggaacttcagaaaatagtggtaagtttcaaaaagaacaatcgggtaatcaacaaaaccgtaaataaacaccaaaaatggatcaaacaacctgatggaactacgaaaaaagttttcgttacccaaacaaaaggcgatagttgggcaattcgcaaaccgttgcataaagacaccgtttcaggattagtgaatttacgattaaaaaaatcaatcacattagcagccgcattagataatattgaaaacattgacaataagtctttgcgtaaaaagattcttgaattgcaaaaagcaggctacaataaaaagaaaatcataaaatattttaaggataagaaaaacgaatggctgggagaagatatttcaagagtggaaatttattatttcaccaatgaggcagaatcaaccaaattagcagcgtctcgcgtaaaactagatgaaagtttcaatgaaaagcgcattgaaaccattaccgatacgggtatacagaaaatactattagcgcatttggagaaatataaaggacaaactgatgaaaaaggaaaagaaatcccggcccaatcactcgctttttctcctgatggtttggatgaactaaataataatcttactgaattgaacggaggaaaacctcatgcacctatttataaggtaagaacatacgaaaaattaggcaataagtttaatgtgggagtttcaggcaataagaaagataaatatgttgaggctgccaaaggaacaaatcttttctttgccatttatgctgacgaagaaggtaacaggagctacgagacagttccgcttaatgttgtgattgaacgccaaaaacaaggattaccgtcgtgtcctgctacaaatgacaaaggagaccgtttgcttttcgatttatcgcctaacgatttggtttatgttcccacacctgaagaaatggaaaatccgagtaatgtggattttaataatctgagtaaagaacaagtgaaacggatttataaatttgtaagttgtactggaagcgaagggcattttattccaaacagcaatgcttttgaaattattaaaaatgaaaatggcacgaacagtaaaagtgaaaggatgcaagagttttccgatggaaatactatttatgatgtcaaaaacaatccgatacaaattaaagcaacctgttggaaactaagtgttaacagaactggaaaaatcaacatctttactgcaaaaaagataagtgaaaaatttaacaatcaccaatgataaaatagcaatagacacaaacattcttatctatgcaatagggaatcaagatattgctaaatctgaaatttctatgaaaattttagaacaaaaaccatatgtatcaaatcaagtgataacagaaacaataaatgtattgatgaataacaaattcaataaaaataaattcgaatgtttttcaatagctcttgatatattagaattttgtcctttgatacacaacacaaaggacacatattacagtagccaatatttattgaaaaaatataaacttggcccatatgatgcaataataattgcaaatgcattattggaaggttgcaaattgctatattctgaagatattcacaaatattttattgagaaaagactaaaaataataaacccatttaatgttgcacatatatgataaaacgcacactctacttcggcaatcccgcatacctaagtatgcgcaacaagcaattggtaataaaactacccgaagtagtaaaaaatgaaacgttacccgaagcattcaaatcagaagcggaaaaaacatttccggtggaagacatcggtgttgtcattctcgacaacaagcagattacaattacacacggattaatggaggctcttttggaaaataactgcgcacttattacatgtaatagcagtaggatgccttttggattaatgcttccacttgccggaaataccacacaaaccgagcggtttcgagaccaaatcgatgcatcggtacccttgaaaaagcaactctggcaacaaactgtacaggcaaaaatcgagaatcaggcgtatgttttggcaaacaaatcaaaagctattgttaaaaatatgcttgcttgggcagctgatgtaaaaagtggtgatccggataattacgaagcacgtgcggcagtctattattggaacaatatttttcccacaataaacgggtttaaacgaggtagagaaggcattccacccaacaatctgctcaattacggatacgccattctgcgtgctgtagtagcgcgttcgttggttgccagtggacttctgcccacgctgggcattcaccaccgaaacaaatacaacgcttactgcttagcggatgacattatggagccgtatcgaccgtttgtggataaattggttttcgagataatggaaaatggaactaatgtttttgaattatctcaggaaattaaagccaaactgttgaatattcccgtgcttgatgttgtgataaacgagcgacgaagcccgctgatgattgcggtgggtcagactgccgcctcattgtataaatgtttttcgggagaaattcggaaggttaaatatccttcgtttgtttaacagctactacaaaggtcctcgaccatttgtaaagttgtcttgatgagcgtaaaatgctaatttattttagattattaacaagcgtttattatggaacgatttagcgaatatagaattatgtgggtacttgtattttttgatttgccgacagaaacaaagaaagaccgaaagatttattcggattttcgcaagaaacttattcaggatggtttcaccatgtttcagttttctatttatctgcgccattgcgcgagtagggagaatgcagacgtgcatattaaacgtgtcaaatccttcctgcctccaagcggtcaagtcggaattctttgcattaccgacaagcaatttggaaatatggaattgtatatcgggaaaaaagaaaaagaagtcaaggcgccttatcaacaattggaattattttagcataaagaatcccgctcgaaaagcgggattctttgtttctggacaacgatttttttaattctaacaaccctcacaacttgttggtttttaacaatatactgacatcctgttgttcagaatatcaaagatacagaaatttgaaagcaattcacaaccaatcgttacgatttctttttcgattgtttgttgttcagaatatcaaagatacagaaatttgaaagcaattcacaacagcttccaacgtgattaaaattatctattgttgttcagaatatcaaagatacagaaatttgaaagcaattcacaacgccggacagctacttcgtatttgcgtcgaagttgttcagaatatcaaagatacagaaatttgaaagcaattcacaactaatcgtgccgctaaattttcattcttgagttgttcagaatatcaaagatacagaaatttgaaagcaattcacaacacggctcgttagtcagcacggtgaaggtctgttgttcagaatatcaaagatacagaaatttgaaagcaattcacaac

SEQ ID NO: 1410 - DNA, 13580 bp, synthetic construct
  misc_feature 1..13580: note = Synthetic
  source 1..13580: mol_type = other DNA
  variation 13231..13430: note = n is a, c, g, or t
aaaactactcagctaaacaaaacgcaaaaactaatacatcattattctataaatgatgcgattgagcatttaaaaactattaagaaaataaaattcaatagtaatgaatttgttacttcagaaatgaataagtcaaccaaaacattattaaagcagatgaaaatatctattacctaaaaaattagggttcgagtttaagttttttactaaaaataagacaaattattattgcttaactggctcaacttttttgccaaaaaatctaataattaaaaagcaaactccaattaaaatcggatatgcgatccaaggacttagtccatatgccactggtagagtaccaaaaactaaaccaactacagcaactgtcaatgcataaggcaattgagttctaacatgttgaatatgattacaagaagaagccaaagagcttaaaattgttgtatctgaaattggtgagcaatggtcgccaaataccgaacctgcaataacggttgatacaacatgagaaaaaagcattaaacttgcattgtaatccattcctgtttcttggcataaaaaccatgttgctggtaaaaccaaaggatacattattgccattgttccccacgatgtgcctgtgctaaacgacattagagcagaaataacaaaacttaaaacaggtaaaagatatggactcatatttgcagattgtattgctgatgtaataaattcagcagtatgtaaatctgaaattagggcagcaagcgaccatgccaaaattaaaattacaattgccgacaacatagctttaaagccattaatcatgctatccattgtgttttgcaagccaagttttttcttacttaaactcaagaacattgcagaaatcaatcctcctaaagaaccccaaatcagagctttataagaatctgaagctcctattgtttccgaaatttttgttataaatcctatagatttattttcccaaacagcaggattccaacctgtataaaaaagacctgcaatagttccaaaaataataattgcaataggaataatagcgttgtaaatgtttggtttaatatggtcagaaacttccatttcttttaaatctgtttgcagtttttgttccatatcagctgctgtaacacctttttctcttgctcgtctttctgcggttagcattggaccataatctctgcctgcataaattaaaatcagtataaaaattagagttaaaattggataaaaagaatatttaagacttgagaaaaagatattataagcactctcatttaatccaagttgagtgatagaattttgaatatatgaaagttctgctcctatccatgttgtaacaaaagcaatagaagccacaggtgctgcggtgctatcaacaatataagctaatttttctcgcgaaattttaagtttatccgttactggacgcattgtatttcctactactaaagtatttgcgtagtcatcaaaaaatattactaaacctaacaaccaagtaacaaactgccctgagcgaggattattagcacgccgagataaaatatttatcactgctttcattccaccattttttgtaataatctgcacagtagcaccaattaacatagaaaaaatgattatagacaaatgctcggttttaaaaagagcacgcaagacataagtatcaggaattgtaagtattgctttaaaaactgaaaggataacatttgtgccagaatatatccaaattataaaagccccactaaacaaacctatgaataaagcagaaaaaacttctttaaaaattaaagcaaacaatattgcaatcaatggtgggataattgacatccaaagaggaattggctttatagttttgcttgcttctatcccctcgcactgaatgtttaaatctgttttctcattaaaaatatactcaaattctgcaattccatcaacaaaaactatgttaaatactttattatttaatttgatttcacgtacacagttgatatctacaatatttccaaggctatctttagctaccaaactaatttttgaattaatgccttcaacgattgcaaaatcggtttgtatatctattgattttattatatagttttctgaaaacaaatttgcagtactaaaaacaagtactgcaaacaaaactagtatatttttgagtttaaacattagaagttagtccattccttaacttgctcaggtgttggattttgcaagccaagtttatgttttttattccaaccgcacagtatttgatgcaattttcctacattagcttcttttagctgagccaaagaagtaaagcctgatttgtataatatttttgcccattcttctggtatgcctttttcaacaaaaacagattcattaaaaatttctgcctttttctcaggtttcatttgtgggaaaaacaaaacatcttgaattgatggactattagtcataaacattgttaatctatcaattccaattcccattcctgcggttggtggcattccatactctaaagcacgtaaaaaatctctatcaataaacattgcttcatcatcgcctttttcgcttagtttaagctggtcctcaaatctttctttttggtctattgggtcatttaactcagaataagaatttgcaagttctttaccgtttacaataagttcaaatctttcggttaagccaggaattgaacgatgtttttttgttagtggcgacatttctattggataatctgtgataaaagtaggttgaataaaatggtcttcacatttttctccaaaaatagcatcaatcaatttgcctttacccattgtgtcgtcaatttctatatctaattctttgcaaatttgtcttaattcatcttcagattttcctgcaatgtcgtagcctgtatattttttaatggcatcatacatgctaactctcgcaaatggagttttatagtcgattattctatctcctaattgtactttagtagttccatgcagtgctatagcaactctttcgaccatttcttcagtaaattccatcatccatttatagtctttataagccacgtaaatttctaatactgtaaattctggattatgggttctgtccattccttcgttacggaaatcctttgcaaattcataaactccatcaaaaccacctactataagttttttcaaataaagttcattagcaattcttaggtaaagaggaatatttaaagcattatgatgagtaacaaaaggacgagcagctgctccgccgggaattggctgtaatattggtgtttcaacttctaaatatccttttgaattaaaaaactcacgcattgtgtttactatttttgttcgttttacaaacacatctttcacatgaggatttataatcaaatcaacataacgttgacgataacgcatttctaaatctgttacggcatcgaaaacatgtccgtctttttctttcactataggaagtggacgtaaagacttagttaaaacagtaaattctttaacatgaacagaaatttcgcccatttgagttctaaaagcatagcctttaacgccgataatatcgccaatgtcaagcaagcgtttaaacacaacattatacattgttttatcttcaccagggcaaacatcatcacgtttaaaataaagctgtattcttcctttactatcttgtaattcagcaaaagaagcatttcccataatacgacgagacataattcttcctgcaagagaaacagattttaaattttctggcatattttcatcagaaaatgtttctaaaatatctgttgagtaaatatctacatgatattctgctgctgggtatgggtcaattcctaaattacgaagttcttttaacgattctcttctctgaatttctaagtcacttaatccaatataatccatataattttaaaattttagaatttttattgcaaaaatacattaaattttcgattattagcaaatagatagaattaaattaagaattaagaattgaagaattaagaattacttccattaaaagttaaaagttgtgttgcccttgcgggcaaacctttgagagtcttgttttgtactcacgtacaacccataccaacacgctccaacgcccatgatgctcgctcggatttagtgaattttagaaattgtaataaaaataaaagtttttaaagttcaactcaacaccataaactaaaaactcaaaactaaaaactaaaaacttttatttttcttcttctgagctttcttctactatataaagaggacgtttcctcacatcattatttattctactaatatattcgccaattattccgattgttattaattgcactcctccaataaacgaaacagaaataatcactgaagtccagcctctaagtggtggagtatgcaaaagataatgagatattaatgcgtaaacaataatacagaaagaaaatacagaaacaacaattccatattgcttgcaaatttcaaaggtcgtgaagaaaaacctgtgatgccatcaattgcaagtttcattagtttactgaaagaatagcctgtttttccactaaagcgagggtctctaacatattctacacatgtttgtttgtagcctatccaagctatttgacctctaagaaacttatttctttctggcatttgtttaagatgattaataatcactctatctattaaacggaaatcgccagtatctaaaggtatttttacttctgtgagtttgtccaatattctataaaataatttatatgctgcttttttaaatatattcactccttttcttgcacttcttttagcataaactaccttataaccttctttgtattttgcatacatttctttaattaattcaggaggatcttgaaggtctccatcaataattgctactgcatcgcctttggaatagtctaatcctgccgaaacagctacttgatgtccaaaattacgactaaaactaatatactgaactgaattatcctttttcgataaatctttaattattgacagagaattatcttttgaaaaatcattaacaaaaataatctcatatgatgagcaaatttctttcaaaactttagttagtctttcatacatttgaggaatatttccttcttcattgtaaattgggacaacaacagatatttccataataattacatgttttgagtttctaataatttagttaagcgaactattttactttgaattttaaagtgaagcacttcgtattcaaatctttccataattttttcgtctgtttcaatttcatttatctgaacaagatctccaagttttaaatcttcaatgttttttctctgattatgaatatcataatgattcattgcataaaagtaaaacatagaactttggtcgtagtcgccatttatatagtttatagtatcatttacaacaatatttcctttcaataaacttttcattagttcagaacgagaataatatgcctgatacagaggatcttcctttggacgatagatatgctttacaatacgcttgtatgggatagagaaaactgcaatataagctacaataattaaaatataaattttagaagtcttatattttaaatttataatccaattgtgaataacataaaatgcagatccaattactaaagcaaaaagaggcattaaaggaagtaggtaccagtgcaatttagtcttggcaataagcaaaaacacatactgcataattgcaatagacatagaaaaaatactaagtcgttttacttgtttatctttaacaaataacgtaaaaataaaagccaaaggaagtatataaaagaaataagtaaaataatttgtttttaaattgttgatgtaataacatttacctccagaattattttcaagaactgtcataaaacgacctcccaattcattttcataaacagccttaaggtatccgccataagatagttctctccctatataatatcctccaacaaaaagaataaaaagtccaattccaatataggttgttttgtcttttaagataggcaataattgttttctaaaaataaggtaaattggaataaaaggaagaggcatcaaagcttgaattccctttgttagagtggcaaaaataagagaaacaaagaaaagtatatagtattttttttctttggtttctgtataaataaagaacaaaagaagataagcaatcataaaaaaacaaagcaaggcatcataatcggcacttcttccactatgataaataaaaaatccccttgagcaaattatcactgaagcagcatagaaacctaagaatggtttttttataactcctgtaagtaaaataataacaactcccatgagcaatattgcaagagcagatggcaatcttactgcaacttcattagctccaaaaaccttgatactcaaagcttgaatccaaatagccaaaggaggttttacgctccaatgatctggcttataatcgtaagttacaacaataggatttttggtttttgtcatttcataagaagaagtagctactctactttcgtcccaggttcttaaaggttgagttcccaaaaatgcaaataaaggatataagcttataagaacaaatatcacaacaagtatccacgtaagttttttgttagagattttcttttccattcacttttgttctaaatgaatttacaaaagtagtaaaataatatttataacaaaatgtgtcaacttttcttaggacgcgacaggctgacgcgtctattgcttcgcagagttcgcaagctcactctacttgcatgggttagttttaaaccacaaaagacacaaaagagcacaaaagttaaaagcgatgcactgaacgtagttgaattgtcgaaagaatttcggtgtttcgacttcgctcaacacccgatattggaatcgctcgacacccgatattcaaataactttatgaactttaaaaacttttaactaattgttttttaattaataatattttttactgctctaatataattttaaacaacaaagataaaaaatttttcagttaacagtcagtaaatttgattaaaattaataaaaaatgcccccgataaaggacgagggcaaccttaatgttttcacaacggaataatccttattgtgaattggtttcaaattttgtacgacaaagataatgcttttttttgaaaataaaacaaatattaataaatttgtaaaataattttaatatttgttaatatcatgaaaaaaaatctcggattagacttaggaacaaatagtattggttgggcgttggttaaccataattttgaaaataaacaaggcgaaatactcggcatggggagtagaataattcccatgagtgctaacatattaggcgactttgaaaaaggaaatccagtttctgctacagctgacagaactcattttagaggtgttcgcagattgatagaaagagatttgttgcgtagagagcgtcttcatagattgttaaatattataggttttttgcctcaacattacgctaatgatatagattttgaacacagattagggcaattcaaaaaagataaagagcctaaaattgcatatagaaagaattccaatgggaagttcgagtttattttccaaaaaagttttgaggaaatggttgcagattttagagaaacccaacctcaattattttacactaaaccaaacggcgaagaaacaaaaatcccttacgattggacaatttattatctacgcaaaatagctctttcccaaaaaatagaaaaagaagagttggcttggatacttttgaatttcaatcaaaagcgaggatactatcaacttagaggcgaagatgaagaaatagaagataataaaaataaatcttttgaaattttaaaagttgcgaaagtggttgattcgggcgataaaatcagaggcaccgacactattttatatgatgtgttttttgaaaacggttggaaatatgaccgccaaacaacaaaacctgaagattggataggaaaaaccaaagaatttatcgttaccactactaccctatcgacgggtgaaactaaactatcctttaaagctgttgattctgagcaagactggattgccattaaacaaaaaacagaacaagatatttccaactcagacaaaaccgttggcaaatatatctacgacacgctacttcaacaaccaaatcaaaaaattagaggcaaattaattcgtactattgaaagaaagttttacaaagacgaacttcgtcaaattcttgaaaaacaaaaagaatttcactctgaattacaagacagaaatatttacaactcttgcattgaagaattgtacgaatacaatgatgcacatcgcaacagcatttcaaatcgagattttacctatctttttgttgatgatattattttttatcaacgtccattaaaaagtaagaagtcattaatcagcaattgttcgttagagtttagaaccttcaaagttgatggcgttgaaaggcgtgaaggtattaaatgtattgcaaaaagcaatcctatttatcaggaattcagattactacagtggatgaaaaatttgaagattttcaaaatagacgacaagcaggatatagatattactgacgaattactgccttcaattgcagaccgagaaaaactttacgaatggttaaatgacaaaactgaaattgaccaaaaagcatttctcaaatatcccgatttcaatttagatgagagaataaaaaaggaaattggtttagaacagtttaggatatttaaaaaggataaagaacaagggttgcacacctattatagatggaactatgtggcagacaaaaaatatccgcttaataaaactcgtggtgagattttaaaaagattgacaaaaataggtatttcaagcgattttcttaatcgaaataatgaaacacatttatggcatattctttattcagtagaagaccgaaacgagattattagtgcattgaataagtttgcaaataagcataatttacccgaaatatttgtggatactttcagaaaatatccacgtattgataaagaatatggagcatattcagaaaaggcgattaaaaagcttttgacattaatgcgatttggaaaatggtgggacttctcagcaattgatgaaaacacaaaagatagagttgataaaattcaaacaggcgaatacgatgaaaaaataaaaaatcgggttagagaaaaagctatcaatctcacaggaaacaatcatttccaagatttgccactttggttggccagttacattatttacaacagacattcggaggcatcagaaattaaatactggcggactgccaacgatattgaacttctaaaacaacattcacttagaaatcctattgttgagcaagttattaacgagaccttgcaaaccattagagacatatggaatcactacggcgaaggaaaagaaaacttttttgatgaaattcatgttgagttaggtcgagaaatgaaaaatccagccgacaaacgcagaaagattacggaaagagttatggaaaatgagaatacaaacattcgtattaaagctatcttgacagagttgttgaatgaaggcgacaataacgtacgtccatattcaccaatgcaacaagaaatattaaagatatacgaagagggtgtttatcacaatgaaaatagagcggatgagttgaatgaaattgataaaatccgcaagaaatcacaaccttcatcatccgatattaagcggtataagctttggctcgaacaaggttataagtcgccatacacaggtgaaataatccctttatccaaactatttacacctgcatatgaaatagaacacattattccacaatcacgctttttcgatgatagtttaagtaataaagttatttgtgaatcggaagtaaatagtttaaaagacaatcaattagcttttgaatttatcaaaaacaataaagaattaactattgaactaagtcacggcaagtttgtaaaattacttcatcctgatgcttatgaagaaaatgttaaacgttattttgcgaaaaacaaacctaagatgaggaaacttcttttagaagatattcctgatagttttatcgaaagacagatgaacgacacacgctatataagcaaagttgtaaaaatgcttttgtcaaacattgtacgggaagaaaatgaagaagaaggaactgcaaaaaacgtagttgtttctaatggtggaattacaaacacattaaaacaagactgggggctaaatgatgtttggaacactttaataacaccaagatttgaacgacttaaccaaatggctggttacgaaaaatatggttcttgggagaataaagagggaaaacaagtatttcaaataaataccattgagcctgaattactaaaacttaataagaaacgcatcgaccatcgccaccatgcaatggatgcacttattgtagcatgtagtagcagaaaccatatcaactatttgaacaatgcagcagctgcaaagaataaacagtcggagcgttttgatttgcgagcaaaattgagaagaatagaaaactttaccgacaaagacggaaagcaacgaacagcagctaaagagtttttgaaaccttgggacacattcacgcaagatgctaaaaaagaattgaaccatacagttgttagtttcaagaagaacaaccgcgtaatcaataaaaccgtaaattattatcaaaaatgggtaaagcaaccaggcggttcaatgaaaaaaatgcttgtgaaacaagaaaaaggagatagttgggctattagaaaaccattgcacgttccaatgccatatgggttgaaagaatatagttttgacaatctaaaaatcgcagaaaatgttggaaaaaaagattttattattgatgattatataagaaatgaagtagaaaaacactttgatcttaataatagaaaaataactgacactcaaaagtttttaaagaaaaatccgataaaagataaatatgggaatattattttaacaacagactttaatattagaagtaagaagtttaggaaaagaatgcctatactaaaacttgcggataggagtagtggcagaggaataacaagtcttgatagtatgataaagttcttaaataaaatatccgataaaactctaaaaaacgatttgttctctcatttaaaagataatgacaatgacataaatgtagctttttcaattgaaggaattgaaagatttaactcgaaaagaaaaacacctgtttataaattaccaattacagaaagtggtgaaaaaagatttgttttaggaaatagtattggaagcaagcataaatgggttgaagcagaggctggcactaatcttttctttgctatttatattgataatgaaggaaatcgcaattatgagacaattccattaaatatagtaattgaaagacaaaaacaaggtttgccatcttgtcctgaattaaatgaaaaaggacataacttactttttgatttatcaccaaacgatttagtatatgtgcctagcttagaagaacaagaaaatccaaattctgtggatttcaataatttgagcgaagaacaagtaaaaagaatttataaatttgtgagttgcactggcatagaagggtattttgtaccaaatacaaacgcttctgaaataataaaaaatgaaaatggaacaaacagcaaaagtgaaagagttcaagatttttacgacaataaaaccattttggataattctggtaaacccatacaaataaaatcagtttgttggaaattagaaactaaccgcttaggtcaaattaaaaaagtgttaagatgataaaaaaaactctctattttggcaatcctgcatatttaagtttgaaaaacaagcaattagtaatcaagatgccagaggtagaaaaaactgaattacctgatagcattaaagaaagtgctattgttactgtcccaatagaagacacaggcgtagtagtgcttgataataagcaaattactattactcatggtgctatggaagctttattagaaaacaatgttgctttaataacttgcaataataatcatttaccagttggtttaatgcttcctctctgtggcaacactacacaaaacgagcgttttactaaacaaattgaagcttctgttcctctaaaaaaacaactttggcaacaaactgttcagcaaaaaattttaaatcaagctgctgtattaaagtcagttacaggctgtgaagttggcaatatgatgcgttgggcaaaagatgttcgcagtggcgaccccgacaatcttgaaggacgagctgctgtttattattggcgtaatctttttcctgatattccaaattttacacgtgaacgcgaaggcatgtcgcccaataatttacttaactatggctatgctattttgagagctgttattgctcgaagtcttgtttcaagtggacttttacccacacttggcattcatcatcacaaccgttacaatgcttattgccttgcagacgatataatggaaccatatcgcccttacgttgacaaacttgtgatagaacttatgtcaagcggaatagattgctcggaaattacaaaagaaatcaaacaagaattattgcaaatcccaactcttgaagtaataattggtaaaaaacgtagtcccttaatgattgcttctacacaaactactgcatctctttataaatgttttactggtgaacttagacgagtggcttatccagttttagaacttaatggcaaaaatggatagatttagcgagtatagaattatgtggattttagtattatttgacttaccaactgaaacaaaaaaagaacgtgctgctgcttcaaagtttcgcaagcaactaattgaagatggttttaatatgtttcagttttctatttatactcgtcattgtgcaagtcgcgaaaatgctgaagttcatatcaaacgtgtaagaagatttataccagagcaaggcacagtaagcatactttgtattactgacaaacaatttggaaatatggaaattttctatggcaaaaaagagaaagaacctccatcgggctggcaacaattaaaacttttttagaaaagaaaaacttatattataaaaaacaaaatcccgatttttggtcgggattttttatttctaaaacagtctgtaagtttctgatttttagcacgatacctatatcgtactgtttcagaccacaaagatacnnnnnnnnnnnnnnnnnnnnnnnnnnnnnnnnnnnnnnnnnnnnnnnnnnnnnnnnnnnnnnnnnnnnnnnnnnnnnnnnnnnnnnnnnnnnnnnnnnnnnnnnnnnnnnnnnnnnnnnnnnnnnnnnnnnnnnnnnnnnnnnnnnnnnnnnnnnnnnnnnnnnnnnnnnnnnnnnnnnnnnnnnnnnnnnnnnnnnnnnaattttgaaaccaattcacaactttcaaaataactacctatttgaacatccactgtttcagaccacaaagatacaaaattttgaaaccaattcacaaccagaactacctatattttttcacaatcaaaactgtttcagaccacaaagata

SEQ ID NO: 1411 - DNA, 13464 bp, synthetic construct
  source 1..13464: mol_type = other DNA
  misc_feature 1..13464: note = Synthetic
tgtccattagggagcatggtccaaaaaaaaccattaaaaatgtccattatacctttttcccacaatactagtaaacatcttgattcccagtgttgttaacaattgtttataacctctgtttaaaacaagtgaatataaacagataaaaaacattgtaatcatttgattctcatagtaaatttgtttcatcagacaagcgataaaaggtttgctactgaaaagtaaaaacgaaactatgctgctgtaaaaagcacataagtcggttgagaactaaagagaggaaatcgtgagaggactaatccggatgttcaacttatcaggtgacggatatgaggggaaaagaagctgtaaaaggtgaattgaaaccgaatatgggcgaaagaaaacctgcccgcgagggtaagagtcccgtcaaccaaaataacagtagtctgacacttcagcggcttgtccgtaaaaagtgaccaggattttttcaacccgaaagaatcctggttttgttttgtgttattaacgtgattcgatataatttttaacgcaaaggtcttaagttctgtatctaaacaaaatgattgttttaataagatgcaagtttgccgtaatgatgtttattggtattgagagatgcagagaacacagaggtttgttgattttgcatttatgcaaaatcaacaatgtgtaatatcttaaattttcaacttatcaatgtaatccctatattttgaactgacatctaattaaacttccaattttgccatttgtcctgtatgtcgaagcctacattggtttgcggattttgttctttgttgttgatcaatactgatttaaggccaatttgctccattaaataatctgataattcctgataggtgaaattacttttcgattctttgatttttttaagcaaatagtatgtaaacaacccatgttctttatctttgtaggcaagtgatgattgttcgccactacttgcagtaaataccacaatatttccgttaagtatatcttttttaggttttacttttactccccgtgcagcgattaagccttggttacgggcaccaccgctgaaacaggcatcgaggaaaacggtgatccttttgcaaggatgctcggttaactttttataggcatccattagtttaatcccttcggttatattattgccactcacatcaactggaataaggtagggttctttatttacctcatcgggtaagccgtgtcctgcgtagaaaaagaatagctcagcgttacccgaactgtttttagccagtaaactaattctatccaaagcctgtttcattttgccggttgtggcatcgaggataaatgttacgttctcggtaggaatatttagtgattttatggcatactctttaaaggcactagcatcgtttctagcaaaatctacatttacctcacttgtaagatcggtttgctgggaggcataatcttcattgcctatgattagcgcaaatcgattttggtttttatgttcaagttctggaatatcattatctacatctgatttaaatttgaatgtgtatttcccactttcattatagctagatgccaatgatggggaggtgttactcttttttactaattcatcaaagttgaatttgctgatttgatcgaataggctgttgtatgcaactgagtatgtttcagataatattcttcctgctttatagtatggataatgagtaatgctaaagggggcactagagttaaacttaaaatcgctaatagaggtgtttggaatattaatggctagcttagcggttaagtctgttgttccccaccacggtgtatagggaaaccatcctgtaaatggccaaaagaatgcggcatcaaatatccaagttctttttattttttcggagggtacaatgtcaatatcgacctttaggttaggatgtttttggataaggttgtagagtgtctcatttttataaatagcattaatgaatctgttttttaatcccgttatatcatctgctttgtcttgatttgtaagggcagtaattgttaaatcgatatttgggttctcaatagttttactacttgttgtgacgatttgtcgacctttgtaattcattcccaaacggcttggggtaacacaacttataaaaaggatcgacatcaaaatgaatgaacaggtcttcatatctataaaaataaattaattaaatggatgattcatacattggatactaaagatgaatcgcaccataaaaatagctattttatatccttttctttttactttttacttgttttttggttcagaaacgataaaggtaagaatatcaggcattaaatccgtagattgtaatttgtattatatgattgttcgcatatacaatagttcggaaagtttttaaccgatatttttaagttaatgatttggcgtaatttggtgcttttgagttttggtggctaaaaaatattaaaagccactaaatcaccaagtcacaaaaacccaccaaaaagattaccaaaccattgtgattttagactttatataaattgataagtactaactcagcttgatttttctaagtcttaagctatttgaaaccacggaaacagagcttagagccattgctgcgccagcaatcattgggtcgaactgaaaccctgtaaaagggtagagaattcctgctgcaaggggaatcccaattaggttgtagataaaagcccagaaaagattctgtttaatcgttttcatggtttgttttgatagctgaattgctttggcaatatgattaagatccgaggtgataatggtgatttttgcaatctccattgcaatgtcagaacctttgcccatggctatacttacatcggcctgggcaagggcttgagaatcgttaatgccatcgccaatcatggcaacaatccggccttccgattgaagttttttgatatactcacctttatcggatggaagcatactggcctcaaatcgggtaatccccactttactggcaacggatgcggctgttgatttgttatcgcctgtgagcataattacatcaatgccaatttccttaagtttagaaatggcttgtttagatgtatgctttattgcatctgcaatggcaattgcggcaatagcctgtttttgatctgagaaaaagattacagtgtttgaatcctgctcccattgcaatatctttcttgttatggagtcagaaaaagatatcccattctcaagcatcaatttttcgcttccaaccagaaaggtttcattattaagatgtgctcttatacccatccccgttaacgactcgaaatgtgctgtttttagtggtgattttgtttctagtccaaggtatttaacaacagcttcggcaagtgggtgttcggatagcgattcgatagaatataaaatctctcgatatgttctaagttcggaaagattatcaacccatactatgtctactacttcaggttttccttcggttattgttcctgttttatcgagtactacggtgttgattttatgtgcaatttcaaggctctcagcgtcctttattaggatgttattctcggcacctttccctacacccaccattattgcggtgggggtggcgagtccaagggcgcaagggcaggctacagccaaaacggttacaagcgcaagtattccttgtatcacccctttttcaccacctaatagaatccagataatcatgctaagaagcgcaattcccattacggttggaacaaatattccagcaattttatcggcaagttgctgaacgggtgctttgcttccttgcgcttgctcaaccatcttaattatatggcttaaaatggtctctgaaccaacctgctctgctttaattgttaacgttcctttctggttgattgtccctgcaaaaactttggtatcttttgatttaagcactggcaatggttctccagtaatagtactctcatccacaaacgatgaaccatcggatacagagccatcaacaggaattctatcgcctggttttacaactaccaaatcgttagttactatctcgtgaataggaacttcaactagtacatggttttttaacagcgttacggttgtgggctggagacccattagcttgcggattgatgatgatgtttttccttttgctttctcctctaggtatttgccaaggagtatgaaggttattattactgctgccgattcgtagtatacatgtgggtgtaggccacgattatgccagaattcaggccatatcgtgttgaatacgctaaatgaaaaggctatgaaggtgctaagcgcaacaagcgtatccatgttggctttaaggtgctttgcctgcttaatggcgttgatgtagaaggttcgcccgaaccagaagataactattgcggaaagaagcatggatatccatggtgagtattgccagttcatgaaaatcatgccaagaaccactactggtagggagagtatggatgataggattattttcgtttttagcgagtggatgtttttttcccttgcctcgctaacggttttgttggtatcaacggaatcaataattagatcgtaacctattgagcgaattacctcttgtaacttggtggctgatatctgtttctcgttaaagtcaacccatgcggtatggtttgccaagttgacccctgcatcggtaaccccaggttgtgctttaagcatcgattcaacgctacccgaacaaccagcgcatgacatgcctgttacagggtaaattgcttttgtcattactaaagaatgtttattattgagaataacagccaaaagtaggaaaagtttaggaggattataaagagggtgtaattgagaggttggactcatgattatcgcactttgcgattatttatgtaaatacctgtgccacttgtgggtgaggatttacctcaggtactacactggaggcatagggggcaggtgggaatggataggttaatgaatatactatatttactgggctttagcccttgactttagatttttctcggtcactattgataggatatatttgagtgcctgcccaagcatcgtaaagactatgcttatcttttttgctccctgctaataccttgtttcgagctaagagtttacgttggattactccttgctgggcagctttcctcttggttcggaatcgaatttttgtgtctctagaattattgattctaaagggctgtagaaggagcaaaaaagatcagtacatttccccgaaaagatcaagaggttttcccaaaaagcccacgaggtttttaaaaacgctgtatgagcttttccaaaaagctcaagaggtttttaaaaatgcagtatgaactttttaaaaaagttcaagaggtttttaaaaatgcagtatgagcgtttccctatatccttgagtggtttttgaaaaaaagagggtgtctcgaattgttgagacaccctctttttttgcaactccattggaaacattaggccttttcgaacctaaagttattaatagcatcctttaaatcccttcctggggtaaaagttactttagctaaacggatattgtttgcagaaaccttcctttcactctctgaaccattgctgctaatgctaactcggaagctgccaagatcacctagccgaacaattttaccatcggcaagggcatctggtataattttaaggatggttacaagtattcccatcaggtcgccttctgagaaacttgaactttcggatacccttttggcaagctgcttaagggttagttcgccattacttatagcggtggcgtagtgtttaggaggaagatccttcttaataggattcttttttgctacaacattaaattttacaggcataattttaaattttaaattagtgaataaagcattgctgtattggtgtcaaaaccaataccataaattggtggggaagcatttgctgtgcaccctgtgctgtgtaaatggctagtaaacaatgatgtgctattttgctcctcttgatttttttagactatttaacagtttgccgctggaaaatatagcctacgcaaagcgctatgctactttacaaagttgctaagggcagcgggttattgtgtttttcgtatgctcattaatttagggaatggaacatccacgagctactatgcccttcccgttgatgctagaacgaggtgtgcttggggcactacgagtgctaagctattttctgtattcttggtaacggatgtgtgaagtccaaaaaaaacagccgaaatatttgatattcaaccaaaatattttataattttatattaggatttgcgggatgaactgggggaggcgactttaggggtcgccttttgttttagctaagtgtgtaattaaattttacaaaactggacagcatgctgtgccaaaagaaacacccccgtattttaagacgagggtggcttaaatgttttattcatgcattaattaatttttatgatattcatgaaacacttatatcaaaaaaaacgatcccgaattacttcgagaccgctttaaatgttttcacaacggaataatccttattgtgaattgcttcagattgtagaacaaatataggcataaaaattaaaagtcaatataatatgaaaaagattttaggacttgatttaggaactaactctattgggtgggcgttgataattgaagacctgagaaaagttgaaggattaggaagccgaataattcccatgagtcaggatatacttggaaaattcgatagcggaacttctgtttcacaaaccgccgagagaactgattatagaggagttcgtagactcagagaaagacacttattaagaagagaacgtttacatagagtacttaatatccttgggtttttgcccgagcattacagaaattcaattggatgggataaaagcgattacaaaacgtttgggaagttcttaatcaaccttgagccaaagttttcttggagaaaagatagtgagggcaattatgagtttctttttaaaacatcttttgaaggaatgctaaatgattttgctgttaatcagcctgaattgttaactggtagtaagaaaatacctttcgattggacgatatactacttgcgtaaaaaggcattgtcagaagaaatttcaaaagaagaattggcttggattgtaatgaattttaatcaaaaaaggggttactatcaattacggggcgaagatgaggataacagccagaagaatgaatacgttattcaactgagggttgaagaggtgattgaaagagatgttgataaaaagaacccaaagaaaaaatggtacgatataaaacttgaaaatggatggatttattctgctacttttctggcagaaccaaaatggtttggtttgaacaaagagtttttagttgcagaggatattgatgaaaacaatttgatcaaattaacaaaagatggtactccgagacggaaattaagtgttttgccgacttttgatgaaatcgaattaatgtcacaggctgataaagataaaatttataaaaaaataaaggcgaaaactgaagcgacaataagtaatagcggcaaaacagttggccgctatatatatgatacattattaaaaaatcctagtcaaaaaatcaaaggcaaactagttaggactattgagcgcaaattttataaagaagaacttaaagccattcttgagaagcaaaaagagtttcatgaggaattatgcaataaagatttgtataatttatgtataaatgaattgtatccaaataataaaactcaaataaacagcattgcaaaccgcgattttacatatttgtttattgatgatataattttctaccaaagaccgcttaaaagtaaaaaaacactaataagtaattgcccttacgaggagagattgtttgtaggcgaagatggcaaattgcaaaaggcatcaataaaatgtgtagcaaaatctcacccgttatatcaggaatttcgtttatggcaatttgttaagaatattagaatttatcaaaaagaaaaggatgtaaacgggagtttaaaaacagatgttgatgttacgtcagaatttttgaagaatgaggatgactatgctacattgtttgaatggttaaacgataaaaaagaggttaaacaggattccttccttaaataccctgtatttggattaaagaagaatgctgagaattatcgatggaattatgttgaggataagccatacccatgtaacgaaacaaggacgttaattttaaatggattagagaaacttaatataagtttcgattttctaacaaaagaaaaagaggaaatgctttggcatattctctattctgttgaggataaacatgaaatcgaaaaggctcttcattcttttgcccacaaggatgctcttgacgaagagtttgttgaagtttttaggaaatttccccctttcaaaaaggactatggttcttattctgcaaaagcaattaaaaaactacttccgcttatgcgaatgggaaaatattggagtgagcaagccatcgatgagaaaacgagagagcgtatttcgaaaattattaatggagaatgcgatgaaaaaatcagcagcagggttcgcgaaaaggcaataagcctgaaagatatatcaaaatttagaggtttaccagaatggcttgcatgttatgttgtttacaacaggcattccgaagccaaagagataactaaatgggaaaaaccagaggatattgatgcctatttaaaatcgtttaaacagcattcgctaagaaaccccattgttgaacaggtaatcacagaaacacttagagcagttcgtgatatttggaagaaggctgaaaggatagacgaaattcacatcgaattggggcgtgaaatgaagaaccccgctgataaacgcaagcaaatgactcagcaagtttcagaaaacgagaatgctaatattcgagtgaagagattattgatggagtttttaaatcctgagtttgaagttgagaatgttcgtccttattcaccaagccaacaggacattttaagaatttatgaggatggagtacttaatagcgttgatgagataccattagaggttgagactattctaaaaaagtttaaagagtctgatgctaaaaaacaaccaacccgaaacgaaattctacgatataaactttggcttgagcaaaagtaccgttcaccttacacaggcgaaatgataccacttgggaaactgtttacccctgcgtatgagattgagcatgttattccacaatcccgctatttcgacgattcgtttagcaacaaagtgatttgcgaagcagttgtaaatgccagtccctataaggataggcaattgggctacgaatttattaagggatttggtgggcagattgtaccagaactttcatctccaaacaaaacagtgaaaattttcactattgaggaatatgagaggtttgtaaaacaaaactactcgaaaagccgtggaaagatgaaaaaactccttatggaggatatccccgattcgtttattgaaagacaacttaacgatagccgatacataagcaaagttgtaaaaagtttgttgtcaaatattgttagagcgaaagaggagaatggggagtatgaacaggaagccatttcgaagaatttaattacctgcacgggtggggtaacggataggttgaagaaggattggggtttgaacgatgtttggaatgatattgtttaccctcgatttgtaagattgaatgaaataacccagagcaaccaatttggacaatgggagaataaggatgggaaaagggtttttcaaacaacattgccaattgataatcagaaaggttttagcaagaaaaggattgaccatagacatcatgcgcttgatgcgctagtcattgcatgtgcaactagaaacattgttaactatttaagcaatgaatcagcaaacaagaaggcaaaaatatcccgttacgatttacagaatctgctttgtaataaaacaaaaaccgatgagaaggggaactacaaatgggttgtgaacaagccatgggatacatttacacaggatacgcgtttagcattggaggagattgttgttagttttaagcaaaacttacgtgtaataaacaagacaaccaatttctatcagcatttcgatggtgatggcaaaaaacagtttgataaacaagtcaaaggggatagttgggcaatacgaaaaccaatgcacaaggacacggtatttgggaaagttaatctcagaaagattattaaggtgaacctagtaaacgcattagaaaatccttctagaatagttgataaggaatttaagaaaaaaataatagaattactgggaagcggcagcgatgctaagaaaattgccaactactttaaggtgaattcagaaatatggggagatctaaatttatcgaaaattgatttttatatttattccgaagagacaaaagaatcttttgtggcaaccagaaaaaatgttgattctagttttaatgccaagaaaattcaggaaggtattaccgacacaggcattcaaaagattttgttgaaacacttagagaataagggcggagatacggaattggctttttccgctgagggaattgatgagatgaataaaaatattactgaattaaataatggcaaatctcacaaaccaatagttaaggtgagggtttacgagcccatgggcaataaatttaatataggtgtaaacggaagcaaatcattaaaatttgttgagacagcaaagggcacaaatcttttttttggtgtataccaaaccatagaacgtaaacgaacctttgaaacgatccctttgaatgtggtaattgaaagacaaaagcagggtttgaaatcagtacctgaattgaatgataaaggggatgaactgcttttttggctttcaccaaatgatttggtatatgttcctactcaggaagaaataacaaatggttgcaatattaattcaataacagataagggtaggatttataaaatggtaagctgctctagttatgttgctgattttatacctgcatttgttgcaaattcaattcttcaagcaattgaattaggaagtaataacaagtctcaacgggcttggacaaatgaaataattaaagaaatatgcttgcctattaaagtcgaccgtttgggcaatattaccgaagtcaacggtaaatcagttttataatatataaccctgacagggttttgaaccctgtcagagttatcttccgttcatctaccaaccacttcaaggctttatgaaacaaaatatattttttagtaaactgcttgggcaatattgccgaggtcaatggaaaaccaattttataatatataaccctgacagggttttgaaccctgtcagggttgagccctcaaataataatttcaaaatatttaagcaatgaatgaagagatcaatggcttttacgatgatgatggtaacaagattaacctcgatttgctgcctaaaccgcagctttgcctttcgtgcaaaagtaatgtggtggaggattgggaggaagatatactttgccagatgaaccgttacgatcagcggaatgataaggagtttaagtgctttgcctacgaggcgatttgttgattattgaaatttaaaccttaaccctgctagggttttaaaccctagcagggttaaactaagaagtatgaaaaattcaaggaatacacctttagaacacggagtttattaccatatctacaaccgtggaaataatggtgaaacattattttatttacccgataactaccaccacttccttcgcctttacgagaaatatgtcgaacccattgccgatacctacgcttggtgtctgatggggaatcattttcatttgctggtgagaataaaggaggagggagagattgatgtgaattcgttaccaaaccctgtcagggtttcgaaccctgacagggtaataaaacagccacatcgttatttttcggatctgtttaatgcatacagtcaggccattaataaacagcagaaacggacagggtcgctttttgaaaaaccttttcatcgaatccccgtcaattccgataagtactttcgaaacctagtgatgtatatccaccaaaacccagtacgccatggttttaccgatgattttaaggattactcttggtcatcgtacggatcggtgatatcagagaaaactacaaaggttaagcgcaaggaggtgctggattggtttgatggtaggagtaaccttatctactcacatgcgagttctgttgatatcgatttaatagatcatctgattattgaatagcagcaccctatgatttagaagtagcgtcaaaaggaatagggtggcggatagaaaagttctttaaccatttacatataaagcaaatgcgatgataaaacgaactttactttttggaaacccagcgtaccttagcctacgcgatcaacagctggttgccgatattactggcaacgaaaaaaagcaggtaacagcccccgtagaggatatcggggtggtgcttttggattcgtatcaaattactataacccatcagctgctaaactcgttacttgccaataatacggcagtaataacctgtaacgagaagcatatgccttacgggctgttactaccccttgaggggaatacgctgcaaagcgagcgatttaaggagcagatggaggccagcgttccgcttaaaaagcagctatggcagcaaacggttcaggcaaaaattgctaaccaaagatggttgctgcaagcaagaggaattgacgttgaacccatgcgttactttgaggcgaacgttcggagcggcgatcccgataactacgaggggcgtgcagcggcctactactggaaaaatctttttgatggtttaacggatgatgcatttataaggggaagatacgaggaggagcccaataatctccttaactacggctatgctgtgctacgtgccattgttgcccgaagtttggttgcttcgggtttgcttccaacactgggcatacatcatcataataagtacaacgccttttgtttagccgatgatatgatggagtcgtaccgaccgtttgttgataagctggtgcttgaaattgtgaatgatactaaggattgctcggtgctaacaaaggagattaaggcgcgcctgcttgtgctacccgcaattgatgtgctgattgatgggcaaaagagcccgctgatgctggctacacagcgaaccacagcatcgctgtacgattgctttgagggggtgagccggaagctcttactccctgagtttatttagattttcaaccctgacagggttctaaaccctgtcagggttaaaaaacctatcgaatgactaccgtagacagactaaaccaatatcgagttatgtgggttctagtgctcttcctgttttgtgcactgggtcacccatttttaaattttcatttcaagtagttg

SEQ ID NO: 1412 - DNA, 13367 bp, synthetic construct
  misc_feature 1..13367: note = Synthetic
  source 1..13367: mol_type = other DNA
accaaaagtccttcagcaggtagctacgaactccactgagattgcagcattttttaatcaatctgcagagataccggttaaagttgtttataaatcagtaatgaagagtcctgatgaaataaccaatgtttgtattgaagccaattcaagcaaaaattgtatcggtgtaattacctggtgccatacattttctccatcgaaaatgtggattaacggcctgaagatattaaacaaacctatgcttcagctgcatacccagtacaaccgcgaccttccatggggcgaaatcgatatggattttatgaacctcaaccagtcagcacatggcgaccgcgaacatgggtttattttaacccggcttcgcaagagccgtaaagtggtggttggatattggaaagaagaagatgttcaggaacgcatcggcgtgtggtcgcgtgctgctgccgcatggtccgatatgcagggagcaaagattgcccgttttggcgataatatgcgcgaagttgccgttactgaaggcgacaaggtagaagcccagattaaacttggactctcggttaatacctggccggttggcgacattgtaaaaatcatcgatggggtgagcgaagctgaaatcgacatcctgattgaggaatacaacaacacctacgaattcgataaagattctatggtaggcggtaaatatcacgatagcgttcgctatcaggcccgtattgaagctggtattaaatcgtttttagtcgctggtggctttaaagctttcactaccacattcgaagacttgcatgggttaaaacaacttccgggattggcctctcagcgtttaatggcggcaggttacggtttcggagctgaaggcgactggaaacatgctgcactggtgcgcgctgtaaaagttatgagcatcggactgaaagggggttgttcattcatggaagactatacctatcacctcgatccaaccaccggatacaaagctttaggttctcacatgctcgaaatttgtcctacaattgccgatggcaaagctaaagttgaagtacatccgttgggaatcggtggcaaagatgctccggcccgtttggtatttaatacccaaaccggcccggctacctgtacaagtctgattgatatgggaacccgtttccgtatggttgtacacgatgttgaatgtgttgctccggaagccaaactcgaaaaattaccggtagcctgtgcattatggactcctatgccagatcttaaaacaggtgcagctgcctggatttatgccggaggtgctcatcacaatgcatttagtcatgccgttaccgccgaatacatcgaggatttctgtgatatggcagatattgaactgattcagatcaacaaagacacctgcattaccgatttcaaaaaagaattgaaatggaatgatgtatattatcttctgtcaaacggactgagatagaatcaataggaaaaagtcataagaaaatgagtcaatagtccctcagcattttcatgcagaccatagacgaataactggtgtaaaacagggatggttgggtttagcccggaacgggcgagatagaatagcccggggcaagtgaggtacgaacgtcgccccgggtaggaaagataaaaaggaacccgtccgagtgaatacgatattcaagtcaaatatctaattccggacggaattgtgcggccttcaaaaaagtagttagatcagagagaaagggggtcataaggaaagaggaatcaggaaaaaggaaaatcttataaagaattccaatttcctctttcctcttttctttttcgatgactattgactaattccttctcaagttgcccaatagcttccgtaagattttgccgctgataatgtttctggtgtgcgaaattcaggaaacgcaaaataatgaacgcatcaaaaaactggaaaaatcgtttccggaaagaatccaaagaagcactgtttcggttgatctctgccagtttgccggggaagtcaagcgattgcatgtattcctgaattgaaactggcaatgacgataggagcacaacatagccttcagcacttatccggaatagagtatcggtcttttcaaacaatacttttaaatccaaaaaagctgaaaagttataggtcagagccaaatcttccgaatcgttcatccatttggtcattgatgcacccgtgccaaaaggaacccggtcggagacccttgccgatggataaacccaagcatcctgaatttcaatgatctttcccagtttggtgagtttataaaggaaataaaaatcttcgcctgcctgcctgcggttcattccgccctgtttgacgtaggcatctgccctgactgcaaaagctgaacctatcgtgtaaatggagtcaggatatccggccagatccaaagcatttttatagtagtgaaggtaatcctcataaagctgaatacccgccttctgttttggatcatccatttcatttatccggtgactgaaactgatcgttgcagcaaaacacgatttgttttctttaaataccgtttcaatccgtttcagataattggctgagacgaggcaatcggcatctaaggaaataattacgccttccggattattcaccgcatccaaccggcgaatagcttcgtccataccaattttgcgcgccatgccggctcctgcaaacttcgaatgaaccgctgttgcatagattgggtgcaataccagatttttccggtcattgatacgtttccagacaagcaaattctgataagtttcctgattaaaacttttaatttcggcagaactgttttccgaatcattcaccgccacaatcacttcgcaaaccgactggacaggatcacaagcccataccgattcaagtgtccggattatctccggttcgttcaaacaaggaatcatcacaaccatcgaaagtgcaggagaaacctcgtcttcaataaaaggcggatagactatattgttttgaatgtaccggtttgcaaacatctgcttcttccgtaaaattcagattaaacaaaaaatccggattgctccggattcttcagtaatcttttattgaatgattatttcagtttcactttggaatacctggcatttaatccgacaagcacttctttggtgatgttgtgagattcatctccaatcagaacttctgctgaatttaaaatgtagttgtattttttgtccttattgaatatcttcagataattcatgatactatctaaaagctgcttgttattatccgcctgtatctgtgacagctttgccgataattcctgatcgagtttggttatttgctgttcttcggccatcaaacgatcgcgttcacgcatggccgtttcctgagtcagaaatccaccacgttgcactttttcctgaaaagtctgtgcctgagattcaaaccggctgcgcttttcgccatactctttggtataggattcctgttgtttgctgaatccatcatgcatttcctgagcaaaatcgtaattcacaaccaacgagtcaaccttgataaaagcaatttttaatccggaagaagcattttcatcattagcaccaacttttcctgaaccatttgatttactcccgcaactaagcagaaatgaaccagtaactgcaaaaaacaaaataccagtaagtaccaaagatgtattcttcatatgcctcgtatcaatttaattttgccaaaaataaatatttattgtcactatccatcgattacgtgttttatttttcagaactgcgactgattcaattttataaatagaattttggataaaagctgcgtaaaatcatggatgtaccttgataaacatcattgaatacaagcctcaccgtaaagtatttttacactatcgaatctgaccggtaacaattcaaagatgcttaataaactgcttgcagacctgctcccttacatgcctgaaaaattgatctggattttttccaggcgatatatagcaggcgaaacgattgacgacggactgaaagcctgtcgtgaattaaacaggcaaggcattgaagtgacggttgatctgctcggtgaatttatttcaaccattgaacaggccgaagaaaataaaaataaatacatcgacatcattgaacggtttacttccgaaggaatcaacggaaacttctcacttaaaccaaccatgtttggcttgctcatcgacaaggatgtttgtttctcgaatattgaagaagtagtccgaaaggcttccgaaaaaaaatccttcgtccggattgacatggaagattcgcaatgcgttgacttcgaactggaaatctaccgcaaattgctgcaaaaatatccgtcgaccgttggtctggttgttcaggcctatctgcggcgcacaaagaacgatctggtccgtatgaacggagaccgcatcaacggaatttccctgaatttcaggttatgcaaaggaatttatgtggagtcgaaacagattgcgtacaaagaagctgaagaaatccgcgaacattacctggatgacctgaagttcatgttcgaaaacaatatgtatgtgggcattgctacccacgacaaatatctcgtcgaaagtgcattcaacatgatcaatgaaaaaaatattgatcacacaaaatacgagttccagatgctttacggagtgactcccgagttgcgaaacagcatcgtaaaacaaggacataaaatgcgtgtctatgtgccctttggcaaagactggtttggctattcgacccgccgcctgaaggaaaatccgaaaatggcatcgcaaattgtaaaagcacttttttttaggggttaattttaaggggaattttgacaagggaggtccggaaacggtctccctttttttatgaagtatccattggtcaatccacgatctcttgtttgcattccatcataggatatgggaacactataaactcgttggctgattgtgcatgttggtatgacatctttacaaatcctttcattgtctcaacaaaactgccgaacgattgaagaattacttccactgattcaaatatacgggctattcattttacagactattctattgattcaacaaaattgcctgaccactctgcaaacatttttattgatttgggcaaatagcgtatcatgtcaacaatctcatttaatgatccgtcagtttaagctgacaactatccaatcacttttgcttcctcgaaagaataagtaatgagaactatatgttgtcgtgattattcaatgcactcatcccacgaccggaggcggacgtgcagcctagctaatcgttgctactctttatacacaagttccggcctgaaaggccagaataattcagcccagggcatcccgaaacttcgggacgtgaggaacgaaccgaaacgtcgcccggggaaagggatgtagggaaaaaccgtacgcgggaattcgatgaacaaagaatataattcccttcggacgcctgcctgccgcaggcagggaattgcagaacctcattctcgggaaatatgagaccatcattttcgtccgtaacatgaatttcacttttttaaatgtcatcgcgcggacgatttctctgctcgcccataaacccagggcgttgccctgggctataatttgctgccctttcagggcgtcaaaacgaaggaatgaatacgacaatattttattcatattacttagtttaaccactgaacaagcattttcgctgagtagaatctttaagccaaattatctgcaaaaaagttattaaacaaaaataatattttcattttgctattgacttgaattgttgaattggttatatttataaatcataaactttttccacaatatatcataaactttataacgcttccactctatgaacaagtatcagaatgccaaacttgattctttgaagttgatagtaaaagaatcaaaaaacaacccggaaagtattgccaaagtacccaaatttggggtagtaatcaatcgtatcgaccagatttgtatcgaagcggatacctaccagatcgatcaggaaaaagaccttaccggtataacgaccaataaaattattgctctcgaaaacctgaccgattcaacggtcgaaatcgctggagctatattctcgtatgcctgcgaccggaatgaaagtgcattgatggccagggtaaactataagtcaacccagattgaaggaatgccccaatcgaaattaattgctaccgcgggtatcgtattggaagaagccttaaacattgcatccgcagatttggccaatgaaggcatacagcctgaagaactttcggcttatggcgcattgatttcattctttaaggaaataaaatcgtcgaaacacgaggctgttatcgatcgttcggggacgaccgaaaaactgaataaactatttaaggaatccagcagcctggtacaagataaactcgaccggctggctgttcagtttaaacgaaaagatcctgaattttatctgaaatacaaggccgcccgtgtaatccataaccgcgcagctacgaagaaagaaacagaagccgttccgggtgagccgcaataaaaagcaaatgggacattagaggtttcaccaattggtgaaacctctaaaagaaataattatagaaccgaagagccggaattctgtgttccggctcttcttttgtgaatgaaacagcatcatctgtaaaacaggataattatacaaaataatgattgaaaattgagaaatagaaaaagcgacccgcaaaggccgctttaaatgttttcacaacggaataatccttattgtgatttgcttcaaattgtatttcaaatatatgaaactaaaaccataaaacaacataagcatgaaaaaaatattagggctggatttaggaacaaatagtattggatgggcgctggtagatatagacgaaaaacgaattgaaggtatgggaagtcggataattccgatgacgcaagatgtcttagatacctttagtggggggaaacctttggaaacacaaacggccgcacgcactgcctatcgcagtacacgccgtttgcgggagcggcatctactgcgccgcgaacggttgcaccgggtattaaatattttaggtttcttgcctgaacactattccaacctgattgatttcaataaaaagttaggacaattctcaggggagacagatgcaaaattagcatacaataatagagattttctcttcaagaaatcctttgaggaaatgctgattgagttcaagcaatctcaacctcagttattttatacaaaaccaaacggaaaagaaaccaagataccgtatgattggacaatttattacctacgtaaaaaggctttgagtcataagattgaaaaacaagaattggcttggataatactaaatttcaatcaaaaacgtggatattatcaattgcgtggtgaagatgataccgatgcaacaagaactgctcaaacaagagtatattttgacacacaggtcatcgataacattactgataccggaaatgtatataaaggcttaaagatcatacaagtcactctggcaaatggagatatgggtaaatacttttccaaagatgttccaaaatggatcggatcacaaaagaatattattgcaacaatagacttagataatgacgggaatgacagactcgaaaatgatggaactttaaagagaagattttccatacctacagaagaagattgggagaaaaaatggaaactaataaaaattaaaactgagaaagaaataaaagatgcgggtaaaaccgttggggattacatttacgagagcctactcaaaaatccttcccaaaaaatacgtggaaaattagttcgcaccatcgaacgtaaactatacaaggaagaactcgttgacatactcaaaaagcaacttgaattgcaacccgaattcttcaccgatgatttgtataatgaatgcctaagtgaactttatcggaataacaaagctcaacagctcgttttgagcaagcgggattttgttcatttcttcgtagaagacatcatcttttatcagcgtccactccgaagtcaaaaatcttcaattgggaactgttcattggaatatcgggtatataaagacaaggatggaaatcaaatcaaagaatacctgaaagttatccctaaatctcatccattatatcaggaattcagggtatggcaatggttgtcaaatctcaaaatatctaagaaagaagatgatattgatgttactgcacaattcattaaaaatttagatgacaatgtaagtctttttgaatacttgatgttgcaaaaagaaatcggacataaagacattctcaaacatttgctttctccaatattgaaagaaaaatatccaaacgcaaaagcggcagcattcaacaaagaggttgataaagaaatatccaagtatcgatggaattttgtttttgacgattctaaagagaaagaagaagataaatcaaaaaaatatccttgcaatacaactggctatgaaatcaggcggagattggaaaaagtagcagatgtatctgatgattttcttgaaattacggatatagaagatgtagtaattaaaaaaggggaaaataagggtaagaagataactgtgtcattaggaacaagagaaattcaactttggcacataatctattccgtaaccgacaaaaacgaatataaatcggctcttggtaagtttgcaaaaaaatatttgttagatgaagattcgttcgttgcaaactttgagaaatttccacctttcaaaagcgaatacggctcttattccgaaaaggctattaaaaaaattttaccattattgcgaatgggtaaatattggaattggatagctattgacaacaaatctcaagtcagaatagaaaaaatagttacaggcgaatatgacgagaacattaagaatcgtgttagggagaaaaccataaatcttactgacaataatcattttcaaggtttgccaatttggttgtcaagttatatcatctatgaccggcattctgaagctaagaactcagatcaatggcaaatgtcacaagatattcagcaatatctgtatagttttaaacaacatgaacttcgtaatccaatagttgaacaaatcatcacagaaacattacgagttgttaaagacatttgggaaatctatgctaataagagtaatatcccatattcaatggtttatgatttaaaaaagaagaaaaatgtaaagagctacaactgtttcttcgatgaaatccatgtcgagttgggacgtgaaatgaagaataccgccgatgaccgtaaatggctgacagagcaagtaagcaacaacgaggctacgaatttgcggattaaagctttgctgatggagttgaaggaaaattcagatggaaaacttctcgttgagaacgttcggccacattctccaatgcaacaagacgcgttaaagatttatgaagaatatgctttacagaataatgaaaagtatgatgaaaacaaaaaagaatttattgtgtatccaattgctgaagatattctaaaaatcagcaaaacggctcagccttccaaagcagaacttcaacgctataaattatggctggaacaacgctatcgctcaccatatacaggaaatatgattcctcttgggcggttattcacagaagattaccaaatagaacacgttataccaagatcacgctactttgataatagttttaacaataaagtgatttgtgaatctgccgtaaatcaattgaaagataaatttctcggtttagaatttattaaggaatattttggacaggaagttgaattgggtttaggcaagagggcaagaatctttactgaaaatgaatacaaagactttgtcaaagaccactattcaaaaaataaaaccaaacgacaaaaccttttattggaggatattccagaacaaatgatagcacgtcaaatgaacgacacgcgctatatcagtaagtatatttcgtctctgttatccaatattgtccgtgcagacaaggaggatgacggaattaattctaaaaacctgattccgggaaatggtaaaatcaccacggctttgaaaaaagattggggcttggattccgtttggaatgatttaattcttccacgttttgaaaggatgaatcaactgacaaatagtgatgacttcacttattggaacgaacaatatcaaaaattcttaccagttgactattctcctgcagattcaaaaagaatcgaaaagaaaagaattgaccatcggcaccatgcaatggatgcattggcaattgcttgtatgacgagagatcatgtaaaccttctcaacaatcaatctgcaaaatcagaaacttcaagatatgatttgcaaaacaaattaagatgtaagagtagagaaacatggtttgacaagaaaataaacaagcaagttgaaagagacgtgtttaaagagttcaaaaagccctgggataccttttcaactgatgcaaataatgctttaaaaactattatcattagcttcaagcaaaacctccgagtaatcaataaagcaaccaataattacgaaaaatggattgaaaaagatggcaaaaaagtcaaagaaaaagtaaaacaagaagggataaattgggccataagaaagtcattacacgaagaaacggtttcaggtaaaatagatttaccgtgggtaaatgtatcaaaaggaaatttcctgacagcaactcgtaaaaatatagattcgagtttcaccattgaaaaaacaagaaaaataactgacactggtattcaaaaaatactcgaagagcatttaaaacagaatcaaaacaatgctgatttggcattctcacctcaaggacttgaagatttgaatagaaatattgcagaattaaatgacggaaaaaatcacaagcccatttttaaggttcgcctatatgaaatgggaagtagtagattctcattagggttgaagaacaataaacaaagtaaatttgtgcaaggagctccaaacttgtattttgctcgatattcggacagcaacaataaaaaggtctatgagacaattcctttaaacatcgttattgagcgcttgaagcaaggattggaagctgttcctgaaaaaaacaccgaaggatattccttacaaaatttcttgtctccattggatttggtttatctacctactgtggaagaatttgatatgccacatcttatagatttttctaaattaaacaagcatcaaatagaaagattgtacaatgtcaatgatttttcgggcgtaactgcatattttatccaaaactctttcgcaaaaaatatttatccaaaagaaatggatctgagttggaatgacaaaaaacaaaagctttcgggatcatttgattcaaaaacagcttcatataataaaaggtcgataaaagagatatgcataaaattaaaagttgatcgcttaggcaacatttcactatgaagatcaattatacaggtttcaccaaattggtaaaacctgtataacaattaaactttaaaacagaacgccatgcctgcccgtaactttcgtattccgattgaacccgggaaattctatcacatctggaaccgggggaacaacagggaaaacctgttttattcgtcgcataattacgaatactttatccgcttgtatgccggatacctcgatccggtagtcgaaacctatgctttttgtttgttgccaaaccattttcatttgctggtacgaatcaaatcatttttagaggtttcacccgcgggtgaaacctctaataccagaaaaagcaatccggtaagccttgcctttcaacgattctttacggcctattcgcaggccataaatattcaggaacgacgcacaggaagtttgttcgagaaaccatttaaacgactggagatttcttcaacccggcaactggccaatctggttcattacatccataccaatccgcaaaaacatgggattattgatgatttcagacaatatccctggagtagttacacccggatcatcagggatagaccatcgaaattaaaaaaggaagaagtgctgaactggttcagtaccaaagaaaactatgtgaattaccattcccgcacaattgatctcgacgaactaaaagatatgatcatcgaatgaatacaaatccaggattcattcatgggtgaagaaaatcttgcaagacatagcatatcaatacaggtttcacccgtgggtgaaacctgtaaaaacaaaaaccaaaacaaactcgcatgatcaaacgaaccctgtattttggaaatcctgtttgtctgaataaaaaaaatacgcaactgaaaattaccgatcctgaaacactttctgaaaaagcaagaattccagcgcaagatattgctatcctattagccgtcaattatcaaataacaaatccccttgcattaatcaaatccaggtttcaccgtggactaacaaaatcttgcatgactatgcatatcaatacaggtttcacccgcgggtgaaacctctaaaaacaaaatcaaaaccaaaacaaacccccatgatcaaacgaaccctttattttggaaatcctgcatacctgaataaaaaagaccagcaattaaaaattactgatccagaaacgcaggtcgaaaaagcaagcattccattggaagatattgcggtcatactactcgataactatcagataacaattacccatgcgttgatagcagatttgatcgaccggaatgtggccctgatcagttgtgatgccaaacatttaccatcgggcctgatgcttccactggatgggaaccatgtgcaaaccgaacggttccggattcagattgctgcatcagaaccattgttgaaaaatctgtgggcacaaaccattaaagccaaaattgagaaccaggcagccatgctcaaacgggccggaatggaagataaacagttgctggccttggttccgcaaattaaatcgggcgaccccgacaataccgaaggacgcgcggcagcggtttactggaaattagtgtatggcgcacacggatttacccgggataggtacggcatagaacccaatgcacatctaaactattgttatgcagttctgcgcgccatcgtagcgcgcgccttagttagcagtggaatgttacccacccttggtattcatcaccggaataaatacaatgcctattgtttggccgatgatgtgatggaaccttaccgcccgttctgcgacgaactcgtgtatcaattgttttcatccggaacaatagaatcggaagagattacccgcgaacaaaaagtccggttgctgagtattgccacctgcgatgttctgattgatggtaaaaaaagccccttaatggtggcactaagcc

SEQ ID NO: 1413 - DNA, 13296 bp, synthetic construct
  source 1..13296: mol_type = other DNA
  misc_feature 1..13296: note = Synthetic
tgtcgccgccttcttataaagagcaattctgataaagaattgctctttttttattttaaaaattaattgtataccacactaaacaaaatgtcaaagagcgtgtttttaggctgcaaagttgcagctattttgttcttaggcatagttgtctcatagtggaacaaggttgtaaagaaggaatagctaatatacttattttacagttttattcttttctttgtattgtataaataagcaaaaaacgcccaaaagcatttatgcttttgggcgtttttataagttcttttatatgctaaaaactattctcttttttaatataagttcattttcaaagaaagaaagtaacttatttataacatctttttcacgtttttcaatatcttccttcacccagtcagatttaggatattttgagagagtctgaactgtagctatttcagactctgcatatttgttttttttcagtgcaaaatattgatttccagcttgtatattgagcctcttttcaaaaatagttttattacctaatttatctaaatataaatcagcatcatctctttcccaaccattatagtttgtattttgccatttcttagggaaaatgtgttctatatcaaagttgttgtttattaaatttgtttgattttcatctaagtaagcataaagtaatagaagagctctagtcattcttgtagaagaaccaatgctttcaatacgctctcttaaagaatctttattaaactcaatattgtattttagtttgttttcagtgtgtaatgctatacaagaatcaaaaatatcatctctaatgacatttactgatggagcatatataaatttgacaaataagaaagctgtaagttctttgagtatagaattaaatttttcatcaaaattagaagtctttctattttggcaaaaaaatacgcttactggaaatttccaaaactcattagggtagtagtttaaacattggatatatttccttgtatcatcagatatattataagggtattgatcaatagctttgttagtatttagatatctccaaaaaatagcaagatctataatgtctgccaataagttagggcttctgagcttttcgtacttattttcagcataaaactttcttaatcctatttctcttgatttgtcttttttttctgccctaagaatgtgagtgtagtatttaaagacatcatcaatgctaaaatttccttcttcacatatttttgttaattctttccactggtcagtaaaatcttttttagcttcaccttcataacttctgtataactgtgctttaaatatatcagaatcagcaagaggcattcctctatcatttaaagtagaaaatatagtaagggcagtatcttgtgtgtcgcattctattgggagaattacacattgttcaagaattgttacgcagaagtcattccaatgcaaaggattacttttggcatattcattacactgctcaagaaagaaagcatagttaatagaataattgtcttgtttatttttatcaacttctcctatttctaagattttatgaaaagtattattatcctcatctgtagcaacttcagaatgaatatgaattttagttttatcttctacttgttgtgatattctgcttacttcccaaatgcaaggtgctatttgatttttaagtcccgttacattagaatcttcatccatcatttcaagttttttataaaaagctcgtagtaacaacataaaagatgtaatacgctgttgcccatctattatttcaggattcttatcattatttgtataagagacaatagtacctaaaaagtagtctgaatgttttttagcttctgttgagtaaaactctttgatatcttcccatagtgttctacatttatcaatatcccatttgtaaggacgttgataatcaggaataataatttttttagtttttaactctgagaagagttctttaatactttttttacttacgataaggtctgccattttttatatgtttttatgagtttctgccagcaaatatacaaattaaatgataagtacgtccttttgccttgtttttttatttcggaagcaaaaatataataatagggtgcaacaacttgtcgttttgaaaaaactttatacttttgttgaaaaaatattgaaaatgagtttatcgaaaatgttttcaaggcatcgttttattgttgaacgattgcgtatcaaaccctgtactagtgaagaattagagaatgcttgggagagaagtatagagaatacagaggagcaacctcttgctaagcgtactttacaacgtgatattcaaattgttaaagaagtttaccatataattattaagtttaacaaatctcttaaagcatacgaaatcacagaagataatgacccctatacccaaaatctcttcgaggcatttgatgtgttcagagctttgcaaaattacggtaatctttctaaagttattcagtttgataggcgattgcctgcggggacggagtatctctcacccttgcttagggctattaaagaacatcgtcagctaaagttgcactattataagttttgggataaaaaccaacaaccggtggtgcgtacgatagagccttatttgctaaaagaggcgcaaagacgttggtatgtgttggcgtgggatgtggagaagaaagcgctacgggtgtttggcttggataggattacccatttagatgacagcaaagatattaaatatcagcacgctgtacctgagggtgtggagtgttttttcgacgatagttttggggcgtgggtagatagtgagcacacacaagcagaagaggtggtgcttgcctttaaaaaattgcccaacgattcagtttttatgcctaatccggcggaatacctcaaagcgatgcctctgcattcttcgcaagaggtagtgagagaaactgacaatgagattgtactcaaactgcgcttaaaaattacaccagactttgttagggagatacaatcgtatggtgatagagtgaaagtactatcggataatgtgttaatttgcaaaaaatagcgtgagttcgatgtaaaagatgttagtgaatgcttggagctgggtatgtgagagattatgtctcagaatgtcgtagcacaataggcaatgcggggcacacaggtaggtgataattagcaaaaggtgagaagaattggcaggagaatcttgtatgattattatggaaaaggtgtataagtagttaagagttaaaagttttttgaatggacaatgaatagtaaaaaaattgtagggtaggagaggtatttggaatttagggtttattcgaaggaaagacgaacaatgaacgaaggaaagacgaacgatgaacgaaggaaagacgaacgatgaacgaaggaaagacgaactcaagacgaatttaaagtgaagctaaggagaaggaaagaagatataatgatgaattttttggcaaggtaagaaggaagatgtaagtggaatgcttccgttgatgaggagaaaacagcatattaacaaatctgagagagaaactcaggagggcttggagagtaataaaaaaagatattttatgagagtagttattcagcgtgtaactcacgcatcggtggatatagacaagcaaacagtagcttctatcggtagaggcttattggtattggtaggtatagaagatggtgataccaatgaggatatagcgtggttatcggctaaaatagtgaatttacgcgtttttgacgatgaaaatggggtgatgaatctttcggtaaaggacatagaaggagaagtgcttatcgtgtcgcaattcaccttgcacgcctctactaaaaaaggtaatcgccccagctatataaaagcagcacgtccagaagttgcaattcctatctatgagacgtttataaagcaagtggaaagtttgttaggcaagcgagtacccacaggacagtttgggacgatgatgcaagtagccttgtgtaatgacggtcctgtaactattcttatagatacaaaaaataaggaataaaaaaagccccgaatatagtcgaggcgctagatgttttcacaacggaatcatccttattgtgaattgctttcaaattctgcgacaaaagtaggtataatatttttaatgtgcaaatatttttatataaaaatttttattacatttgtcctttctaaaaacattataccaatgaaacacatattaggcttagatttgggctcaaactctatcggttgggcttttgtacaacaagattttgaaaacaaacaaggaagaattattgctactggtagtaggattattcctatggatcagggtatattaggtgactttgagaggggaaatacagtttctcaaactgccgaaagaactacttatcgcagtacacgtcgtctgagagaacggcatttacttcgccgtgagcgacttcatagagtacttcacatattaggttttttacctcctcactatgatgctcaaatagactttaccaaaagatatggtaaatttatagataatgctgaacccaaaatagcttataacaatgggaattttatctttatgaatagtttcaatgagatgattgaggatttcaaaaaacactaacctcagttattctacaagaaatctaatggcgaagagagtaaaatcccttatgattggacaatttattaccttcgcaaaaaagcactctcacaaaagattacccaacaagaattagcttggcttatacttcacttcaatcaaaaaagagggtactaccagttacgaggggaagaagaaactgaaaaccctaacaaagaagttgcttttcactctttaaaagttgtagatgtagaggctgaagctcctaataaaaaaggtgagatttggtatacaatccgtttggaaaatggttggatataccgtcgcacgagtaaaattccattggacgactggaagggaaaaacacgtgatttcattgttactaccgaccttaatgatgatggcacgattaaattagacaaagaagggaaagaaaaacgttccttcagagcccctgacgaaaacgactggaatttactcaaaaagaaaacagagcacgatattgatttttctggaaaaactgtaggtgcttatatctacgaccatttgttgcaaaaccctaatcagaaaataaaaggtaaattagttcgtactattgaaaggaagtactataaagacgaactaaaggctattttggctaaacaaatagctcttcaaccagaattgttcactgaaaccctattggcggactgtataagagaattatatcgcaaaaacgagactcaacagcaaaatctactatcaaaagatttccctcatctgtttgtagaagatatcattttctaccaacgcccattgcgtagcaaaaaatctactattgccaattgtaccttagaaaagcgttcgtatatagataaggaaactaatgaacgcaaagacgctcctataaaagtatgtgccaaatctaatccttactaccaagagtttagagtgttgcaatggctacaaaacttgagaatttacgaaatagaaaccgaccgtgagataactgctgagtttatcgaaacagccgaagactatgaggctctcttcaacttcttgatgtctcaaaaagaaatagataacgaaggtttactgaattactttttgtttgcaaaaaatcctcaaattaaagacaaagtagctaaaagcgaacttaaaaaatggctcactacttatcgctggaactatgtgtatgatgcggcggataactcttccaaaaaataccctatgaatgaaacaggctatgaccttcagcggtacttgcagaaagtagaaggactccccgctaattttctaacctttgatataacatatcaattgtggcatttgttatattcggtgaaggacaaagttgaatttgaaaaagcattaaagaaatttgctcaaaaatatcaattagacgaagtatcgtttgtagatagtttcaagaacttcaaaccctatcctaatgaatatggtagtttttctgaaaaagcaattaaaaagttacttcctctgatgcgttttggcaatcattgggactttaatcgcattgatgtatctactcaaaaacgtatagacgaccttattaatggagtggcgaatgaggatatccgtactatcattagagaaaaagcagagaaatatcagctcaatagtgagagctgctttcaggggttaccgctttggttggcacagtatgtagtctataaccgtcacgccgaagctaccgatatagaaaaatggacttcagtgagtgatttagaaacatatttagaagatttcaagcaacattcacttagaaatcctatagtagagcaagtagttaccgaaactttacgtgtagtaagagatgtttggcaacaatacggtaggggacaagctaatttctttgatgaaatacatatagaactgggtagagaactcaaaaagacagctgaagaaagaaaacaactttccgataaaaatcaagagaatgaaaataccaacctacgtattaagaaattgcttgccgaattaaaagaagatgcaagcatacaaaacgtgcgtccgtattcgcctgtacagcaagaactgcttaaaatctatgaagaaggtgtgtttagtgctaccgatgaagtagaggaagatattcagaaaatacgtaaaaaagctgagcctaccacccctgagatacaacgctacaagctctggttagaacaaaagtataaatcgccttatacgggagaggtgatttcacttacaaaactatttactgaggagtatgaaatagaacatattattccgcaaagccgttattacgatgatagtttatccaataaggtaatatgcgaatcggctgtaaataagctaaaaacaaatcaattaggattagaatttatccagaatcaccacggtgagaaggtgcgcataacagctaataaagaagttactatcttcacagaagaacaatacaaagagtttgtgaagaaacattacgctaacaattcagctaaacagcaaaagctccttttgaatgagatacctgaaaaaatggtcactcgccagctaaatgacactcgttacatcagtaagtatatttcagaaatactttctaaaatagtgcgttcagatgaaaaagatgagggggtaaactctaaaaatataataccttgtacaggtaaaattactactgccctcaaacaagattggggacttaatgatgtctggaacgagcttattcttcctcgttttgagcgaatgaaccagcttacccaaacacagctatttacctcatataacgacagacttcaaaaaaatctccctactgttccaatagaatacagccaaggttttcaaaagaaacgcatagaccaccgtcatcacgctatggacgccttagtgattgcttgtgttacgagagagcatatcaattatatgaataaccaacacgcattggataagagtaaggataaaaaagaaaaacaacaatctcgcatagaccttcgcactatcctctgtgagaaaaagaataataactggcagttcaagaaaccttggagtactttcactcaagaagccaaagaagccctcgaacatatagtagtaagttttaaacaaaacctaagagtgattaataaggctaccaactattatgaaaaatgggaagagaaaaatggtgtacttgtaaaaaagaaagtaaaacaagaggggactaattgggctatcagaaaacctttacacaaagaaacggtttcaggtaaaattgttttggatagaaaaataggtaaagataaaatacttacagctacccgaaaagcagtagatataacttttacagaaaagattatcagtagtattaccgatacgggcattcagaaaatattgctcaactatctgaaatataaaggaagtccagaagtagctttttcagcagaaggattagaagaactcaacaaaaatattgcccaatacaacgatggcaagaaacatcagcccatttataaagtgcgtatttttgaagaaggaagtaaatttcctcttggagaaacgggcgctaaagctactaaatatgtagaagcagccaaaggaacgaatctcttttttggagtatatcaaggcaaaggaaaacgcacttatgcaacgatccctctcaacgaagtaattgaacgacaaaaacaaggacttccttctgtccctgagcgcaatgaaaaaggagaaccattgttgtttagtctttcgcctaacgatttggtatatgtgcctatggaaggagaaatcgcagagacaatagattttaataatctcagcaaagaacagaaagaaagaatttataaaacagtgagttttacaggaaatcagtgtttttttgtacaagaagcagtagcaacccctattgtaaataaaatggaatattcaccattgaataaaatggagagagatattctaggaacaatgataaaagaggtctgtatcaaactaaaagtagaccgcctaggaaacatcaccaaagcatagaaatctttttaaaaaccaataaacaccctttaaactatgttataccgttctatttacatcggcaatcctactcatttgaagttgaaagataagcaactcaaaataacagaccccactacccaaactgtaaaagggagtgtacctattgaagatttgggtttgctgatgcttgaccattatcaaattactgtttcacatcagttattgcaagagttgatgaagaacaatgtggtgcttatcagctgtgatgaaaaacacttacccttaggagcaatgcttccttttagtggaaatactcaatattccgaacgagtgaaaacacagttggaagtgagcgaacctcttaaaaaacaactttggaagcaaactgtggaatgcaaaattcagaaccaagctaaggtattagaacatttaggaaagtatgccgacccgatgtacgactatctaaaagaagtaaaatcgggcgatacaaccaatatggaaggcattgctgctcaacattattggaagtaccttatcgattatgattttctaagagatcgatttggtgagtatcctaatcagtttttcaattttggatatggagttttactcagtatcgtagcccgcgcattggtagatacaggtttactattagtattaggaattttccatcgcaataagtacaacccctattgtttggcaagcgacataatggaaccctaccgccccatagtagatttattggtaatggaatggctcacaacacatcctgaagtagaagaactcaacaaagaaagtaaagctcatatactgcagatggcaacccgtgatgtacagatagaaaagaatatccaccccttgatagtggcagtaaagaacacaacatcttctttatacaaatgctatacgggtgaaaagcgactgatagcttatcctgaattatgatcatagccgaccgatacaatgcttatagaattatgtgggtattagtattatacgatttgccaacagaaacgaaaaagatgcgtaaagaagcacagaactttcgtgataaactcataaaggacggttttacactctttcagttttcgatgtacgtaaggcattgccctagtagagagaatgcccaagtgcatatcaatcgcgtaaaacaaaacttacctcagtatggcaatatagctattatgtgtctaaccgataagcagtttggagatatggagttcttttactgtcagagagaaacagcagctcccgaaacctatgtgcaattagagcttttttaagaagaataggaaagtaaaacctcctcttttgccttataaacaaaggtaaaagaggaggttttttcagtactgtttttaagcaaaaccgattgatactaaaacctttaaaaggttgaggttgttatcaatcgcaaaactacaaaatttgaaagcaattcacaactaaaacagaagttcttagcacgcgataagcgttgttatcaatcgcaaaactacaaaatttgaaagcaattcacaactctactcacctctctacttatctctgatatgttgttatcaatcgcaaaactacaaaatttgaaagcaattcacaactaaagtctatggtttgatcagggaaggattgttgttatcaatcgcaaaactacaaaatttgaaagcaattcacaactaaaaaaggattcataaaaaagagcagtttgttgttatcaatcgcaaaactacaaaatttgaaagcaattcacaacacaatttaactaaaagaattgaaatgttacgttgttatcaatcgcaaaactacaaaatttgaaagcaattcacaacaggattcattaataaaatcagataaactttgttgttatcaatcgcaaaactacaaaatttgaaagcaattcacaaccgcaatattggttattggaaggagttaatggttgttatcaatcgcaaaactacaaaatttgaaagcaattcacaaccttgaactaagcagtccgtaaatcctctaagttgttatcaatcgcaaaactacaaaatttgaaagcaattcacaacagctgtaggtttacttccttctgcttgttggttgttatcaatcgcaaaactacaaaatttgaaagcaattcacaacccattcggtggcagtaaaacctaatacatcgttgttatcaatcgcaaaactacaaaatttgaaagcaattcacaacggttattatcctactccggtatttaagatggttgttatcaatcgcaaaactacaaaatttgaaagcaattcacaacaatcgcttggataaggtcccattcttgttcgttgttatcaatcgcaaaactacaaaatttgaaagcaattcacaaccaactgatagagaacaaaatgctatattttagttgttatcaatcgcaaaactacaaaatttgaaagcaattcacaacctaattgacaaataaaaacaatgaaacaaatgttgttatcaatcgcaaaactacaaaatttgaaagcaattcacaactgttgtggtattgttcctctttaacttgtagttgttatcaatcgcaaaactacaaaatttgaaagcaattcacaaccaaaataccgcttgacccacaagttattaggttgttatcaatcgcaaaactacaaaatttgaaagcaattcacaacgctttcacgcctccttttcatataagaggcgttgttatcaatcgcaaaactacaaaatttgaaagcaattcacaacaagagataaaagatgcaggtgtacgcctatgttgttatcaatcgcaaaactacaaaatttgaaagcaattcacaaccgatttaacacgaagcaatcgatgcaaccgttgttatcaatcgcaaaactacaaaatttgaaagcaattcacaacaaaattgactattatggcaaaagaaaaagaagttgttatcaatcgcaaaactacaaaatttgaaagcaattcacaacagtaattccaaaaagcaaacctctttcttggttgttatcaatcgcaaaactacaaaatttgaaagcaattcacaacacgatacgaaggaaacagccgtgagcccttgttgttatcaatcgcaaaactacaaaatttgaaagcaattcacaacagagtaccctttcgcactctcccatctattgttgttatcaatcgcaaaactacaaaatttgaaagcaattcacaactaatagcgcgttgcatctctctaccattctgttgttatcaatcgcaaaactacaaaatttgaaagcaattcacaacacgaatgtataaagtattattttctcccttgttgttatcaatcgcaaaactacaaaatttgaaagcaattcacaacgtataaggacgtggattttccgcgctcacgttgttatcaatcgcaaaactacaaaatttgaaagcaattcacaacaaacgagattgtgtttttcacctctataggttgttatcaatcgcaaaactacaaaatttgaaagcaattcacaacaaacattggtaacggtattggttggcttatgttgttatcaatcgcaaaactacaaaatttgaaagcaattcacaacatgtagcaaaaagtcttaaatcatctaagtgttgttatcaatcacaaaactacaaaatttgaaagcaattcacaacaataacatacgccctatcttgcgactctcggttgttatcaatcacaaaactacaaaatttgaaagcaattcacaacaaccaagcacgtaatgctttgattaattttgttgttatcaatcacaaaactacaaaatttgaaagcaattcacaaccagaaattgacaaacacgcaattgctaattgttgttatcaatcgcaaaactacaaaatttgaaagcaattcacaactcacttcatacttgtacttaccattaggtagttgttatcaatcacaaaactacaaaatttgaaagcaattcacaactacatctcttgtatccaccctggtttgagggttgtttatcaatcgcaaaactacaaaatttgaaagcaattcacaacagcgtgattgctcactgccatatgcgtaccgttgttatcaatcgcaaaactacaaaatttgaaagcaattcacaactcacttcatacttgtacttaccattaggtagttgttatcaatcacaaaactacaaaatttgaaagcaattcacaacgctaactccatagggtcatttggcgatggggttgttatcaatcacaaaactacaaaatttgaaagcaattcacaactgccaaagaacagtataaaaaaagaaaattgttgttatcaatcacaaaactacaaaatttgaaagcaattcacaacccgaatgagctatactattcagatgcctaagttgttatcaatcgcaaaactacaaaatttgaaagcaattcacaacgctcacaagtgcgtgtgttgaatgaggaaagttgttatcaatcgcaaaactacaaaatttgaaagcaattcacaacaagatgggattaaaagaatttaatgacagtgttgttatcaatcgcaaaactacaaaatttgaaagcaattcacaacgcccaaatgtacctttttattaagggcattgttgttatcaatcgcaaaactacaaaatttgaaagcaattcacaacataaatgtttaatttatcaaatagttcaacaataaagcgcaaagatacaaaaaaaatattttataagtaacaaagcataaaaaaggttgcccagacttctgagcaacctctttc

SEQ ID NO: 1414 - DNA, 13141 bp, synthetic construct
  source 1..13141: mol_type = other DNA
  misc_feature 1..13141: note = Synthetic
gttctcccatttcatcggcaactttaactagcgtttttacgggtagtaatcactgcgatatgttcgtttttgatgaagtgattcaagattggagatacgattttcagttgggtaattcatggagttgtttgggaaatacgggaacttggtcagcatctaatttggcaacgaatggagcagatggaattatggatatttccagaggatatttaatgcccggttctcctacaaataccacgcgttcttttaccggagaaatcaacaacggaacttatacttacagtgttgtagaaaccgattctgttactgacccttcatcaggtggtaacgattggaatttgatcggaaatccttatccgagtgctatttctttagacgattttctttctacgaattacaatggtggaacgggtgatattaccaatgctgtttacttttatgtgcgctctggaggatcattaaccagtggtcaatacgagacatatacatctggtgataacatttacattggctctgctcaaggattttttgttgaagcattaaacgatggaactgtcagctttaccaatgccatgcgcgatggagataacacaactttcagaagttcgtcaaataatcatcaggtggcttatttccatttagaaggaaacggactttctgatgcatttcgagtttatattgatgccaatgcatctgatggtgtagattatgtttacgacatcagcaaaatgtacaattggaatggttttaacgcttacacaagcattgatgatcgtgatttcgtattccaaagtattgaacccataaattttaaccaatctaagcgtattctgttaggttttgagattccagctgatggagcttacaccttggttttagactcaacaaaaggtgattgggataatctaaagctgttgttgcgtgataaagaaaatcagacgttgcaattggtttctgatttatcggctataaacctcaacgcaaacacctataaaaatcgtttcgaattgttgattcagagggttttagaaagaactcctgatgagtgtgaagatcttttagctccgccagattcaaactttactggaattgaatcggtagcttctaatcaagtggtaattataccaaaaaacaaagctgctgaactcattagtgatgcatccattaaatcgtgttctgtgtatgacctttcaggcagattaattcatagtgccaaagtcaatcaatctaattatttcttccgagttgataatcacggagtgtacattgttcaagttcatttgcagaatggtttaacagaaactcgaaaagtggctctttaagtagaattaaagctatgcttttattgtaaattcagaattattatctgttttgaaatttaatttttgttgattatcaatcagttgtgttaaatctctacagttaataggtagcgggttatttttacagttctcaatcaatcagctcctcttagttatgaaaatatattcttttttaaaccaaatcagttggcttaaatcatacgctcacaaatttttaatcatcacttttttaggtatacacattcctttaattggagtgatactgtttattcttttcagtacgaatggctcttttacaaatggagaaattattggaattgtattggcgctaacgttggttgctacaggaattacactttgggttttgaatcaattgatcaagccagtatccctagcatctgaagctttgaaaaaatacagagaatcgaaggagattattaccattccaacttcgtacaatgatgaaatgggtcagcttttaaaagacttaagagctaccattaaagtaactgatcgggtaattcgtgagaaagaagacattattggtttaatctctcacgatatcagaagttctataggtacaatgattaatctcagtgaggttatggaactagacgccaaagatgaaaccattaaaatggaggctcacgagcttcaaaagttaggaaacaaaacacttaatattttaagagatacgctcttattgctaaaaacggatagcattggaataagtgaaaaatcactttctcctattttaatccatcagttcataaattccgaattaaaggtacaccaacctaatattgagcaaaaagatttaagagttgagttacttgtttctccaagtgatgaaataagatgtcagcccgaatttttgcagcacatcattgataatttggttacaaatgccattaaattttcacacaaaggaggcttgattcgtattaaaggtcgacaagaagatgggcagtatattttatctgtaattgatcaaggtttgggttttgatcctgaagtgaaagagcacattttcaataagtttacgaagtacggtaaacaaggtacgatgggtgaatcatcaagtggattaggcttatacctctctcggttacttgccgaaaaacaaggcgggaaaattgaagctcacagcgaaggcgaaaacaaaggagcacagtttacagtgttcttaagtgcataaaacagaaaagcatcacctccaattgaagtgatgctttttactttataccggtttaatttatctggaagcttttaaagcttgcgcgatatcagttatgatgtcatcagcattttctaacccaatagaaaaacgaacaaaaccagcttcaattccaacagctaatcgttcttcttcagtcatttttgaatgtgttgttgatgccggatgcgttgcaatagttcgcgtatctcccaaatttgctgaaagcgaaatcatctccaaagcattcaagaattttctacctctgtctaatccaccttttactaaacaacccacaagtccaccgccttttttcatttgtgctttggcaatttcaactcttggattggaatgatgaaacggataaagcactgcttcaacatcatcgctttgatctaagaaatcaactactttttcggcattatcgcaatgtctgtccattcgaacagccaaggtttctaaactcttagaaagtacccaagcattgaatggcgagagagcagctcccgttttctttacaaagtcaaagcaagcatcaacgtattgtttcttgcccaaaatggcaccacccaaaacacggccttgcccatcgatgtattttgttgctgaatgtaaaactagatcagctccgaatttcgttggttgttgcagatatggagtagcaaagcagttgtctacaaccaaaatcagttcatgttttttggctaattctcctaagaatgctaaatcagcaatctttaaagttgggtttgaaggtgactccacaaacaacatcttcgttttaggagtaattgccttttcccatgcctcgttctcatcaacaggaaccaaagagaaatcaaccccttgtttgggtaaaatttcagttattacactaaatgaatttccaaagatggcacttgatgaaactatgtggtcaccctgtttgagcaaagcgctaaatgtaccataaacagcggccatacccgttgcagtagtaaatccagtttcggtaccttcaagtaggcagagtttttctgcaagttcgctgttattcgggttggtatatctcgaataaatattaccctcttgttcaccagcaaagagactttttgcttcttcagccgactcaaaccagtaactagaagttaggtacaaaggagccgaatgttctttctgatgggtgcgctccatttgtgttcgtatggccagcgtttcaaagtgtttgctgttcttcttcatttaaaatgggtttgatttcgattgtggcagtttcttttaaaattttgtagacagagcagtaagtatctctacttaattcaatggctttagtaaagtcagatgctttcacctcgcctttcacatgtatttcaaccgttatggttttgaatattgatggaacaccttctgtgcgggttgctgctactttaactcggtagtcatcaactgtttgtcttttcttgtataatatgttcaaaacatcaatagacatacagctagccaaagcggttaacatcaattgcatcgggcgaaaaccatgttctgtatcacccatagatgctgccgctccaataggaatttcagctaatccatttccagctttaaagtggaatttatcatttattctggctacttctatttccataattcaaggaatgtagattcgaagttatcaaaaacgcttcaccgcccttaaagtttaagccatttaccaaatcattaactagtgtgtaatgattctaatttaccagaatgagaacaattggcttatttattgaaataaaacttcttattttagaatactctaaaaccaaaaaccagtgaaatgacttcaaatctgcaccaccgaatttcaaaggaaagtaatagaaaagaaaaagccccggagatagccgaggcactaaatgttttcacaacggaataatccttattgtgaattgctttcaaattgtaatacaagtataataaaataacctctatataatgaaaagaattttaggattggacttgggaactaactccattggatgggctttgattgaacaagattttaagaaaaagcaaggtaaaatactagggatcggaagtcgaataattccaatgagccaagatttaatcggtgatttcggaaaagggaatacaatttctcaaacagctgaaagaacgagttatcgtggagttagaaggttacgtgaaagacacttacttcgaagggaaagattacatagagttctaaacgttcttggatttcttccaaaacattatgctctgcaaatagattttgaaaaaagattagggcaattcagagaaaatctagaacctaagctggcatggaataaaaatgagaagggcaattttgaatttatttttcaagagtcgtttgatgaaatggttgaagcttttgttgcaaatggccatgattcgaagattccgtatgattggacaatttattatttacgtaagaaagccataactcaaaaaattaaaaaagaagaattagcatggataattctcaattttaatcagaaacgaggctattatcagttgcgaggggaagaagaagaagagaacccaaataaacttgtagaatttcactctcttaagattgttgacatccaatcagatgaagagctcaataaaaagggagaaacttggtattcattagttcttgaaaatggatgggtatatagacgttcaagcaaaactgatttatctgattggaagggaaaagtcaaagacttcattgtaactactgatgttaatgatgatggatctataaagaccaataaagagggtgagccgaaaagaagttttcgagctcctaaggaagatgattggactttacttaaaaagaaaacggaacaagaaattataaattcagataaaacagtgggagcgtatatttacgaagctttattacaaaatccgtctcagaaaataagaggtaagttagttcgcactattgaaaggaagttttataagaaagaattaaaagctattctgaaaaaacaaattgaattacagccagaattatttacaaccgatttatacaatggctgcataagagaattgtacagaagtaatgaagggcaccggcttcagttaaaaagcaagaatgattttgttcacttgtttttaaatgacattattttttaccaacgccccttgaaaagtcaaaagacatcaattggaaattgctctttggagtataaaacatacaagattaaagacggactagagcaaactcaatttcttaagggtattccaaaatctaatccttactaccaagaatttagggtatggcaatggatgtataacctaaaaatttattctaaaaaagatgatgccgatttaacatcaaaattcattaaaagcactgaagatcaagaaaagttgttcggttttctgatgtccaaaaaagaagttaatcatatagacattttgaattatttccttgaacctttagtaaatgcaaaattcccaaatgcgaaaccaaaagctttaaaaacggagttagcaaaagaaattgctaaatatcgttggaactatgtatttgatgattcaaaggataaagaagatgaaaagtctaaaaaatatcccatgaatgaaacgggctatgaaattggcaggagattagaaaaggtagaaaatgtaccagttgatttttttacaagaaaaattgagcagcaactgtggcatattatttattccgtaacagataaaaacgaatttgaaaaggctttaaagacctttgcagatagaaatagcattgacataaattcatttaaagagagttttaaaaatcataaaccttatgtgagtgaatatggtaggtattctgaaaaagcaattaagaagcttttgccactgatgagaacgggcaaatattgggaatgggataatattgattctaaaattaaatctcgtattgataaattaatttcaggtgaatttgatgaggagattcaaaatagagtccgtgaaaaggcaataaatttaactgagcatgtacatttccaagggctacagttatggttggctcaatacattgtatacgatcgtcactctgaggctagtgatgctggaaaatggagttcggttgctgatctagatgattatttacgtgaatttaaacagcattcattgcgtaatcctattgtagaacaggttgttacagaaacattgagggttgtaaaagatatttggaatcagtttggaaaaggagaaaaagatttctttgatgagatccatatcgagcttgggcgcgatttaaaaaacccatcagacaaacgtaagcgaatatcaaatacgattgctgaaaatgagaataccaatttacgtatcaagtcaatattatcagagttgttaaatgataaatcagtagaaaatgtacgtccttactctccaatgcagcaagaagctttaaaaatatatgaagaaggagtacttaattcaggaattgatgttcctgatgagatagaaagaatcagtcataaagctgagccttcaaaatctgaaattcaacgttacaaactttggttagaacaaaaatacaagtcgccatatacaggtaggcctattccattaaataagctttttacttctgcatacgaaattgaacacgttattcctcaaagtagatattttgatgatagtataagtaataaggtgatttgtgagtctgaagtaaatagcttaaaggataggcagttaggtttagagtttataaaaaatcatcacggtcaaaaggtttcaactgtttttggagtggttgagattttaaatgaagaagtatataccgaatttgtcaataaccatttccataaaaatagatcaaagagaagtaagctgctgttggaagatattcctgataaaatgattgagcgccaattgaacgatacacgatatataagcaaattcgttacaaatctcttgtcaaatattgtaaggtctgataaaaatgacgatggtgtaaactccaataacattatatctattaatggtaaaattaccagtaagttaaaacaggattggggtataaatggtgtttggaatgatttaatcttacctaggtttcagcgaatgaatgagctgacagagagcaatgattttacttcttggaacgataagtatcaaaagtatttacctacggtgccattagaactttctaaaggatttcaaaagaagcgtattgatcatcgccatcatgcaatggatgcattggttatagcatgtgcaactaggagtcatgtgaactacttgaataacacctctgcaaaagttgaagatttaaaaagtgaggcaagaaagaaaaagcaaatagaacttaggactcaattaaaaaacagcttgtgtttcaaaacaaagccagataaagatggtaattacaaatggatttttaataaaccatggtctggctttacagtagatgtcaaaaatgaactagaaggaattgttgttagctttaagcagaaccttagggtaataaacaaagccacaaattattatgagaaaatagaaaatggtaaaaaagttaaagttgagcaaaaaggtgtgaattgggctattagaaagccaatgcataaagaaacagtttcgggttttgttgaactacctagaataaaagttccaaaggggaagatattgacagctacacgcaagaatttagacacctcttttaatcaaaaagttattgattctataacagatactgggatacaaaagattttaaaaaattacctactcagtaaaggtggaaaaccagacttggctttttctccagagggaatagaagacatgaatagaagtattcatttttttaacgatggaaaaccgcataagccaatattaaaggttcgtatttttgaggttggaactaagtatcccgtaggctatgaggggaataaaaagaccaagtatgtcgaagctgctaagggtactaacttgttttttgctatttattttgataacaagactaaaaaaaggatatacgaaaccataccattgaatattgtaattgaaaggcagaaacaagggcttagtagtgtgcctgataaggatgaaaaaggaaatagattattatttcatttatcaccaaatgacattgtgtatgtaccgactaaagatgaagtagaagatatttctaacatcgattttagaaatctgagtagcgaaaaagttaatagaatttacaaagttgtaagcttttcaaaggcacaatctttctttattagaaatgatgtcgcgatttctattgttaataaagaggaattctcttcattaaataagatggagagaagtatggatgaccagatgataaaagattgttgcatcaaattaaaagtagatcgactagggaacatttctagagcgtaattaaaccagacaggtttctgaaacctgtctggttttatctcttcgggttaagtaaaatacaatcaaaaaccacctgcaaagtttcaaactttggaggtggttcaatagcattcaattttcaaccatgcacaataaacaagcacaacttgagccagatagaatgtatcacatatacaatcgagctaatgggaacgagaggctttttttggatgcagagaattaccgcttctttttagaaaagtatcagctttatatttcaccaatagctcaaacctattgctattgtattatgccgaatcattttcattttttggtgaagatcaaaagtgaaaaggaattattaaaagctcttccaaagttccaaactttggaagagctagaagcaaaatcaaaattccagattttgaaaataaatccaaacctgtcaggtctattatctaaacaattcagcaatttttttaatgcttattctaaagccttcaataagcaaaatagagattttccaaagtttcaaactttggaaaatctagaagagcaaaacttctcaaaagaaatatctaagcagttttcaaaactctttagttcttacacacagagttttaataaagtgaacaaccgaaaaggaagccttttcatgaagaacttcaaaagaaaggctgttacagactccaaatacctaatcaaactcatccactacatccatcacaatccggtggaagcaagtttagtttcaaacccacaagactgggcgcacagttcatacagcactttaattacagataaccccacttttatacaacgagatgaagtgttggagctttttgatggcacttcaaactttcaatttgttcatcgaaacccacctcaaattacggggattgaataagctacagttttatccaagtagcttttccaaagtttcaaactttggaaaagctaaaaatctcgagtcgagattactttgttaacacgcacgtaattaagtagttgtatcttttagttgtcgatttttccagtttggcattgttttttcaatctcagatggaaaacaaaaacaacctacatgatcaaaaaaacactctatttcggaaacccagcctacctgaaaaaagaaagacaacaactcaaagttgaatatcccgaagagctagctcaaccgagcaaaacagtgcccattgaagatgtgggcatggttatcttagatcatccacgcgtaaccattacacaagcattgctaacagccttactcgataacaatgcagctatcttgaattgcgatacgcgccacatgccatcgggtttgtttatgcccatgacagccaaccatacttatactgaaaagctgaggtatcagctagatgcatccgaacctcttcgtaaaaatctatggcaacaaacggtaaagtgtaaaatagataatcaagcacgtgttttagagcgattgggaattgatgttgaaaacatgttgtattggtcttcgaaagtacgcagcggagatcctgacaattacgaaggaagagctgcggccaattattgggctaagttattggggcctgaaagcggtttcagaagagttcggtatggtgagccacccaataatctgttgaattacgggtatgctattttgcgagcagtggttgcccgaagtattgtagccagtggtatgttgcctgctttaggaattcatcaccgtaacaaatacaatgcattttgcctggctgatgatgtgatggaaccttacagaccttatgttgatctgatcgtactggatatcatagaagaatatcaagatgtggacttagatgatttgacacccgaattgaaaagagaattgctgattattccaaccattgatgtagtcattgaagaaagtaaaagcccgttgatggtgggcatgcaacgcactacagcaagtttgatgcagtgttttgaaggggagaaacgcaagattgcatatccgattatttaatgaaatcacctaatccaaagtttcaaactttggattaggttcaagattctccaccatgtatgaaatcaacagaacgatttaacgcttatcgaatcatgtgggtatttgtatactacgatttaccaaccgatactaggaaagatcggaaacaagcaactttatttcgaaaacgattattggatgatggatttacgatgatgcaatactccatctacacacgtcattgcgctagtagagagaatgctgaggttcacatcaaacgcgtaaaaagaaatttaccgcctcgtggagaagtgattatttttcaattaacggacaaacagtttggcatgatggaattttttagaggacaagcagaatctgaaaagcctgatacgccccagcaattagagcttttttagctttcatttttttattctaatatttagcgtaactgcctgaaaatgaaaaaggtcaaacacggtatgttgtgtttgaccaatgtacaatacaatctgaaagcaattcacaaccatattgaatttgtcacataaatcatgtatgttgtgtttgaccaatgtacaatacaatctgaaagcaattcacaactctggacgaaacacatcgtactcctcagcagttgtgtttgaccaatgtacaatacaatctgaaagcaattcacaacagttgatagttttactttgaaagttgtacggttgtgtttgaccaatgtacaatacaatctgaaagcaattcacaacgtgatttactactcaaatataagcgtctacgttgtgtttgaccaatgtacaatacaatctgaaagcaattcacaacgaaccatttaaccatattatcagaaagcttgttgtgtttgaccaatgtacaatacaatctgaaagcaattcacaacaactcctgtaatactcacacctgttattgagttgtgtttgaccaatgtacaatacaatctgaaagcaattcacaacggggccgtattcggcacacttataaccagcgttgtgtttgaccaatgtacaatacaatctgaaagcaattcacaacataataggtatctttcaaaccttgtcattggttgtgtttgaccaatgtacaatacaatctgaaagcaattcacaacaatgtatactggattcatgaaatcaaaactgttgtgtttgaccaatgtacaatacaatctgaaagcaattcacaacattgcaggaatagtttccacattatttctggttgtgtttgaccaatgtacaatacaatctgaaagcaattcacaacttgcggcttctgcggctattgctgctgctggttgtgtttgaccaatgtacaatacaatctgaaagcaattcacaacacttcaacaatgaaggatacaataaaagcagttgtgtttgaccaatgtacaatacaatctgaaagcaattcacaaccaattatttctgcattggttttagcgtagggttgtgtttgaccaatgtacaatacaatctgaaagcaattcacaacagaagctcagcaactattagtgtctggtatgttgtgtttgaccaatgtacaatacaatctgaaagcaattcacaacatgctaggaaacctgttgaagactcaaagagttgtgtttgaccaatgtacaatacaatctgaaagcaattcataacacaagacttacacttcccatcaaaccttctgttgtgtttgaccaatgtacaatacaatttattcgtgggttgtataattccagatgaactcatgagcccttcggggttgaaagcaattcacaacagttgagacataaggtactaatgtccctgtgttgtgtttgaccaatgtacaatacaatttattagtgaggttaataagcatcctaacttagctctgcatttcgtaatgagtcaattaaaaaccagacaggcttagaatacctgtctagttttagatattaacctatatctaagaggtgggtcgttgaccttagccgctgaccaatatcaaatttaagtgtttccttatttgaaatgaatatttttgtacttccgagctgcgcacacgtgctaagctcaacctcttttttagttgagagatgtgtcaactataggtccgagtatacgtgcaaggatcaacctcttgggctgtgagatgtgacagcctttttttattcaaaaaaagaggtgtttgacccgcccatgaaggggtattcaccgctttgctatgccttgagcagttattacccgggccaaacaccttttattcacagtcaataaacaagtttgctatggtatatgattt

SEQ ID NO: 1415 - DNA, 13099 bp, synthetic construct
  misc_feature 1..13099: note = Synthetic
  source 1..13099: mol_type = other DNA
tgttttaaagtagctttcaaggctttcaatttcttttgttttcatatcaattcaaatttgtggttaatacttgtttcaattcctgtaatcggttcaggtagggtaaaaaggttcgtttgccgttgtttgctttcacggtggcaaagtggctttttatgaataaggaacaatccgttattgtgctgcacctgttcagctttatgggttgggttggtagttcaatacttgcaaagtagttttcaagttctgcaatatcattgatccagttttggggctgttcaattcgtttagttttgaatacctcaactttgggcaatggtgcaacgtgtgaaaaaataatgttttgttggtgggtaactttagtaactttagtaactttttcaggttcgggctgtggtgtttgttcctgaatgttccttttcttgaatagtcgccaatcctgttttattaaatagtctgcaaggtcgttgccttcgcttttgtcccgttcaggtgctaactgctccagtaagtctgaaaatataaaacgtgttccgggtaaacggctttcgtattctttggctttggtttcccattctttgaaggtgttaccgtcttttgaaaggtcgggaaatacatacacaaaacgcccctgcaatgctttcagcttgtcaaatgaaaaactgcttttgttgtaaactgccaaccaaataaggctttcaggtgtttcgggtaaaccaaaatacaacgtaccgtaaacggctgtttttggtgcttcaactaatgcaacggggttgctgtggtatttgcttaataggtgttcgccaaataaacaggaaattcgtttatcctgcttcgtgtatgcttccaaccattcaggcaacggcttattgtttcgggtgtggtgcttttcaattattgagtgtaaaaagtccgtacctgtggtgtggttctgttcgtcaaactgcttaacctgaacggctcttacattgccctttacatcaataaaaggaaaagtatttgcccctgctctgtaaccatttgcaaccgttcccaatcggtataattgaataacctttgtaacctcatcaacttcaaagggaaattgcaccctgtaaaataggttctgtataaacgtgttcttttcatagcgttcgggctgtaatgtttgtttgaatgtttcaaagtcaaaaaatacgggttcaggtgtgggctgtgatattgccttttttcgttttggcttccaattgttcggtaattccgaacggttgccctgttcctgttcccaaattgcttttgcgtaaccgtccaaatacgggttgaggtggtacgaacaattactttcacggtcgcaacgtccgtactgttcaggtaaatagtcgcctgtttccgtatcaatgtacagtacaaacgtctttttattacagtcggggcaatggtgttttttactgcctttttctaaagtgtatcggtgttctgtattcatttcactaaaaatatttttcttttccgtgctacattatctacactatctacacggttgaatgtagatagtgtagtaagtgtatttctaaaacaaactttttttctctgcattaactgctgttccatatcctttgcgttctgtttggtagcctgaatttcttaacctatctgcaagggttcgcaacgaacaggctttaaaaccgctttcaatacaatagtttcggtattcgttgaatagttcttttaaaggcatatcgtttgtagttgaaaccttgtattcgttttcattcaaaaacatctgtacgctgtcgctttcaatcctgtattgttcaacggcttgttgggctgctttacaatctgaaaacttcttttgctccagtaacctgttaagcccttgcaatacccaattgaatacgcctgaaagttccttttcaattatctttgtatgtaggtttttatcctgttcgtgtgatggtatggtaacatcaaaaggaataattaaaaaccgtctgaaataggcgtttgtatgttcaacgtctttgggtaattcattgcaattgaaaattagttttgcgtactgcttcaaaatgaatggttgcccataaggtaaacgggcttcaacgggttcgcctgaaaccaattgtttgaatattgaggcttccaaattgccgtttatttcacttgcatagtttaccaacttattagccaacttcgcccgaaaatacccgttatcatttgtaaggctctgtaatgaataactgctaacattatcagtacccaataaggcgtttacaacttcaaaaaatacgcttttcccatttgctccagtaccgtaaagtattaaggctttttcctcttttagtgcattgctcccgtgcttaatgaatacaaaccctaaatattcagacaataccctttggcgttcagggtcgggtaataccttattcaaatacgcttcaaataatggtgcttttgcctgtgggttgtattcaaatggtaattggtaggtaatgaagtccgaacggtcaaacggttttaatttcgtaccctgtgggcttatttcaaatgttccgttttgtaggttaatcagtaccgtatctttattgctttcgggtgtgggcaaatatgccgttgcaaggaactgtttaaataattgttccctaaattggtaaaaccttgctgaaaacttagcaacgcccatttgttcggctgcttcgcctaaaaacttttggaatgtttctttgtcaatttcagcccaaaatgtaccgttgtacaggtaaataaaatcgtggtttttgcataagccccaacggtttttttcagcaaacagtaaggcgttttcaattgataaaaccaaataatgtttaaggttcaattttagtttatccaactgcttttgtatatcctttgcctgttcgcttccgggtgctgccttttccagttgttcccgtaacttttcagcctgtggaaacgccagtacttcaaaatccaacggctcaaactgttcaataagttggtgtaatatttcagcgtgtggggttgctgcttcatttttacctttcaattgctcaacgtggtttaaggtagtagccgggttgttgaggtcattaaatacggggtttagtttcatagcttaacagtatttgaaggttcaacaatagccgggaacaaatcggggttggtggtataaaaccctgcacggtgttttgaaattgggcaaatgcctttccgtactatacaaatacggttttctttttcccattcagcaacgtaacggcaaatattagccctcaaaatgcctgtttcaatagaaaccattaacatagttttgggctgcctgtaaagggctgcaaatacccgtttcatttgtgcctgaaaatgcgtacttttgccttgtcctttatgcgaaaagactttagggctgttcagttggttactttccattgttcagcccttttttattgttcaacaaatacgctttggcttcctgctcaatttcagcgttcgactttttacgcccgtctttaaggtattccagtaattcagtacgggaaaagtacaggcgtttgcttcgcttcattacaggtaattcgccttttgataccttgctgtacattgtgggtactgtaaggcttaaaaattcggctgcttcctgaatggttaaaagctgttccggttggtcggtgggttcaacctttgttggctgaatttctgtttgtgcttcttttatccaacgcttaaatattggttctaatttggataatggcacgttaaaaaatacctgttctacttgttccattgttatttatattttagttaaacaatgggggcaagtacaaaaggtgtaaccagttacataacagttacattttgaaataaaaaacgtaaacccttaatattcaggcttgttttcttctaaaaaaattatatcattctcaactttagtaaccgtctgtttatagttttctttgagaaaaggtataagcaattcaagtttgtttatcggataatcattcttttcgtttattcgcttctttgcttcgtaatacttcgttttgaagttatcaaaagttgtatttatttggtgtttactcataaactgctccagtcgtgttttaattaaacgactttcagttagcaattttgtttcatctgcataataaaagatagttgcccattcaagtacactaaaagggctttcaatcatcggttgaggtggtaaggcttttacaattggtgtaacctcatcaataaaccttttttcgtctgcaaaccattcttttaatattttcctgtaccgttgttcctcatcttttgaactgtttacatagccctgtttcagcttcattttcctttcattcaaaaccaattccagtttgattttttggggttcagtcaatagccccttttcgtatagtgtggttgtatttatttgcgttaaaaggttgtttgtaaggttcagcaaaacatcaattaaactgcctttggtgtgcattttgacttttgcaattcctgtatatttattcgtttcaggtttgccgttcaatattggtaactgcttttcaaagtgtggtttcagggttgaaaaaaaactaatttcaaacgggaatactttaagccatttttgatatgtactgtataaaacattcaaatcggttttgggtgtttcggttggggttctgtatgctttcaaaaactctaaaagcctgttttttcgccctttctcaacctctgtatttcgctccagtaaatcggttatgtaaaagaaataatcgcttaaatacaacggttctgcattacccggcatttgcccgaaactttcaacggtgtaatcaatgtaatcggttatatccttgtaatatgtttcgcttcggtggttgtttttgatatggctgtttgtgtaaattattttccttgcaaccatttcaggaacgccaacaaaatcagccctgttaaactcttttagctttgtaagttctgaatgatgagtacaacaaaatggaaaaggttttgcaccgtctttatggtttccttcaaacttttcagtaagtcgttttattagttctttaagcgttttttggcaaccttcacaagtattaaaatcgtgttcgccctctgtgggtttggtttcaaaaggcttttcaaatgccccgtttatatccatttgccacataacgggtttaccgcaaaactcaattggttttaaatcttttacaaataatgtagtatgtctatttatcattgtcctttatgctttaagtggttacatatctaatttaattttgtcggctgctttgcgtttggtgtcgtccacaatcttagcgtatatctgtgttgtttttagttccctatgtcctaacatttttgaaacggtgtaaatatctgtaccgtatgaaagttgcaaggtggcgaacgtgtggcgaaaacaatgaaaagtaatatcctttgttattcctgctcttaaaatccattgctttaggtgtacgtttaaataagctgaataaatcaaacctttaaatacttgttcggtgggttctttgcgttcgcccaatagtttaaacgcttgttctgaaattggcaaaacctcaacgcctttggttttcttttgcctgaactgtaaaaaatacccttccagttcgctgtattgtacttcactccaaaccagttttgaaatatctgaaaatctcaatcctgtaagggctgaaaatattgcagcgtttttaagcagtggaatagaacaaggcgtatttacaagggcttgtaattgttcaagtgttaagtattcccgttgtacttcgggttcgcttatgccgtctatacgggtgcttaaatccttttcaattaacccctttttgtatgcctgtttcaatgcagctttgaacttgttgtaataggcacgggctgaactttgggtaatttgttcgctctgaatacccctttggcgtttggctgttaaaaggtattcccgaaaatcattacaaaggttttcattcaggtttgaaagggtaagtttgccacctgtgaacacttcaaagtaattaaaggctgtttgccaaccgtttttattaccgcctgttttagtttcaactatctgtttgaagtattgtacaaagtcggtttctgctttcagctttgtattaagaaacccgtaattccctgcctgtatttcaatttgacgtttcgcccttatgttttcagccagttgtttagtttcgttattgctttgcttatcaaatgggtttttaggtttatcaaataggtatagccctaaaaattcccttcgtgtgggttcgcctgtttcggggtgtggtatagccgggtaaaagtcaaggtataaactttgcctgttccctgaaattgccctttgtcttaattttacttttgttgccattgtcttttatgcttagttactaaagttacttttgttactctctgaacaaactttattttttgttccgtatgtactcattgatgaggtgtataaaatcgtggtgtactttctctttacatgaatagccgtacaaaaccatattacaggcttctttttgttcgggtgtggggttgaggttcagcaactcaaacgctgctttattttggctttctgtgggtatgtattcgccccctgctgtttggtaatcaaactttgaagttgaacgccttttttcggctctttgctctttacgttggtggtatgcttcgctgtatgctgtatcggttgccatacgttcagcaaattcacgcttttgggttttagacggtttccatttgtatctcatatccttttgtattttgtaccccttgtaccttgccaatggtaaaacggtacaacaaagatacaaaaaggtacaaaacaaacaactaataaaacaaactatctattaacataaaatcaataaaaaagccccttttgtggggctgtattcgtgtttatattagtttcctatttgtatgctttgtaaaccttactttccacaacggaataatccttattgtgaattgctttcaaaatgtaatgcaatattacaaatttagttttgactcacaaaaaaattaaatttatatttaactttaacaaaatgtttgtaagatgaaaaaaatattaggattggatttaggcacaaatagcatcggctgggctttggtaaatcatgattataatgaaatgcagggaaaagtactcgggatagggagtagaatcatcccgatgagtcaggatataaaagatgaatttggcaaaggtaattcagtttcacaaactgccgagcgcactggttttaggggaattcgacatctacgggaacgcagtttactccgcagggaacgtctgcaccgggttttaaatgttctgaattttttgcctcctcattttgcttcccagattgattttcaaaaaaggctggggcagtttattaaagatgccgaacctaagctggcttataataataatgattttatatttcggacagcttttgaagaaatgcttgaagactttaaaaaaaaacagcctgaaataattaaagatggtaaaaaagtgccatatgactggacaatcttttatctgcgtaaaaaagcactaacacaaaaaataagtggcgaggaacttgcctggatacttttgaactttaatcaaaagcgcggctactatcagttgagaggtgaggaagacgaggaaaacaagaatagggaagtggccttctactctttagaaattgttgacgttattgctgatgaagaacctaataaaaaaggtgaaacatggtattcactaattttagaaaatggctgggtatatcgtcgttccagtaaaacttctttattagactggaagaataaaacccgcgattttattgtcactacagaattaaaccatgatggttctgtaaaattagataaagatggagtggaaaaaagaagtttcagggctcccggtgcagatgactggggattagttaaggctaaaacgcagaatgaaattatcaaatcagaaaaagaagttggcgagtatatatatgatgaactattaaaaaatccaacccaaaaaattaagggtaaattagtacgcactatagaacgccagttttataaaaatgaactcatagctatccttaaaaaacagattgccctacagcctgaactctttacaaacgaactttatgatgactgcgtgagggaactctaccgtaacaatgaggcacatcgtataaacctaggtaaaagagattttatacatctttttgtggatgatatactattttatcagcgtccgcttcgtagccagaaatcatctgtgagtaactgtactttagagtaccgtatttttaaagtaaaagataaagaaggaaatccagtcgagaaaaaagaatacttgaaagcaatgcctaaatcacatcccctgtaccaggaatttagagtttggcagtggctttttaacctaaaaatcattaacaaagatgataattctgatgtaacatctacattgctaaaaacttctgaggatttagagcagctgtttgcttttttaatgacacaaaaagaagtaaaccacaaagatgtactgggctatttactaacgcctgtaataaaagaaaaatttccatcggctaaacctgccgcttttaataaagaacttgccaaagaaatagccaaattccggtggaattatgtatttgacgattctaaagaaaaagaggacgataaatctaaaaaatatccttgtaatgaaacaggttttgaaatcaagagacggtttcaaaaagttattaatcttccggatggtttccttactcctaaaatagaatatcaactctggcaccttatctattcagtaaatgataaaaaacaatatgaacaggcgttaggatcatttgcaagaaagcatgatatagatgaggcgtcatttgtagaaaacttcaaaaaatttcccccgttcaaaagtgagtatggttcattttcagaaaaagccattaaaaagctattaccgctaatgcggttgggtaagtactgggactggaatgctattgacagcaaaactaaaaacagaattgaaaaaattataacaggtgagtatgacgagaatattaaaaaccgtgtccgtgaaaaagcaattcatctttataaagaaaatgattttaatggtttgcaactatggcttgcacaatatgtggtttatgacaggcattctgaggctgcactggccggtaaatggaactctgtggcagaacttgaacagtttttaaaggattttaagcaacattcactacgcaaccctatagtagagcaggtggttactgaaacgttacgtgtggtaagggatatttggataaaatacggcaatggccaaaaagacttttttgatgaaattcatgtggaacttggccgcgaaatgaaaaaaaccgccgatgaacgcaaaaggcttacgggtaaaatgtcggaaaatgaaaataccaatctacgtataaaagcactcttggcagagttgttatcggacagtaacatacaaaacgttcggcctttttctcctatgcaacaggaagcacttaaaatttatgaagacggggtattaaattctaatattcccattccggatgatatcttaaaaataagtaaaacagcccagcctaccaaatcagaattacaacgctataagctttggcttgagcaaaaatattgttccccttatacaggacagattatcccgttaagcagattgtttaccaatgattacgagatagaacacataataccacaaagccgctattttgacgatagctttactaataaagtaatttgtgaatcggctgtaaacaaattaaaagacaatcagcttgggcttgagtttataaaaaaacatggggggacaataattgaaacagggtttaacaatactgttactgtctttactgaagatgcatataaagcctttataaaagagcactattccaaaaactttgctaaacgaagtaagcttttactggaagaaatacctgataaaatgatagagcggcagatgaatgatactcgctacataagtaagttcatttcgcaaatattatctaacatcgttagggaagaaactaatgatgacggagtaaattctaaaaacgtactaccaggtaacggacaaataaccaccatactcaggcaggactggggactaaacgatgtgtggaatgaacttgttttacctcgctttgaacggatgcagcgattaaggacagaaaaagatattgcagagggtgtgagtttcatagccgccaataagaacgggaagcctataccggaactacagcctgttgccttgcaaaaaggtttccagaaaaaacgtatagaccaccgccaccacgcccttgacgcattagtaattgcatgtgccacaagggatcatatcaatttgttaaataacacttttgcaaagtcaaaccagcgtttcgaccttaaccgtaagctgaggaagtttgtgaaagtatcctatattgatgcgcagacaggtgatagaaaagaaaaagaagtaccaaaagagtttataaaaccatgggaaacttttacacaagatacaaaaaatgtccttgagtccattgtagtgagttttaagcaaaatctgcgagtgattaataagacggtgaacagataccaaagctatagagatgaacatggaaacctgaggattggcaaagacggtaaaccaaaaaaagatgttataaagcaagttaaaggtgacagctgggctatccgtaagtcaatgcataaagacacagtttcaggcgctgtcaaactaaggaaggttaaagaagtatcattaagtgttactttagataactataatgatattgttgatagaagcttaagaaaacacatcctaaagctaattgaaagaaaatatgataaaaaacaaattataaagtattttaaggataacgaaaacaattggaatagccttaatgtttccaggctgaaaatatattattgggataatggcaatgtggcaactcgtcaaaatttagatgtgtcattcaatgaaaatcgcattattgaaaccattacagatacaggtatccagaaaatattgctaaaacaccttgagcaatataaaggtattattgacgagaaaggtaaagaaatagcaccggaaatgctcgcttttacgccggaagggattgatgaaatgaataaaaatattattgcattaaacaacggtaagtttcatcatccaattcttaaagtaaggacttatgaaccaaaaggtagtaagtttagtataggacagaaaggcaataaagcaaataaatttgttgaagcggctaaaggaaccaacttgttttttgccatttatcagggcgaaaatggtcagcgcagttatgatacagttccgcttaacatagttattgaaagacaaaagcaggggttaaattctgttcccgaaaccaatgaaaaaggagaatctttactatactgcctttcgcctaatgacttggtttatgtccccacagaagaagaaagggacaacattaatgctgtggattttaatagcctaagcacaagccaggttaaaagaatttataaaatggtgagtactactcaggataagctagaatgtgtaccggtgcattatgcatcacctattttagtcaatgaaatgggatcaaataataaaagtcaaaattctactgatggaactcaaattaagcaagtttgcgtaaagctaaatattgaccggttggggaatgtaaccagagctctaaggtaatagtaaatttttaaaattcaaaccatgatcaagcgaaccctcttcttcagcaaccccgcctaccttagtaccaaaaatgaacaactggtagtaagctttcccgatgaaggcaaaccaccggtaacccttcctatagaagacctggggtatatagtactggagcatccgcaaataaccattaccaccggcgtactcacaaaacttattgaaaacaaaacagcagtaatcacctgcgataagcaacacctgcccaacgccattttgcagccccttaccgggcacagtgagcaaaccgagcgctaccgccaccagctcaatgccagcgtaccactaaagaaaaacctctggcagcaaaccataagcaccaaaataagcaaccaggcacaccacctcaccgcaaggaacaaagacagcaaaaaaataaaacgatgggcagaagaagtaaaaagcggcgacaccgaaaaccacgaggccatagccgccgcatactacttccagaatttattcagccacctgccaaattttagccgaaaccaaaaaggaataccccccaacggcctgctcaactacggatacgccatcctgcgcgcagtaaccgcccgtgccctggccagtagcggcttactgccatccgtcggcatcttccacagcaacaagtacaatgccttctgccttgcagacgatattatggaaccctaccgcatctatgtagacgcattagtttatgacatcacccaaaaataccacaaccacgaagaaatcaccccggaactcaaagccctactgctcacactgcccgcattagacgtcatcatagaaggaaaacgcagccccctcatggtagccatgagccgcactaccaacagcctgtacgagtgctatgcaggcatcagcaggaaactactatacccggtctttgaaagtaccggttaaacaatatggaacccgattattactcaaggcttaaccagtacagatgcatgtgggtactcgtattttttgatttgccaaccgaaacaaaaccagagcgcaaatccgcaacccggttcaggaaaaacctcctggacgacggctttaccatgttccagttctccatatacctgcggttttgccccagccgcgaaaacgccgacgtccacaccaagcgggtcaagcgcatactacccggcaagggtaaagtaggcatcatgcagataaccgataaacaatttggcatgatggaaatattccacgcgcaaaaagaagtacccaaagacacccccggacagcaattagaactgttctaaaaaaaatccattataacaatcaggagcaggaaacttccgcatttcaggcaagaccacaacctgctgtccgctatatctccccgccgcgaaagcgggcggcggggag

SEQ ID NO: 1416 - DNA, 13089 bp, synthetic construct
  source 1..13089: mol_type = other DNA
  misc_feature 1..13089: note = Synthetic
gaagcaggaatgcaaaatcagcagcagacttgggagcaagaccataattcttgaaacggaaatctttccccatttcctctgtcggttcccagcgataactgaaaggtggattggcaacaatcgcatcgaactgcatctttttggcaggattcatttcgtttaagatatcccagtcattcagtaatgagtctccatgatgtatttcaaattcggtatcctttactccgtgcagcaacatattcatgcgggccaagttgtaggtcgtaatgttcttttcctgcccataaattttcccgattccatgttttcccatttcgtggcgcacattcaacagcaaagagccggaaccacacgcaaaatcaagtacacggtcaatctttgtcttttttcctgtcgttgggtcttggctgtccaatgacacaatcttggaaaggatagaagatatcatttggggcgtataaaattctccagctttttgtccggaattggctgcaaactcaccaatcagatactcataagcgtcgcccaatgaatctgttgaggtagaaaactccgaaatacctttggctatttctgtaacaactttacaaagcatggtatttctttcttcgtatgttctgcctagtttgtcggaatgcagattgatttctgagaacaatccacggaacgaactgtcgaacgattgttcctcgatatacttaaatcctttttccagcgtatcgagcaattccttatcttgtgtacgagctaattctacaatattcccccacaagtatttgggaagtatcacataatgggccttacggcgcatttgctcttcgaactctgctatatcatcaggattctcgtcataccatatttgtagaggagtattggctttcaacttagtcatactctcctgaggcgtttccggataatcgcttcccaactctttcttcactgcttcttcatattgctccgaaagatagcgcaagaagataaacgaaagcatatagtcgcgaaaatcatcggccatcatggaaccgcgaagtttatctgctattgcccaaaggacttttcctaatttatgttgttctattgctgtcatatactaacatttaattatgcaaaacgaaatgatattttcccattagtgcattatatacatctatgagaatctgtttattatctggaaccatcacgccgacttgtggatagtaaaccttctgatgtgtcaaagcgttgattatatcagccattcttcctgattctttcgtaaagccgatttgttgaagaacatactgaaattgcccgactcccaagaatgaagctatattctccaatacttgtcttaataaagccaggtgatatacttccaaagaatcttcctgaatggctgtatctaatatttgtaagactctcaaatgatagagtaaaacgctatttcttggattggataactcgtattgatctccaatcttttcaagaattgaaatcttatatttatttttctcacctcttcgggtcgctttaaacttatcagatttttctcctttggacagccaatcgctaagaatagtagctaatcctatatgatgtgttgtgatgattatttttttcttttcaaaatgcttttcaatcaagttcatcagagtgaatgctgtgataaagatattatgatcgtccatactagagacaggatcgtcaataaaaaagtaatcactttgctctcctgtccagttatctacttcaatcaaggccagaaagaagcaccatataaatatacgttcttctcctctggatattttaacaggccgcctgctatcatcgcctttcatgaaaaaagaaatggaagcaaatccttgttctgggttatcataggatttgaacaagaattcatacttaggattgtaaggtttcaatttctctgtaacatccaattcattcagttggctatgatattggttcaaactactgggaacgatatccaacttcgtgtgttcattgtcccaaacaaacaaatcttcactaaaagcattatagtaaacgcctgtttgacgaccatctgtatttctggcagcttctttatattcaacggaaagacgcgtcttcccagttgaattgaatgcataaatcagaaagatgttttctgaagcatcctttatctgtttggctatctgcgataaatccatatttttataaattagattttggggaataattgttgcatcaatcctttcttatgttctttcaatatttctactttttgagatgttgcctctatcaattcatcaagagaagagagacaatcggcgattttttgttgttcctgagatgagggtaataataaaggcatatctgatatcatatcttttcttactgagtctacagagttctttgcgctcatttttttaactcttttatagaaaaattcagaaaagaaataatataaatatttactattgcactgaatatcataaagtaaatatactctttgatgaacacccattttcccaacataataatgaaagatttttcctacaccaacaccatctccagcagttagaatagcttctccatcaaaagaccaagaatcaattctttctactttgggtgaacgtacaaaaaatggatatataccattttcttttttatcttgtgtattcttgtttccagttgtgatattacagatgtcttgtataatttttctttcccatttttcactagcttgaaattctggaaatctcaaatcaggcacattctttccctccgcaggaaataatcgttgcatcaatccctttttatgttctttcaatgcatcaactttttgggcagttgcttcaatcaattcatcaagagaagagagacaatcggcgattttttgctgttcactagttgacggatatactattatcgtattattgagtgcttttttagatatagaacttacttttgctccttgaattaatggtaataactgattatgatattgtgtagaattaaaaaaatatcctagatatttaggcgcaaaagaaattaaaggtcttaaccaaaaagtatgaagacctgacagaattttcttatcaccaatattaaatatttcagatgtttttcctacaatttcatcttctgctgtatcagccataacaatatctccatccattattatattgtcagtggtacattttacatcttcattaatatagggaatctcatctctttgagcatctataatacaaccatattttataagaatgtccccatagtgaatattttgatatattccttgcttattgtttagtaaattacgagaataagtatttgtactcagatatataaatatatcttgaagtttcttttcgtcccagttttttatggggagagtcaaaaatcttaatttcggaatcaattctatgttctccttattcttcatacgccgacagtcctgatatttcttctccttctgctttacgttttagtaacggaatcaaatccgtcattaaagctgattcaactttagcccgtgctttccatcccagattaagcggagcaagcaaatcgttcaatttttcagcatcgaaaatcttccgttccatgataccatagataaaatcatttaatgattcagtggtgatttcgtatttacgggcaatcgaatctatctcttttgcatatctctcagctttaaagtgattgtagccttctttgatttcctgttccgttttaccgttcacctcttccaaactattgatataggcaatgatatcatcacgctcgtccatcagattggaatttgataaaaccaagttcaccaactgttcacgtgtcagttttactttgatgcccgtaccgctatactgtttggcgataagatccatgatgtaatcgtaatcaatcatggcagaagcaaatagtacaaactcaaagtccaaatcctcaatctctggagaaaccggatcggtcgttttttcccgttttttcttcaggctgtaggctaagttcagataagcacctcggaaagcaagcagatcatcgtcagtaaaaccatactctgattgaggttcagaaattacagacgcatttgaaacatctgtgatgttaacatattgatcaagttgtgtcttatagcgttgtacatccttgaaatgattgataaaacctaccttggcctcatctccctttagattagctacttcagaagcattgaactcaagattgtatgactgcataaagttgcgtaatccagccacagcttcgttgtattttttctggatacttgaagccggttccaccagccatatctgtctggccacatctttatcacctcccgagaataatgcaatggcttcgtctaccgcattttgttgcccacgaaagtccaaaatattgccgtagggtttcgtatcgttcaagatacggttagtacgcgaaaaagcttggatcaaatgatggtaaatcagttttttatctacatacaacgtgttgagaaatttcgaatcaaatccggtcaacaacatatcgaccacaatggtgatatctattttgttggtatgtggataatctttattactatattgctgatctttgatgcgctgctgtatgtcctgatagtaagagtcaaactcttcaatgacatgattagtgccatattgcctgttataatcagcaataatctccttcaatgcctgttttttgctatcgggttcctgctcgttgtctatcttttcctgttgtaaatcttcctgaatctgcttgatctcaggatttccttcagcaggaggagaaaatacacaagcaacattcaacggttcgaatgactcatcttccagctttcgctgttcctgcatctgtttgaacaactggtaatattcgatagcatcattgatggatgacgttgcaagaatggcattgaagcgtcgctgattggtcgccgcatcatgtttggacagaatcgtttctataatagcctgtttcttgatgctgccatcggccctgcgtggactattatcatctggtttgaaataatccacatggaagcgaagcacattcttatcgtcgatggcattggttatggtataagcatgcagctgcttttcaaaaacatcatctgtcgttttataagatgccgtttctccatctactttcgtataggtcgcattctcatcaaatataggtgtccccgtgaaaccaaagagttgtgcatgagggaaaaattcctttatggccttgtggttgtcgccaaactgcgaacggtgacattcatcgaatataaagacaatgcggctgtcttgtagtggcagtaattgttctttatagtttttccgattcttaggatccaatgcgatacctaatttctgaatcgtagtaacaatcaccttgtcagcataatcggttgacaacatccgacgaaccaacgtgcctgtattggtattttcttccacacaattttcctgaaagcggttgaattccagtcgcgtttggcggtcgaggtccttgcggtccaccacaaacagacatttttcaatatccggattatctttcaatagggtagaagctttgaatgaagtcagtgtcttaccgcttcctgtcgtatgccagatgtaaccatttcctcgattctcttcaatgcacctgacaatggcttgtacagcataaatctgataggggcgcataatcaacaacttctgttcactggctatcaacaccatgtaacggctgatcatttcacctaaatgacacttgggaagaaactgttcggcaaaagagtccagacaggcaactttcttattgtcgtctcttgcccattggtaaacgggcaagaattgctcttcggcattgaaattgaaatgctgaagattattattggcaaaataatacgtgttcgaataattgctgacaataaataattgcatgaaacacaacaaggtattggcatatccgttgccagagtcattcttgtagtctacaatctgctgcatagcgcgacgcggactaacatccaaagttttcagttctatttggacgacaggcaatccattgattagcaggattacgtcgtaacgctgaaaactattcttggtatttattcgtaattgattgattacctcatactcatttttgcaccagtctttgatattgaccagcgtatattgcaaaggagtgccatcttcacgcataaacgtattcatttcacgtaagcgtttggatgacacgaacacatccgcatcaataatttcctctagcagacgattaaactctgagtcagaaagatgaacacgattaagtcgttcgaacttctgacgaaagttttgttccaatgagtttctgtcagaaatatccggacgatatgcgtattttaattcttctgttagtttatgaattaaattttcttctatttgtttttctttaaccatgtactaaagaatcctttttatttttaagcgaatatactattaattttacatcgaatcaaattatttaatcaatattaataattctttgactcatgtcattcccgcttcgaacggcaggcgcaccaatgaattgaaatattgtttcaacagccattcttaggcttgaattaatccgccatttctcccaataccgccagcaggaggcgcagcagcgctgcgcctctacagtcattttaattatccattttcaattgtatcatgaatcattatccattttcaattctcaattctccattttcaattgtcaattgcatcacgcctctacagtcattttcattattgccgtttataggcattcatctcatgctgggtgcttttgccaattctaccattttgctgacgttagcaaaatggtgggtaattctcaaccttcaaacggcaggcgcgccaatgaattgaaatattgtttcaagagccattcttgggctttgagtttgatcatggcctggcggtaatcttcgctgacgtgcaggttgttttgtggccgccaacgggaaaactgagccatcgcactgagcttttcttccaggctgttgcggataaaaccgcggctttgcagttcttgatacaagatgctggcaaatgggatttccaaatccgggcggttcttgtattcgtgaaatcgcttgatgatcagtcggttcatgctctgctcgttgtattcgcgactcactgccggcaaggctttgacttccttttcctgttccatctgcttgattacccgatagcgtaagtcgctggttttgtaagctttcagccatttatgaaaggtccggtaattcaagccgacgtaatcgccaaactgttcttgtgcgcccagttcgaagcaaatcgagatttcttccagacgcaagaagctgcaattttcgtatatgtcgcttaccaatttcgcggccaagacgtaaacttcttccttcgttggcgttttgaatcccaacaagacgtaggtttccgacaacagatcaatcattctattggttacaaactcactgtcaaaccgtataatcggtggttgtctcaatgccatttccaatcgtgtatccaaagccattgttttcgtacatttttttggttaataatttcgcttctgccgccacttccatcatttcttcgtatctcgatttgcgcgccgccggttttttatattccaggtgcggcgccgccatgtttttcgccggtttcgcgccagttaaaactcgcatatctgtttcccaattgttgtagcgccaccagccgataaagctcatttggtattcttttttggttctggttgtatcttcttgtgctttcaggacaatgaaatcgtcaaaacaagtcatcgcatcaaaagcatgttcgatgatggctaatccttttccgctgtatcggactaacgaagcgcaccagtcttcgtcattcagtaattccattttccactgatcccattcagcttttaacgattgatcgttctcgcgcgcacgcgcgttgttgtgatcaatgttgtttaaatttatactttctttttctctactttcctttactttacttttatctactttactttgttcaaaattgcatgcattttttggatttttgtcgacagaattgtcgttcaaatgctcttttggggtagttgaactcgatatcatgtctgcaattaacaaatattcaggattcgagattttctgttttttccgccgaacagtggctgagaagtagcaattttgaattttttcagacgtcaaaatgtgatactcttcatacattttttctgtagaaaataccggcgaaaagaaaggcaaagatacgtggtataatgttcatttagaaaatggttggatataccgccgttcaagtaatctccctttggactggaatgggaaaatcaaagaatttgtcgtcaccacagaattagatgaagcaggtaatccgaaggttgacaaagacggaaatgtaaaaagatcatttcgggctcccaaagaagatgattggaatttgttaaagaaaaagagcgaatcaatcattgatcaaagcaaactgacggtaggtacttatatttacgaatccctgctaaatgtaccgaatcaaaagattcgcggaaaactcatccggactattgaacgcaaatattataaagatgaattgaaagctatcttagatgctcaaaaaaacttccatccggaattgaacgaccgagatttgtattatgcttgcgtgaatgaactttatccgtctaatgagtcgcatcgtgagatgttatcaacacatgattttacttatttattgatagaagatatgctgttttaccaacggccattaaaaagtaaagtttcattaattgctgattgtccttacgaagctcgcatttataaagataaagaaggaaataaatgttcggttgctttaaagtgtattgctaaatcgcatcctctgtttcaagaattccgattatggcaatttatctctaatttaagaatttaccaacgagaaaaaaagattgggacatctctcaaaacggatgtggatgtgacttctgaatttttacggaatgaagatgactacgtcgctttattcgattggctctatgaacagaaagatatttcacaaaaaaaactattaggatataaaccttttcaactgaaaaagaatgaacagataaactatcgctggaattatgtagaagacaaactatatccttgcaatgaaacaagatgggccataacaagccgtttagaaaaaataggaattccttcttcattcttgactaaagaaatggaagaaagtttatggcacatcttatattcaataacagataaacaggaaatagaaaaggcattacaaacttttgccgataaacatcaattagatacagcttttgtatcggcatttgctaaaatgcctccttttgaaaaggaatatggtgcttactcacaaaaggccataaagaaattattgtcacttatgcgcatggggaaatattggagtgaaaagaatattgacccgaaaacaaaagaacgaattgaaaaaatactttctggtgtatgtgatgagacaatccgtatgcgagtccgcgatctggctttccacttacaggaaattacatcttataaaggattacctctctggttggcctgctatgtagtttatgatcgccattcagaaagtaaagatattgataagtgggaaaaaccttctgacattgatgaatatttgaaagccttcaagcaacattctttgcgtaatcctattgtagagcaagttattacagaaacactacgtacggttcgggatatttggaaacaagaaggtaagtttgacgagattcatattgaattaggcagagaaatgaagaatccggctgataaacgggctaaaatgacggcgcaagcattagaaaatgaaaatacgaacttgcggattaaagctttgcttacagaatttatgaatccggaatttgaaatagagaatgtccgtccttattctctcagccaacaggaaatattaagaatatatgaggacttcgctttatcaaatgagccgaatattccggatgatgtagcactgatactgaaaaagtttcgtgaaagtgatgtacataaacggccgactcgatcagaagtattacgttataaattatggttggaacaaaaatatcgttcaccctatacaggtgaaattatacctttgggcaaattgtttacaccagctttcgagattgaacacatcattcctcagtcccgctattttgacgattcgctgaccaataaagtgatttgcgaatcggcggtaaataaattaaaagataatagtttaggatatgagttcatccagaaacatcatggtgaaaaagttgcattaggtaatggcaaacagacaacaatcttctcagtggaagattatgaagctttcgtgaaacaacattatgctgctaaccgggcaaaaatggaaaagctcttgcttgaagatattcctgaaaaattcattgagcggcaattaaacgatagccgatatatcagcaaagtggttaaatctcttttatcgaatatcgttcgggaagaaaacgagcaagaagcaatatccaaaaacataattgtttgtactggcggtattacagaccggttaaaacgagattggggcatcatggatatatggaataaaatcattttacctcgtttccaacggttgaataaattgcagggaacaaatgattttacaaccatcagcgcccaagggcacgaaattcctgctatgccgctttatttgcagaaaggttttaataagaagcgtattgaccatcgtcatcatgctatggatgcaattataattgcctgcgccaaccggaatattgtaaattatctgaataatgcgtcagcactgaaaggatcaacaataacacgctatgatttacagcatatattatgcgagaaaacaaagagcgatgcaaacggtaattatcagtgggttttacgcaaaccttgggaaacatttccgcaagatgtatatcaggctttaaaagaaatcgttgtcagtttcaaacagaatcaacgtgtcattaatcggacaaccaaccattatcaacattatgacgcaactggaaaaaaagttttagtcaagcaaacaaaaggtgatagttgggccatacgacaaccgatacataaagacactgtttttggagaagttaatttacggatgaaaaagacagtttctttaaatgaagcattgaaacggataacaagcattgtagataaagacctgaagcataaattacaagaattggttaagagccaatataatgtaaaacagatcaaaaaatattttgaagatcaggcggatgtctggcaagatattaatctgaaaaaaatagaaatatattattatacccaagaaacaaaggatcggtattttgctacccgcaaaccattggataccagtttcgataggaaggaaatagaggaaagtgttaccgacacgggtattcagaaaatattattgaatcatttggaacggaatcagggaaaagctgaaatagccttttctccggatggaattgatcagatgaaccaagatattatctcgttgaacgaaggtaaaaagcatcagcctatttacaaagtaagatattatgaaaaggctgataaatttgccattggcaaagcaggtaataaatctcgtaagtttgtagaagcagccaaaggaaccaatctgttttttgctgtttatgaaacaacagaagaagacaagcaaacgggaaatctgacaaagaaacgatcgtatgcaagcattcctttaaatgtggttatcagccgacaaaaaagagggttgccttctgctccagaaaatgaaaatggagattcacctgtctttgttttatcgcctaatgatctggtgtacgttcctaaacaagaagaactgaatacaggagatattcagtttccgatagaccggaatcgaatatataaaatggtaagttgtacaggaaatgaagctcactttataccagtttacattgctaatcctattattcaaacagtagaattgggcagtaataataaggcacaaaaatcttggacagaggaaatgatcaaagaggtttgtattcctttacgtgtagatcgcttgggaaatatttcattgttaaaccagagtgaataatatctgctacatgataaaaaagacgctttattttggaaatccggcctatttgtcggtaaaaaacagtcagttggtaatcaagttgccggaagtggagaagaatccttcacttccggaatctttcaggcaacaggcagttgtgacaaagccaattgaagatattggaatgagaattacgtaagataagttatccggaaatgcctgtttatggacagatttagtgaatatcgaatcatgtgggttcttgtcttttttgatttgccaacggaaacaaagaaagataaaaaagcttatgctcttttctgaaaaaatctgcaaagagatggattcacgatgtttcagttttcaatttatgtgcgtcattgtgcaagtacagaaaatgcagaagtgcatatcaggcgggtaaaatcattccttcccgaattcggacaagtaggcatattatgcattacagataaacaatttgggcaaattgaattgttttatgggaaaaaaccgctttctgttaattcgccagggcagcaactggaactcttttagaaataaaaaatcccgtaaataaacgggattttttatgataagcaacttgtttttttattttcaagatcattcaataacatattgaataataaatagatataaacaatctattgttgcttatatcacaaagatactaaattgaaagcaaatcacaaccaatatacatagctgtctctaccatgtcgaactgttgcttatatcacaaagatactaaattgaaagcaaatcacaacgcgacttgagttgcttgagctgatatctgactgttgcttatatcacaaagatactaaattgaaagcaaatcacaactgcaatgcccgaagcagtaagagggcgagaactgttgcttatatcacaaagatactaaattgaaagcaaatcacaacggtactgttccgaattatttttaacggcctactgttgcttatatcacaaagatactaaattgaaagcaaatcacaacata

SEQ ID NO: 1417 - DNA, 12853 bp, synthetic construct
  misc_feature 1..12853: note = Synthetic
  source 1..12853: mol_type = other DNA
cagacaagacatcagcacctcaataatatcagtgctttaatcagccacataaaaacataaaatacaaacagcctataaacggatatacagtaaaggttatgtggttgcaatatggtgaggtaggtaatgctctattctgtttagagaaacaaggagtacaatactactactttgcggagaaatggactgataagattctgtatgataagggtaacacatatccgcacaacacagttatagagttggattatacggctaaattaaagagcgaagaatacctttcggatgattctcctttcttcttttctgatgttgattttgacggagaagaggagttcattatcaaccgctataaaagtggttcaagggattccaatgcttatgatgtgtacgacgtcagcccatacggttactttatacagaaaacagaagtaccatttacagagttggaaaacggacaatgtaagtttgattcagagaacaagactattactgtttttggctctaatggatggaacaacgctattaggcatatctaccaactaaaagacagaaaatttgaattagtacaatcagaataactatttcaaaatcaaacgaaatgaaaacatttagatttattggaatggctttattagccatagtaatgtgtgtgaactttgcttcttgcagtagtgataatgatgaagaaagtaacggtggtaaatcaacacaagaactgttacaaggcgtatggtatgatgcctatacagacgattgtccctactttattgtcgagaaaggctattgctactttgccaaccaaccctcaacagtttactatgttgagaagtacaaatacacttttgattctaaaaacaatacgctgatgtgctatggatatgatgaagaaagtgatacctacgataatgagccgtggtatataagagttaaatctgtatcagataccaaacttattataaaacttttgaacgatgacaatcaaaccgttgatgatacaagagattgtgtaaaacaatagcagaccactacttgacagacaaaaagccaacctacccatttgaagtatatacttcaaacaacggataagttggctttttcagttctgaacaaacatcttattaactacaaaactatgtgtttcacaagcatatttatagatgcagagaacacaaaacaataagagtagatttttcagcaggtagatttttaagaagatatagctttatatacctactactgatttttataccgatactatattatgcaatgtcaatacaatatatgaatactttttcagtagggagaaagctactttatactattatatactatatcagtagatagataaaaaactgatagtcaaaagcaaaactataagaaagaatcattggataacagcacaatattgactaactttgtggtgcagttcaatgctgcaaagagattattaatttattgttgaatttatcttgtttacgtgtaaaccaacatgtaaaccgcaacttgaaaggacttcttctaagaagatataagcggcagtagctcagttggtcacttttaatccgcaggattaaaaggcatcagcttcccaagctgagggtcgcgggttcgagtcccgttttccgctcctatgggaatcaggtagttatcgcaaggcttctatctgatttttgtttttaggcaatggcagttgaactcccagttgaccctatgagctcaactaaaatcttatgaatgcaacgattaatgtagtatgctacaagtggaaaaccttagcaaatggtgaatacccatctgtataagtgttgcaattttagtggtatgctacaaatcaaagacattatctgtcccaataaagagtatattcagaaaatcttcttgataagcaaacagagttacagcaacgaatcatttgctgttttttttaaatgttacagctaaatcattgtgatttaaaagggaataattacctttgtattatggatggtaaagtaacttattggattgaaatgtcagattatgacttggaaacagcagatgcgatgttgcttacaggtcgttatctctatgtgggcttcatgtgccaccaaacgatagaaaaaatactcaaggcatattgggctaatcgtttggtggaagtacctttaaagatacattcgctatccagattagcagagagaacagaattagataaagaactatcagaagaacagttggatttcattgatacacttgagccacttaatattgaagcccgttatccctcttataaagagagattgatgaaaagtctgactaaggaatattgtataggacttttaagccaaactaaagaattacagtcatggataaagaacaagctatagtcctcgccaagcgatataaagaaatggtagcagaaagattaccattaaaggctctctatctctatggctcgtatagcaaggggaattacagagaggatagcgatatagacattgcagtagtagtagagcatttggatgacaactattttgaagatacccctctattatggaaacttagacgtaagataagtaaccttatagaacccgtcttgcttatagaggatatgagtaatcctctttactgcgacatcgcaagaacgggcattcttatctaaaaaaatgatacagaataagaaaagctgtatttgaagttggttatttttaattcttggcatcatcctaaagttaaatcacagaaagaggatatgtctaaactaaaattcgcttgccatttgtttctttttaggcacgggattacacggaaaacacagattttctttgttctttttccgtgcaatcctttagatttgcactgtgaaatattggggttgaaatattaccttcgtagtgaataaaagttaaccaagggaagcaggtgacctatcgtgaattccgtgcctaaaagaaatctcaagtgtattttttgacaccctcacaagttcgaatctcgcttgccgcttatacagagaatcagatagtcatcacaagatttctatctgatttttgttttataggaatatgtcaagccaccccttcacctttcacaactccctgctcatgcagtatagcgggtgaacccctgtttttgtaaacgactgattatgataactcgcaataggaaaaaaagttctcatttataaagtatgcaaaaaatagtgtttacacaataaacacttttcgcacagaaatttgtacttttgcactccgtttaatgaacccgaatagaaaactttaaaaacgaaatagaatggcagtagaattgaaagaccttaccaaacgtagcgagaattattctcagtggtacaacgagttggtggtgaaggccgatttggcagagcagtcggctgtgcgcggatgtatggtaatcaagccttacggatacgcaatctgggagaagatgcagcgtcagttggacgatatgttcaaggaaacaggacacgtaaacgcttatttccccttacttattccgaaatcattcctcagtcgcgaagcggaacacgtggaaggctttgccaaagagtgtgccgtagtgacgcactatcgtttgaagaacgacccgaatggcggcggcgtagtggtggaccccgctgcaaagctggaagaagaacttatcatccgccctacttcggaaaccatcatttggaatacctataagaactggattaactcttaccgcgacctgcctatcctgtgcaaccaatgggcaaacgtattccgttgggaaatgcgtacccgtctgttcctgcgtaccgcagagttcttgtggcaggaaggccacacggctcacgccactcgcgaagaagccgaagaggaagcagtgcgtatgctgaacgtgtacagcgaatttgccgagaaatacatggcagtgcccgttgtcaaaggtgtgaagtcggccaacgaacgctttgccggcgctctcaacacctataccattgaagcgatgatgcaggatggtaaagctttgcagagtggtacttcacacttcttgggacagaacttcgccaaagctttcgacgtgcagttcgtaaacaaggaaaacaaactggaatacgtatgggccacttcttggggagtatctacccgcttgatgggtgcgcttatcatgacacattccgatgacaacggtctggtgcttccgccgcacttggctccgatacaggtggttatcgtacctatctacaagaatgccgaaatgcttgccaagattgacgagaaggtggcaggcatcgtagccaaactgaaagcgatgggtatttctgtgaagtacgacaatgccgacaacaaacgtccgggcttcaagtttgccgattacgaggtgaaaggtgtacctgtccgtctggttatgggtggccgcgacttggagaacaatacaatggaagtgatgcgccgcgatacgctggagaaagaaacccgctcttgcgacggtatcgaggaatacgtaaaagacctgcttgaggaaatccaggcgaatatttataagaaagcattggattatcgcaacagccgtatcactacggtggacagctatgacgagttcaaggaaaagattgaagaaggcggctttattttggctcattgggacggaacgaccgaaaccgaggagaagattaaggaagagaccaaagccactatccgctgtattccgttcgattctttcgtaccgggcgacaaggagccgggcaaatgtatggttacgggcaagccgtctgcttgccgcgtgatatttgcacgttcctattaataaggatatttttcactttgctggatgaagcttttttcatagtaacctgtgacgaagtttctttccttttgtattcggcagatgttctaaaaaatggaggtgtgctaaaatttagcatgccttctttcttatgcacaaagaaagtgcatcattatgaggtgccccaaaaaagttaaacgttcaaaacagccaaggctatcgaagtggtttatatatacaacaattcattcttcatcaggccggagaaattttccatcatagagttattcagatagtttccttggcgggatatattttgtatgatgccattattcttcagcatgctgataatactatccttgatctgagcgcaataacagggtatggaggctcttgtgtttcttaaatgcctatttaagcatatctgttaccattttcaggttagggctgcgggagagtgtattgttattatctccccattgtatatgtcgcgtattgtttcctatcaaacctttataaaagtgatagtgatgtttcttttgctttgctttcaatctcatctgagacatcagtttctgcatagtcttatgattgatattgtagcttttaatcgcgtaaagacaaacagcttcttctatattcatagcggcctttgctgtcatcatatattgtcttgatacattttcttatatcattataaccatcattatctctcagacgcaacagatggtaataaaatacggagcgagcatctttaccattttgagaatactctcaagagggaatcctttcagtcttagttcttcgacggcccgtgcccaatcgcgtagctgggcataggagcctgctgttcccataggggagtgacgcatacaagacagaaatggctatggctgtcccaatagagtatcaggaatgcttttcctactgcctgataatctgctaatggcaggtagtcgtaagaagcatgcaaatttttgctttatttccgtcggtcagagttacttcgtgcattttgcatcccgctgcgggtttcgtagctaatcgaactaatatttaattaattgttcggtagctattagcagataaagatatagtttttagtaatgtgttggggagaaatttactaagaataaaaaatcccccgttaaggacgagggaacctaatgttttcacaacggaataatccttattgtgatttgcttcattttagtttggcaaaactataaaataaaaatgaaaaaaacaatgcttgtattaataaaaaaaataactttgaatagcgtattaaaaaataatattatgaaaacgatacttggacttgatttagggagtaatagcataggatgggctgtaataaattctgtaatagaaaaacagtccgaacgaatttggataaaaatggcagggagtagaattattccgatggattccgctgtattgggagattttgacaaaggaagttctatatcacagactgctgaaagaactcattttagaggggtacgtcgtttgagggaacgacaattgctacgccgtgaacgattgcatagagttttgaagattcttggcttcttgccggaacattatttaaaagaaatagattttgaaaagcatcccggacagtttttgacaaactgtgaacctaaactgccgtggcttatagatgaacgaggaaaatatacttttttatttcaagcagcatttaatgagatgctagcagattttgcaaaacatcagccttcattagtgtctgatggtaaaaaagtaccttatgactggacaatttactatctccgtaagaaagctttaacagaaatgataagtaaagaagagttggcatggattcttttgaattttaatcagaaacgtggttattatcagcttagaggagaagaagaggaagatgctgcaggaaaatctgttgaattttatgcattgaaagtattgtcggtagaagcgactgatgaaaagaaaggtcgggacatatggtataatgtgcacttggaaaatgggtggatatatcgtagaagcagtaatgttccattggattgggagaatcaggtaaaagagtttatcgttactactgatttgaatccggtcggacggtactcccaagtttgataaatatggtgaggggaagcgttctttcagagttcctaaagaggatgattggatgttgataaagaaaagaacagaggcagacatagccaatactcgtaaaacggttggaagttatatttatgatactttgttacagaaaccgcaacaaaaaataatagggaaactggtgaagacagtggaacgaaagctttacaaggaggaactgaatttgattttgcagaaacaatgtgcttttcatgcagagttacgggatagagatttatatatgagatgtattgaagcattatatccgggtaatgagatgcgacggaaaaatatagttaacagggattttatttatctgttaatagatgatattttgttttatcaaagaccattgaaaactaaaaaaacattgatttctaattgtccttatgaagaaaatgaatatgtaaaccgagaaactggcgagatcaaaaaagctcctttaaagtgcatagccaagtcacaccctctttttcaggagttccgtttatggcattttctttcaaatattcgggtatatcaaaaagaaaaaaaagtaaatggaactttacatttagatgtggatgtgacagcggaatttttgagaacagaagatgattatgtagctttatttgattggttgaattctcgaaaggaaatagatcagaaagcttttctgaaatatccaaaatttggattgaaaaaggaaatcgataattatcgttggaattatgttgaggataagttgtatccatgtaatgagacgagatatgcgattctttcccgtttggagaaagtcggcgttagtattgattttttgtcagatgagaaagaaacagtcttgtggcatattttatattctgtaagtgataagcaggaaatagagaaagccttacgaacctttgcagttaagaacggattaaatgaatcttttgtagaagtattcaaaaaatttcctccttttaaatctgaatatggagcatattctgccaaggcaataaagaaattgttgcctttgatgagatgtggaaagtattgggatacatctttgattgatgatgcgacgagagataggatagaaaggataataacaggtgagtatgataggaatatagctgctaaggttagagaaaaggcgataaacttgtcggatatatattgttttaagagacttccgctatggttggcttgctatgttgtatataatcgtcattctgaaaataaagaaattgctaaatgggaaactccggcggatattgatgcttatttggcttctttcaaacaacattcactacgcaatcctattgtagaacaggtgataacagaaacactgagggttgttagggatatttggaaacaggttgggaaaattgatgaaattcatattgaattaggacgtgagatgaagagtcctgcggacaaacgaaaaagaatgactgcacaaattcaagagaatgaaaaagctaatctacgtataaagacattacttgttgaatttatgaatccggaatatgaggttgagaatattcgtccctattcaccaagtcagcaagaaatattgcgaatttatgaggatacggttttgaaaagagaagaaccgattccggaagatatagatgcaatattgaaaaaattcaataatagcaaattaccgacaaaatcagagtttttacgttataaattatggctggagcagaagtatcgttcgccttataccggtgagttgatacctttaggaaaattgttcacgactgcgtatgagatagaacatataattcctcagtctcgctattttgatgattctttttctaacaaagtgatatgtgaatctgctgtgaataaactgaaagataatcaattggggtatgagtttattaagaatcatcatgggcagaaagttgaagtgggttttgggaaaaaggtagaaattctttctgtggatagttacgaacgatttgtaaaagaacaatatgctaaatcaagcgtgaaaatgaagaaattgttgatggatgatattcccgaacaatttattgaacgccaattgaacgatagtcggtatatcagtaaggttgtcaaagggcttttatcgaatattgttcgtgaaaagaatgataatgatggatatgaaccagaggctgtttcaagaaatgtgttagtttgtacgggaaacgtgacggacaggttgaaaaaggattggggaatgaatgatgtttggaactgtattgtatatcctcgttttgaacgtttaaacgctttgactggaacacagtgctttggacattgggagaataaagatggaaaaaaagtttttcagacggaattaccccttgaatatcagaaagggtttagcaagaagcgtattgaccataggcatcatgctatggatgcaatagtgatagcttgcgctacgcggaatcatgtgaattatttgagtaatgagtctgcaagccggaataccaatatttcccgttatgatttgcagagattgttgtgtgataagaatagagtagatggtggtggtaattatagatgggttataaagaagccatggaatacttttacgcaagatacaagggaggcattggataaaatagtgattagtttaaagcagaatttacgtataataaataaaacaactaatatttatcaacattttgatataacaggaaatcgtatttataaaaaacaggaaattggtgataattgggctgttcgtaagccaatgcataaggatacagtttttggggcggtgaatttgcgaaaagtaaaaagggtacggttgtctgtagctttggatactcctactatgattgttgataagagagtgaaaggtaaggttcttgaattgttatcatataaatatgataagaagaaaattgaaaaatatttcaaagagaatgttttcttttggaaagatttggacatagctgaagttgcagtctattatataacagaaaatacttctgaacctttggtcgcagtacgtaaatcacttgattcaactttcaatgagaagaaaataaaagaatcagtaacggacactggcatacagaaaattcttttgaatcatttatctgtaaaggggtgaaaagcggattgggctttttctgcagaaggaatagaagaaatgaatcgtaatattttacagttgaatgatggaaaaaagcatcagccaatatataaggtgagagtgtatgaatcacgtggaaataaatttagcgttggtgtatcaggtaataaaggaactaaatgggtaggagctgctaaaggtactaatttattttttgctatttatgtaacagaaaatggaaaaaggacgtatgtgactgtccctttagacgtggctatagaacgtgagaaactagggcttattcctgttcctgatagaaacgataaaggggataaactattgttttggttatctcctaatgatttggtgtatctgccaactgaagaagaacgggagttgggtaggataaatgaaccaatagatagggggaggatttataaaattgtaagttttacaggaaatcgtctgtatggagtcccttgtaatgttgctaatgtaatagttgataaattagaatattcttcattaaataaagtggaattgacagatgctaaagagtcaataaaagaaatatgtattcctataagagttgatagattggggcatataatagaagttaagtatagaataaatgaatagtataaagttatttcaagaaaagaaaatccgttctatgtggaatgaagaagaacaacagtggtacttttcagttgtttatgtagttggtgtgttggctgatatcgtgaattctacggactatttgaagaagatgcgaaaatgggatgaagaattggctacttatctggggacaaattgtccccaagtagaaatgttgacagatacagaaaaaaagaaaaactttggtaacaaatgtataggaaatagaaaattcggaattagttcaggagtgtatgaaagaactgtatgagcagtaaggttatccaaaggattggattgacaaacgtttgagaggacctaccattcatcagaatttgacggatgagtggattgactatgctattcttacgccagaaatatctaaggcaacgttgggattaagcccttcggattaaaatatataaaggactgacaaagaagaattagaacctttgtgactatatgctcgatttagaattgatattcgcgatgcttggcgaacacgtcactacggaaatttctcagaaagaaaaaccatatacatttactattgaaaagtaagttgtacagtgtggtggaaatgttgttgaagtagtgcgtgaacaagctgaaaaagaactaggtagaagtattattttttccgacaatttttgttggattcagataatcatgatgataccttaaaacttccttttgaggaaaacaacgaatgaataactttaaaatctgtatactatgattaagaaaacatattattttggaagtccagtttatctatctttgataaatgctcagttagtgattaaatttgaaaaatgctcagttagtgattaaattaccagaggtcataaaaaacggtgctttgtccgagggtttcaagcaaatatctgaggtgactaagccgatagaggatattgggatagtggtattggataacaagcagataaccattacttcgggagtgttggaggctttacttgaaaagaattgtgcagttataacttgcgattctaaaagtatgccggttggtttgatgcttcctttgtatggaaatacgacacaaaatgagaggttccgacagcaaattggtgcttctttgccattaatgaaacaactttggcaacaaacggtaaaagctaaaatagaaaatcaggcagcggtattgaataaatgtgttggagaggaaataaagtgtatgaagatatgggctactgatgtgaaaagtggagatccggacaatttggaggctcgtgcagctgcttattattggaaaaaattgtttaagatagaaggttttacaagggatagggaaggtattccacctaataatctgttgaattatgggtatgctattttgcgggcagtcgttgcccgtggtttggttgcaagtggacttttgcccactttgggaatacatcatcacaaccgttataatgcttattgcctggcagatgatataatggagccttatcgcccctttgtggataggttggtatatgatatgattaagggaagagaaataaattgtagagaattggctatagaactgtggataggttggtatatgatatgattaagggaggagaaataaattgtagagaattggctaaagaacaaaaagtacaactgcttactattcctacgttggatactattatttcgggaaaacgtagtccgttgatggtagctgttgggcaaactacagcttctctgtataaatgtttcagcggtgagttgcgcagaatatcttatcctgagatgtaatggaacggtttagcgaatatcgtgttatgtgggtacttgtactatttgatttgcctaccgaaacaaagaaagataaaaaggcatatgcagattttagaaaaaatctgcaaaaagatggatttacaatgtttcaattttctatatatgttcgtcattgtgcaagtagtgaaaatgcggaggtacatataaaaagagtcaaatcgattttacctgaacatggaaatgttggaataatgtgtattacagacaaacaatttgggagtatagaacttttctatgggaaaaagactatagatgtgaatactcccggacaacagttagaattattctgaaaagaaaatcccgctatatggcgggatttttttgggggaaactacatctttttttaattctaatatttaatataaatctttgtatattaggttactattaataatgagctgtttccaatggttcaaagatactaaaatgaaagcaaatcacaac

SEQ ID NO: 1418 - DNA, 12539 bp, synthetic construct
  source 1..12539: mol_type = other DNA
  misc_feature 1..12539: note = Synthetic
tgggagtaatgaatcaggcttaaggggagtgttggaaatgatggaagaaattcataactcagacttttcatacaaccggattgcagtagcggcgggcacaggttgtaccgctgctggaatttcaatgaaaaacaaaagcatcactgaagtgtatcctgcactgaaaggtagttttatgtttgatctgatcaaaggattccataaaaatgtctctaccaatacattagtgattgcggattaccattttggaggatatgggaaattcaacaaggaactcatccgctttatagaggatttcgagtccgaaacaggcatacctttagacccggtatatacaggtaaaatgatgtatggattggtacacagaattaaaaataatgtttatccttcgaacactacgattttagccattcataccgggggattgcagggcaatgaaggttttcgatacaaatacggattattataatacattgttcatttttccaatagaatgaactcagggttctgtctctttaattctctaatataatattcaatggttttaggatagaatttatgctccaattgcaacacccttgcggctatttctgcagcatcgtcttcctgatataccggacaggcagcttgaaacaagatatgtccatcatcatatttttcattgaccaaatgaatggtcattcctgtcataatctctccagcctctttcaccgctgcatgcactttcattccatacataccctttccaccataagaaggtaaaagtgccggatgaatatttaaaatctttctctcgaatgccgcgatcaaatagccgggcaccaaccaaagaaaacctgctaaaacaatcaaatcaatctggtgactttcaagaatttccaataaagtaatttcatggtaaaaactctgacggtcaatgatgacaatgggaatgctatgattttttgcacgttgaactacaccagcgtcggctttgttacagacgatcaaagcaacttgtgccgtgtttctattttcaaaatattggatgatattctgggcattgctccccccacccgatgcgaagatggcaatattcatcaacgcaatacattgtagcgattggcattggaaggatcgattctgatcagtgctgtgtaaacactggttttctctgtccggtcggctactttaaatatttcaagaatttcattggatttggaatcgatcaatgtattcagcaaataactgttaggataggcagtatttgcggtattgaaagtattcatagccgttaatataactgcgcgacctttatcagcatcttctgccatgatatccaggccatttctgtggtagtcatacatggcagtccgcacatttctcatccttggattgaaaatattctcaataagccaaaaccggtttctggggccgctgctttgattccaccctctatcgttttgggtgaccgtctgcggaacgaccatcattgtattctgagccatcttaaaatactcctctcctccttgcggagaaaatgattcatagtcaaaggccagaatgatataggcataaaaagtcagtatagaggaaagattgtccacaaaccggttatcgcttttctcaatgggttgaaaattatgatagatgaggttcactcccctttcgtaaatattgaccattgatgttttatactcactattatataccggccggttggactgtacgataatgtcaaatacaaacgaactattggaaatctcctccgtgagtgtgagctgaaaattagcttcaattctttcattatcagcaaactgatcattcgtccatttcgtattgttgaaaaactcgctgatagcattttctaaattctgaaaaatgacagggtctgtctgcatgatatttcgtgccagcactcttgtattgactcgtaattcctgtgccgtcaaatgagaggtgaacaatagaatgattatcaaaaaactcccccaaccccactgatctgaataccattttttcatctttctagtaatttttaacctatgggcataatggcctcataagtaagtaattattccatggacaaaatatgtaccacttcattaacgatgtccttcgccacttcattttttgactttaaagaaaaaaccttcttctccccatttttatggataatggtaactttatttgtatcatgagcaaaaccagcaccctcatctttcagggaattaagcactataaaattaaaattctttttcttcaattttctaagtgcattttcttcttcattttcggtctccaacgcaaaacctaccatgatttgacggtcactttttacggaaccaatgctttgggcaatatcaatggtcttttttagtgagacagattggatttcgtcatcctttttgattttttcggaagaaaagttaaccggtgtgtaatctgctacagcagcagccattattaaaacatcacaatcttgataatacttcatagcctgactatgcatttcatcagctgattggattctgactaccttccactcttcttccactttctcctgtgttggtcccagtactaatatcacctctcctccccttgctgcacattctgaggccagcgctattcccatttttccggtgctgtaattgccaatgaatctcacagggtcaagcgcttcgtaagtaggcccggctgtgatcaatactctcttcccttgcaagtcagaaagcgataaaaaataagccttaagcgcttgtattatttcttccggttctgccatcctaccatcaccgtataatccactcgccagctctccatggccgacaggaatgagtatatggccataactttgcaatcgatgcagattctgttgtgttgaaggatgatgccacatatccaaatccatggcgggtgctataaacacgggacattttgcagaaagataggtagctataatcatattatcggaaaggccgtttgccattttggataaagtggttgccgtcgccggagccacaatcatcaggtctgcccaaatgcccagctctacatggttgttccaggtttgggtatcattcaattgagtgaataccgggtttttggaaagggtagcaaaagtgagtgctgaaacaaaatgctgagcagactccgtcatcaccacttttacctctgcccctgattttactaacaacctgaccagcagcacacttttataagcagcgatactgcctgttactgcaatgagtatctttttattcctgagcgctcccatctgcagaacttgccttccaggctactcttctctgggatcgtgtcctctctggcggtattccagctctccgtttagaaattcctccgtagcaatagttaccgggttgggtagtctctcgtagaatttagaaatttcaatttgttctttattctcctggatttcctcgatggcatcggtttgtacagcaaattcttccagttttgagtgaagttctgctttaatatctacagcaatctgcttagatctctttgaaatgaccaccaatgatctgtacacattaccggacttggaagccagttgctgaatgttgcgtgctctgacattgggatcaatgccctgtacttttgttttaatatctgtcatacccgaccaaatttttgaagttcttttactgatgaattatatatgtctctggcttcctttatccacttggatctgggatgccgcttaataaactcggtataatgttttaaagtttcatcaaagcgttcctcctttctttcataaatgctgttttctgctaaaataaatgcagattttagcttcaaaaaacgagcttcttcgcttctaggagagcctggataatcctgcaacacattatcaaatgtctgaactgccgctctgtagtggcctaaattgtaatatagtattgcactttcgaaagattttcgttccagtttttccctcatctcatcaatgaggttattgatcagtggaatcttatcgctattaggatacagattggtaaaaagctgaaaatcatctatggccttccgggtgtaggtctgatccaacctgtagttaggagacatgaggtaatgggaataggctgccatatactccatttcctctctgtgtggactgttgtagaaactgttggcaaaattcttaaaataatgagacgctgttatatactcgcccccataataataggtgtatgcgtatttgtaaaaaatatcctccgcctgttcccttccgcgataaaaagggataatgacctcgaaaagcgcctgagctttggcatactcctttttatcgtagaattccaatgctttacttagcattaattcacggtccccactattccttatactttcaaattcggatttgcaagcggtaatcaagattatgaatataatataaaagggaaattgcttcatgaattacaaaaaatcaacgctgactattgataaaaattaatattgaatgattagatactttaaacatgtccagcctgaaaaaagggtaaaatattaatgcccttttaataagggcgcaaaaataaacttttttctcaatgaaggcaaataaattacgtatgcgacatcctaactattgtaaaacaactcattttttacaaaaatttaatttctatgatagtgtgcaaaaatcattgtagtgaacaatgtgatttttgatatatttacttctaatgttaagaagacaattaggctccgcaaatcttgctgatttcggtatcctttttattaattacttagttattgacccaatcaattttcaaattctatggaagatttaagatttccaatagggcgatttgtaagtcctgataaaatcacctctgaaaatgtgcattcgtatttaaatgacattacaacattaccccaacgattgcgggaagaagtacaccatttaattgatgagcaacttgataccccttatcgcgaaggaggatggacagtcaggcaggtggttcatcaccttgctgatagccacatgaatagtttgatccgatttaaactggcccttacagaagaacatcctaccattaaaccttactttgaagaacggtgggcagagcttgaagacagtaaaaccatgcccattgaacctgcattaaaaatgctggaaggtatacatgcgcgttgggtatttctgattcaaaaagcagaaccggcacttcttcaaagaacctttgttcatccccagcatgggaaggtattccgtttagatgaaaatctggcactgtatgcctggcatggcaaccatcatctggcgcacatcaaggcattgaaaaaaagaaaagggtggaaatgatgaagacttccctattgtgttgctgaattttccactgaagaactttaaaactattttatatttaagcacctactggttgcaaaaaattagagtaggtgaacaaaatctgtaaagaaaaatacttaagcactaatcggatgctatgagtttgatcatttccttgcgcagcttttcatccggcattctcccaaaccctgccccaaaattatccagcatgtgatggggctttgaggttccgggtattacgcatgtcactgcagaatgggaaagtatgaattttaaaaatacctgtccccagctttggcactccaattctgatttagcccatgggggcaattctttattgcgcacccggttgaacaaatttcccgactcaaatggctggttgatcagaacggccactttcttttcctgacaaagtggaaaaagtctttcttcggctttacgacgcgtgagcgaataattgatttgcagaaaatcaatggaatggtttttcagtatttgctccaacgaagaatatgcgctttcagtataatgcgtgatgccgaggtattttacttttcctgactccttccattcctgaagagtctttaaatgcgtctgccagtccaccaggttatgtatttgcatcaaatccatatgttgacgtttcagaaaagagaaggattcattcatctgccgtattccttgctctttgccactggtccaaacctttgttgccataaagaattgatcgttgagcttcaggtttgtggacaactccccaactactttctcagatttaccatacatcggagagctgtcgataacagagccccccttatcgtacaaagtctgaagcacttcttttaatggctggcgtacatctttaccttctcccacatcaaaagtttgccaggtacccagtccgataatgggaaggggttcctgtgttgaagggataggacgtgtatggatagtgtggtctttcatcagccaatacggtatgtagggcaatagggtcaatgcagccagttgtttgagcgctgctcttctgtctgggttttccatggtaataatttatacaatttcaacgattataaattctggaaagtatggtgaaattggtgtgtacgatcgttcagttgaataaatgaacgcctttggatggtgtatattctgttgattttgtctataagaataaatttcaagaaacaaagtctctggttgatccatccatttcaaaccggaggctgagcaaggaattgttattccgggcatttaaattagccttggtgtctcagtttgtataattattgaagagtttgtatattagtgggcaaagggaagagcatatccataaaaaaaggcgacctgcagaggcccccttgagtgttttcacaacggaataatccttattgtgaattgctttcgtgttacaaatttaagaaaatgaacgtcaaaaagtaaaacaactatgaaaaaagttttaggacttgatcttggcacaaattcgataggatgggctttagttgaacaagatttttccgaaaagacaggaagtatattaggaattggaagtagaataattcctatgagtcaagatataatcggagaattcgggaaaggtaattccatttctcaaacagctgaaaggacaagatatagaggtataagaagacttcgcgaacgctatttattaagaagggaaagattacacagggtcctgaatattttgagttttttaccggagcattatgcaaatctaattgattttgaaaatcgtaaaggtcaatttttagatggtgctgagccaaaattagcctattgtaataatgaattcatttttaaggattcatttaaagaaatgttgactgaatttaagagatttcaacctcgattggtagataatagcaaaaagataccttatgattggacattatattatctaaggaagaagtcattaaccgaaaaaatatcgaaatctgaattagcttggattattcttaactttaatcaaaaaagaggctattatcagttgcgaggtgaagaagaggaggagtcacataataaactgattgaatttcactcactcaaagtcatagatgttatacctgatgaagctccaaataggaagggtgatttatggtattcaatagttctagaaaatgggtggatatatcgtaggtctagtaaaacaccattggatgattggaaagataagattaaagattttatagtcaccactgatctaaatgaagatggtacaattaagacagatagtgagggtgcagagaagaggagtttcagagctccaaaagaagacgactggaatcttgttaaaaagaaaacagaatatgagattataaattcagaaaaaacggttggtgaatatatatatgaagctatattaagaaatcccaaccaaaagattagaggaaagctgattcgaactatagaaagaaaattctataaagaagaattaatacaaattttgaactcacaaaagagattccatcctgaactaaacgacaaatcattgttatctgaatgcattagtgaactttacagattcaatgaaccacatcagctacttcttttaaagaaagattttgtgcatctgattgtcaatgatattattttttaccagagacctctgaaaagtaagaaatcttgcatttcaaattgttcatttgagtacaggaaattcagagatgagaatggtgtcgaggtgactaaatatttaaagtcagcagcaaaatcaattccatactatcaggaattcagattgtggcagtggatacacaatttacgtctattaaatagagaaggggatgtggatgtaacttatgattatctccaaacttctgaagaaatttccatgctatttgactacttatcagaaaggaaagaaattgatcaaaaaactttattaaaatactttaagctgaatgaaaagcggtttagatggaattatgtcgaagacaaaagctatccatgttttgaaacaagagccttaattaaatcaagacttaagaaagttgttaccgatgttgatgtgtttttaacatcagaaaaagaattattgatttggcacataatatattctgtcacagatatcaaggaatttgaaaaggttctcaaaaccttcgctgtaaaatttgatttagacgtagaatcctttgttgataaattcagaaatattcctccattcaagagtgactatggaactctttctgaaaaggctattaagaaaatcttacccttattaagaactggaaagtattggaattggcagagtattcctaaagttgctcaagatagaattcttcgattaattaacgctgaatatgataatggtataagtgatcgcttaagggaaaagttagcaagtcttcaaacagagaaggatttccaggggttgcagatgtggttagctcaatatctggtatatggtgaaactaaaaataccaataaatgggaatccgtttctgatattgataattttctggctgagttcaaacaacatacacttaggaatccaatagtggaacaggtagttactgaaacactaagagtcgtcagagatatttgggccaaatttggaaaaggaaataagaacttcttcaatgaaattcacgtagaacttggcagagaaatgaaaaactctgcggaagatagaaagtctatcacaaaatccgttactgaaaacgagaatactaaccttaggataaaagcattgctagctgaattatttaatgattccaatgttgagaatgtaagaccttattcaccaattcaacaagaagctttaaaaatttatgaagatggagttcttagatcaattgagttaataccagatgacatcttaaaaatcagtaaatctgcgcaaccaaacaggtcagaacttcagagatataagctttggctggaacaaaaatatcgctcaccatacacgggtcagattatcccacttaataaactatttactacagcttatgaaattgagcatgttattccacaaagcaaatattttgatgatagtttttctaataaagtaatatgtgaatctgccgtaaataagctaaaagataatcaattaggcttagaattcattaaaaaccatcaaggtgaaaaagttgagattggaagcgggaagtttgtagagattttctctgaatccggatatcgaaattttattgcagaaaattatgagaaaaatcccgccaaaagaaataagcttctatttgaagaagtgcctgaaaagatgattgaacgacaactgaatgatacccgatacatcagtaaatatatctcagcattattgtcaaatatagtcagatcagaaacgaatgatgacggtattaattctaagaatttacatccaggtaacggtaaggtaaccaatatcctaaaaaaagactggggtctgcatgatgtttggaatgttttgatcttgcccagatttgaaagaatgaacgaaattaccaattcaacagcttttaccgtatggaatgaaaaataccaaaaatatttaccatctgtcccacttgagttttctaaaggttttcaaaagaaaagaattgaccatcgtcatcatgctatggatgcgctggttattgcatgcgctaccagagatcatataaatcttttgaacaataaatttgcccgttccaaaaatactcgatatgatcttcaacataaattaagacatattgaaaggaaacagtttactaaccctacaaccggaaaaatatatgttagagatattccgggagactttataaaaccatggcctacctttacccaggatgtgaaagcagcgctcgaaaaaatggtgattagcttcaaacagaatcatagattaatcaataagacaagtaataaatatcaaaaatacataaatagaaacggacaaatggtaaaagaaatcgtcccacaggtgaaaggagatagttgggcgattagaaaatcactacataaagaaactgtttccggtcttgtgaaacttgatagaattaagttgccgaaaggaaaaatattgacagctaccagaaaaagtatagatcaatcttttacagaaaaagtaatccgctctataacggataccggaattcaaaaaattctgttaaactatctaaagtctaaaggtggcaaaccggagctagctttctcacctgaaggtctggaggacatgaataataatatagagcagtataataatgggaaaaaacataaacctattcataaagcaagaatctacgaatctggcagcaagtttgctttaggagaaaccggtaataaacgatcaaaatatgttgaagctgctaaagggactaaccttttctttgctatttatcaggatgaatcgggtaagcgaagttttgaaacaatacctttgaatgtagtaatcgaaaggttgaaacaaggatggggtgctgttcctgaaaccaatgagaaagggcataaattactttttcatttgtcgccgaatgatttggtatttatacctggaagcatgagaatgaacctagatttgaactatccaaaaagtatattggatgccaaaaatccggaacttatgtataaagtagtaagcttttccggtactcaatgtttttttgttcaaattaatgtggcatcatctattgttaataaaatggaattttcagcgttgaacaaattggaaagatcgatagcgggtgacatgatcaaggatgtttgtgttaaattattggtagatagaattggaaatgtacattcagctatttcataatggatatctcgaaattgaatgtgttaagaataaataacccttatttttaaaaaatatatgaaagagaaatatgataaagaggatcaagtagctttgtctgagcctaaaattaaaatttacaattcatatgatcaaatggaagagttacaactcaaacaggcattgcgaaaagacccccttacaggattgcgagagacggtagaattgatacttagagtatatggtgtaactagggaggacttgaacaagagaacaagagaaaatagaataaggatagtacattattcatgaacttgtttattgacaaacatcaggaattgttattacattttctggaaaaggaagttgatttcattgtaatcggagggtattctgtgatttatcatggctacagaaggacaaccggcgatgttgacttatggcttaaaccggataatagaaataaagtcaaagttatggcagccctgaaatcattggatttcgaatctgaagaactaaagttaattgatcaacttgattttacaatgcatctggctttcagtatctgggacgaaccggaaaaggtagattttcttacctatataaatctaattagctatggggaagccgatcagatgaaaattattgcagaggtggataacttaaaaataccctttttgcacttaaatcatcttttgctttccaaaaagaatacaggtcatcctcaggatatcgctgatattgagcaactgcaaaaaattaataagttcagaaactagaagtattaaataattgaatatcaaaggtccggaaaattagaaagtaccatactctttcaatttgatccattcaaaatagctcactgcggattatccttggcatgcaaattgctgttaatcatctgattagcattattttcttgatatgatcaagcgcacgctatattttggaaaccctgtttatctccatttggataaaaaacagttggtagtagacaccagagatattccttcagttcgtcgggaaatcccggttgaggatataggtatagtcattattgatcattatcaggtgagtgtcagtcatgccgttaccaatgcattgattaacaataatgtagcaatactttggtgtgatgacaagcatttgcctaatggacttgtattaccaatgactgctaatcatacctacacagaaaaattaagatatcaaatcgatgcgagccttcctttgaaaaaacaattatggcgtcaaaccatacaggcaaaaattcataaccaggggttgctactcaaaagcatgggtaaagatgccgccccattattcaggtggtgtaataaggtaagaagtggtgatcctgacaattacgaagcacaggcagcagcatggtattgggagcgtttgtttgagtcagaatcaggttttgcaagagagcgatatggtgacccacctaatcatcttttgaattatggttatgctattttaaggagt

SEQ ID NO: 1419 - DNA, 12464 bp, synthetic construct
  source 1..12464: mol_type = other DNA
  misc_feature 1..12464: note = Synthetic
agatgacggggtgatgggatagatagcggcaacctcgctgaacatatacgagatatgcgcagctgcctcattaccatcacaagtgataaatttcttttcctttgtcatagacttttaaactattagtatttaaagatattactctttattcttatcgtattcaatcaatataagaaaccgaacagccagagcggaatcatgtttccggctcccacctcagccttatcaaccgcataaaacagctctgtgttactcctggccttcatgccctcctctactcggaacggatagcagctattcaccaagaaacgagcgttgcgtccaccttcgttcacctgattgtccttcagcaactgattgaagaagaacgtttccctcaccgtctgtgcgttcacctccatcgggcgaacgggatacatcaggtttgagttatacagatacacataggccggcttcttcgggaagcattctccctccggataaagcatgttgaccagccgtgcgtccgacagatacttgatgtaattcatcaccgtcgctcttgatgcgccaatctctttgctcaattgactcacgttcggcgagttgggagccgccaccgccaacagataaagcaacctccgcaacttaggcagataggtctgctcgatctgtttgatataaagcacgtccacttccagcatcatgttcatcgtcttcaacagattctccgagaagttccgcttttccaagaagaagggataaaacccatgatgcagatagtcctgaaaatagtctaacggcctcaccttcgcacagatctccttcgcgatctcctgatgacgacgcataatctcctcgaaaggataggccggaaaagcattgccggacattaagtttaagaactccctaaacgagaagcccctcaagttataagaaaccaccttgcccgagagatccggattctcctccttcaagcgcatcaccgacgagccggagaacacgatccgcaaatcctcgaacgtgtcatagaggtaacgcaactcccttgaccaattcgcatacttaaacacctggtcgatcagcagtacacgcccacctctcgccctaaacgccgtggcgaaatccaccaacgtacgctccgtgaaataaaaatgattcagattgatataaagacaagctctgttatccgccccaaaacgctccctcgcataatcaagcaagaaagtcgttttgccgacaccccgggagcctttgataccaatcaagcgatcgtcccagttaatctcgtccatcaaccctctccgcaccggagcgtagagatgatccaccaagtatttatgtgtcctaaaaaatgcctccactttacttactttacggctcaccttccctttcgggactatgcaggcgcaaagatacacattttatcgtatttgcaatgcggagtttgcaatttgaatggatttttaggattgcgatctcctatcctaattcgataacctccaaatcgtcgggcacacggatggagccggaaaaaaccgtagccgcctcatcggtgtaacgctccttgcgttgcgcgagcgtatcctcctcggtatgatagaggatcaggtttcgtacatgcaagcgctccgcatctcgtgcggcatccaacgccgtgctatgatgtttctcataaggcttataccgctcccggtcagcatagaggcagaaagcctcactcatcagccagtcagccccctccgcatagctcgcattgacctcgttataaggctcgtcacccaaacaggtaaggcgaatatctcccggcaattcagccgtgaagccaaactgctgctccttggtcgaatggatgtcgaaacattgcagccgcatgtcgcccacctcaaaacgatcgccatcctgcaaggccgtcagcgcaatacgatccggcatcttgtcaagcaatttctgcggcaagagcatccggcaaaaaacggtcagcacatccagcacccgttgatggctgaagatatgcaacacagcgggcgttttccgttgcaaagtcagacggatgagccagatagcccctaacacatgatccgtatgcgcatgggtgatgtagagatcggcaatctctccccgctcgatgccagcacgctccagctgactcagtatgccgttgccaccccctgtatccaccaacaaatgtttcccactgctgcttgtcaagacaaaacaggtattaaaacactttgtaaccagcgcattgccggttcccaacatcgtgatcttatttttcatcgcaccaaatttttcgcatagaacgggcgcaaacttaaccaatttatcgctctttttcctatcttcgcagcatatttcagaaattcaaccaattaattaatgtcatgaaaaaattactttttatctgtaccctgatgctgcttacggcagtccatgccttcaatgccaacgcacaaggcgagtccaaagactatttcatcggtaaatggcaagtgagtgtacccggtcttccaatgggtgatgtggatatgattgtggaactaagtcgggtggacggcaacctgaaaggaaccatctccgccctggagcaaaccgttgaggtagagcgcatcaccgagcgagagaaatccgtgacactctatttcgtaggtgagggctatgatgtggatctgacactgacgaagaagaatcaaaatgaggtgacaggcgacatgatggggcagttcgacgctaccggcaaacgcgtcaaagcagacaaggccaataaatcaaagaagaaaaaatgagcaaaattaagatagctttctccggtatcgggggtgtaggaggatattacgggggtcaaatggccgcccattacacagacagcgagcaggtagatatttatttcatcggacgtggagagaacctaagagcaatccaagccaatgggctgaccctgcgcatcgaaaccgagcatcgtaccttatctgtccatccccaattggctacagaccaacctgccgtagtcggaccggttgactatcttttttgttgcacaaaaggctatgacttggaggcaaacatccgtcagcttcaaccaatgattggaccggagacagtcattatccccttgttgaacggattgggtatccctgaacgcatccaagccttgtgcccgggacgaaccatttggggcgggtgtgtctatatcggtgcccgcctcatcgcccctggtacggtcacgctcttctcaaaaaaggaacgtttctattttggaggggagactttgcgttatcgacaaaccgagttattgaaactactcactgacgcaggcatcaacgcattcaaccccgaagacattcaacagcgcatctggaagaaatttttcatgatctccaccgccgccactacaaccagctatttcgatcaaccattagacgaggtgattgctcagcatcacgatgactttatcgccattagcgaggaattagcagccgtcgcccaggcagcccacgcacaattacccagcgacatagtcgagtcttctttagctgctcaacagatgatgcctcccggctccacgacctccatgcacaccgacttcaagcaaggtaaacccactgagctggaaagcctcaccggttatgtcatccgcctaggcgaacaattaggcatcgctacccctacctatcgccggatgtatgagaagctgcgatcttagctggaacaacacctttctctgttatctgtatagaatcgtagcggaacggggagccactgtcacactatcccctgacaccttccccattccgtctaagtcaatgcgcccatcatgagccaccttctcatagttgccctcgggaatatgcacactgacatcagcatccttggcgttgagcaccacaataatgtctctccaagcatccccacccgcatggtcagccagacggaaagccaccaccttggagggggcatcgaggaacgagaggtgacggcgtacaagatcggcatccttcaaacggaaggccggatgctcattgcgcaagcggatgagtaggcgataatagtcgaacacctcaggatgcgtgtcttttcggctccaatcaatcgcattaatagagtctggcgacttataactattgtgcaccccctttttgtcacgcagcatttcctcgcccgcctgcatgaagggaataccctgactggtaaatacggcggtctgggccaacaggtcaagacgaataagttcagcctcacccttgccagcctgctccgtagcactgcgcaccgtagcccctgcaagaccgggcacggaggcacgcagacggtcggtaaggcacatatcatcgtggcacgaaacgtatgaaatcatctgatggggctgccttgcccatgcctgtttggaatagttgaccttctgcatatcaatttgtggatgtgctatcgcaccagcgatgccaaacttcacactctcttcatgcccttccttaccgccgaggaaggccgtctgatggtcatccgagaagggccctctcaatccgtcacggatctcatcgctgaaggcagctacaccctccacgttccctatgtcggccttcattgccgccgttccctcaggaagttggggagtcgatgccgcccaaccctcgccataaatcaccacatcgggattgatagcacatgctgcttggcgaatttgacgcatcgtctcctggtcgtgtatgcccatgagatcgaaacggaagccatccacatggtattcgcgcatccaatactccacgctctctatcatatactgccgcatcacagcacgttccgaagccgtctcgttgccgcatccagatgcatcaccccatgtgccatccggacgctggcggaagaagtatccaggcaccgtacgctggaaattggagttgtcgatgtccatcgtatgattatacaccacatccagcaccagcttgatacccgccttgtgcaaggcttgcaccatctgcttaaactcacggatgcgcgccttgggatcagcagcattggaggaatagcttccctcaggcacgttatagttcaatggatcgtagccccaattgtattggggtatctcgggatgctcctcgtccacggtgaaatagtcataagagggtagaatatgcacatgcgtcactcccaaatcccgcagatggtcaatacccgtggtgtgtcctccaggggtggtggtaccgtgctccgtcagtgccaaaaactttcccttgttctccacaccgctggtagctgccatggagaagtcgcgatgatgcatctcatagatcacgatgtcatttcgttgcggagccttatcgttgagccatccgtcaggatctgtagtgcggaggtcaaggatggcaccgcgcttgccacctacccccacggcatgggcattgataccagggttctccccgagccattttccttcatgaagcacattgaaagtatagaacttgccatcttgattaccttttacagtagcgtgccatgtgccatcttccgagcgtttcattgttacggttttcacggcttttcctccctttgcgtcagcatagagtttcaactccacctgttgagcagtgggcgcccataattggaaagcagtctcctgcgcactataagtcacttcttgcaggctccccgcaggcacaggatagtcctcaaaggtagcatattgattattttgagccaatccaaacagactttgaagagcgaaaatgccaagcataattgtcttttttgatttcatggtatgatcattttaaacgagtaacgtattctgtgggcaaagataaaaaagtctttagtttctaacaagcttctccgctccccttctcaatcgatcgggatcaaacgatcaatcgaatcggctcaaaagggatatgggaccagcagaaatgatcacttggggcgacaggtattaatcaggtattaattgttaacgcaaaactccgtttttctatctcatccaggaagacaaaaaagccccaccgttaaaggacgatgggacgggacctaatgttttcacaacggaataatccttattgtgatttgctagaaatttgtgcaaatataagcattgtttctaaatccacataacaagaatcactatctttgccaaaaacaatcttaatagggctaatcatggatgaaaaatacattttaggtctcgacctgggaacaaatagtatcgggtgggctgtcatcaaacaaatcatgcaagagaatggcatatatacacttagcggcatcttagacgcaggaagccgaatcatccctatggatgcagctatacaaagcgatttctccaaaggtaattccatctctcaaacggctgaccgtacacattaccgtggagtcagacgcttgcgtgaacgacaacttttaagacgtgaacgtttacaccgtgtgcttgatagaatgggatttctccctactcactatcaaaaagctctcacccgatacggaaaattcaaagagtatacagagtgtcttttgccttggacaaaagatgagtctgaaaatgcgaccttcctatttaaagcaagttatgaggagatgctacagctcttttggcaagttcaccccgaacttatgcagcagcaactgaaagttccttacgattggactatttattacctacgcaagaaagcattgactgaagcgatcaccggacaagaattggcctggattctccttcacttcaatcaaaaacgaggatactaccaaacccgaggagaagaacaagaagaagacaagagtaagaaagaggaatactatgctttaaaagtgatcgacgtacaggatagtggcgacaagaaaggaaaagacatctggtggaatgtattgctggaaaacaatatggtgtatcgtcgcccatccaaagaaaagcccgattggatcgggaaaatcaaggaatttattgtcactacgcaacttaatccggacggcacacccaaaacagacgctaaaggagagatcaaacgatctttccgaatgcccaatgagaatgattggagtcttgtcaaaatcaagacacaagcagacatcaagaaatcgcacctaaccgttggaacatacatcttccaagcgttgctggccaatccgaaacaaaaaatcaaagggaaattggtacgcaccatcgagcgtgacttttataaagaggaattacgacaaatactcgaagcacaaaaacaattcattcctcaattgaacgatcgggagctttatgcccattgcatccaagagctttatccacaaaatgagccctatcgctcatccattgcgaacagggatttcacctatctactgatggatgatattcttttttatcaacggccattaaaaagcaagaaatcattgatcagtgaatgtccctatgagcagcacgcattcatcaatgaaaatggagaaccggccacgaaatcactgaagtgcattgccaagtcacatccgctctatcaagagttccgtctgtggcaatggatttataacctgcgtatcttcaaatcacagagggacgcgaatggccgtgcattggacgatatggatgtcacggaacaattcctgccagacgaggaatcgaaagcaaacctgttcgattacctcaacgacctatctgcaatcacccagaaagagctccttgaaaagtatttcaaactgaaaaagcccgcagggaaaaatgctgagttaccctatcgatggaactatgtgcaagacaaggcttatccatgcaacacgacacgaggagacatccgcagcagactgcttaagcatggcattgattgtacattcctcacaggctccatcgagcaacatctttgggaaatcctgtttagcgtgagcgaccgacaggagctacgtaaagcgttaaccaagttcgcagagcgccatcaactgagtgagtattttgtagaagctatggccaagttccctccctttgagccagattatggagcctattctgccaaagcgatcaagaaactattgcccttgatgcgcatgggacaccattggaatccggaagacattgatgaggcgactcaaaaacgcatccagaaaatcatcgacggagaagtagatgacagcatacgccaacgggtcagagagaaggccatccatctctctgacattgagcaatgccatgggttgcccctgtggttggcttgctatttggtgtatgaccgacatagcgaagcaagtgacaccaacaaatgggatagcccggccgatattgatcgctatctgcaacaatttcgtcaacattcactgcacaacccgattgtggagcagatcctcatggagaccttgcgcaccgtgagagatatttggatcaaagtggggcatattgatgagattcacatcgagatgggccgtgacttgaagaacccggcagacaaacgggcgaagatgaccgaaagagccttgcagaatgagaatgcgaacctccgcatcaaggccttgttgaccgagttcatgaatccggtgtttgagatcgagaacgtgcgtcccttctcccccagccaacaagaactattgcgcatttacgaagacacagctctaaatagcgtagaaatattagacgatgatatcgccgatatcgtcaagaaattcgctcaggcagacgtgaccaaacgaccaacgcactccgaagtgatgcgttacaagctatggctcgaacaacattacctatcaccttataccggacagcctatcgcattgtccagactcttcacaaccgactacgagatagagcatgtcattcctcaatcacgctattttgatgattcgctatccaacaaggtcatttgcgaggcagaagtcaacaagctaaaagaccatgcgcttggctacgagttcatcaaacaacatcacggagagaaagtgcagataagcggtggtcgcacggtcaccattttgggaagcgatagctattgtcgccttgtggagcaaacctacaagaacaaccgtgccaagatgaagaaactgctcatggatgatatacccgccgaattcattgagcgacaactaaatgacagccgttatatcagtaagctggtgaaaggtttgctttccaacatcgttagagaaccggacgagcaggaagccacgtctaaacacgtcattgtctgctcaggtagtgtaacggatcgtttaaaacaggattgggggattcacgaagtgtggaatcatctcattctgcctcgttttgaacgtatgaatacattgacgggaacgaccaagttcaccacaacaagcactgccggacatcgcattcccgacatgcctttggagctgcaaaaaggattcaacaaaaagcgtattgaccatcgccatcacgcaatggatgcgattgttatcgcttgtaccacccgagatcatgtcaatttactgagcaacgaagcagcctctcccaagagcaatcagaatcgccatcagctctctcacaaattgcgcagatacgaagaggtgacaaccctccaaaatggacagcccaagaagctcaacgttgccaaggagttcttgatgccttggccaaccttcccggccgatgtggaaaaaactttaagcaatatcattgttagcttcaaacaaaacctgaaagtgattaataaaacatccaatcactccttacgtttcatagatggcaagaaaaagtttgttccacaaacaatcggagatagttgggccattcgcaagtcgatgcataaagaaaccgttttcggtgaagtcaacctgcggaggataaaaacagtcgcattaaaagaagccctacttcaacctcaccgaatcgtgaatcgtgacctaaaagaaaaaatcaaggccatgttagcattaggctataacgaaaaacaggtgaaagcctatttcacagaaaatgccgatacttggcaagatgtcaatttgcggaaaattgaggtatattacttcacaaaagagacatccgatcgttattttgcgactcgaaaggctatcgatacctccttttctaaggatttcattgaaacgaaaattacggataccggcatccaacaaatcttactgcgccatttagagcgacactgcaataacgcagagctggccttttcgcccgatggcatagacgagatgaaccgaaacatccgtgagctgaacaagggacataaccatcagcccatctacaaggtcagagtgtacgagaaagcggataagttcacggttggacaaaccggaaacaaatcccaaaaatttgtggaagcagccaaaggaactaatcttttctttgcggtctatgaggaaaccagcatagataagaaatcaggcaagatggaaaagagacgtagcttccgtactattccgctgaatgaagctatcttaaagatgaagcaggccttgcctcttgacaaacaggcactctttatcctttcaccaaatgacttggtatatttacctactgaagaggagaacaagaagggagagatacagatgccaatagataaaagcagaatttataagatggtatcatccaataaattccaagcttttttcataaatgagagagtagctgcaatggttcaagataaacttgaattttcacctctcaacaaaatggaacgagccatcactggtgaaatgattaaagagacctgcattcccctaaaagtcgatcgattaggcaacattattcaaataggcatataaagttatgatcaagaagaccttgtattttggtaatcctacctatctgtcactccggatggggcaactggtcatcaagctgcccgaagtagaaaaagcaacctctctaccagaaagtatgagggaaaagtcggtggttactcggcccatcgaagatataggcatcgtggtgcttgacaacaaacagataaccatcacgcaaggtcttcttgaagcgttgcttgaaaacaactgcgccgtcatcacctgtgacagccattgtatgcccgttgggctaatgcttcccctatgcggcaacagcattcaaagcgaacgattccaagaccaaatctcagcctccctacctttgcgcaaacagctttggcaacaaacggtcaaagcaaaaattgataatcaagccaaagtgcttttccattgtacacaaacagaaataggctgtatgcaaaaatggagtaacgacgtaaagagtggggacactgataacatggaagcacgggcggccgcctattactggcgtaatctgtttgcttcgcaaccaggcttggagcatttttctcgttatcgagaaggcactgagcccaacaacctactcaactatgggtatgcaatcttacgagccgtagttgccagagctctggtttgcagcggtatgcttcccacattaggtattcatcatcataatcgttataatgcctattgcttagcggacgacattatggagccctatcgtccctatgtggatgagttagtctatcaaattgtcaacgaaaagggagcagattgccttcaactaaccaaagagataaaagctcgcttgctatccatacctacccttgaagtggtgataggcggtaagcgaagcccgctcatgattggcgtttcgcaaactaccgcctcactctataaatgtttcagcggagaactacgacgcatagcttatccggaatatggcgttccacgctaaaaccatgcatccatggatagatttagtgaatatcgcatcatgtgggtacttgtattctttgatctaccaacagagactaagaaagacaaacgagaatatgcgctctttcgtaaacgtctgcaaatggatggattcagcatgttccagttttccatctatgtgcgtcattgtgccagcatggataatgcggcggtacacatcaaacgagttaagagttttctgcctaagttcggacatgtggcggtgatgtgcatcacggataaacagtttgccaacattgaggtattccacggaaccaaggaggttaaaggcccttcacagcctacacaattggaacttttttgatcagatttttaatcctaatttccattataaacaacaggatattagccaaataccaatatcctgttgttaatcacccttcaaaggtaagaatttctaagcaaatcacaactactgcaaagttactactaatattttccggttgttaatcacccttcaaaggtaagaatttctaagcaaatcacaacggtgacgagtgtcattgacgagctgacctggttgttaatcacccttcaaaggtaagaatttctaagcaaatcacaacatagtgccgtctctgtgcgtctctgtgcggttgttaatcacccttcaaaggtaagaatttctaagcaaatcacaacggccaggtttattttgactgtacagcaaaagttgttaatcacccttcaaaggtaagaatttctaagcaaatcacaacgcgttcaacaattcattagatgtttgcaaagttgttaatcacccttcaaaggtaagaatttctaagcaaatcacaaca

SEQ ID NO: 1420 - DNA, 12273 bp, synthetic construct
  misc_feature 1..12273: note = Synthetic
  source 1..12273: mol_type = other DNA
gtcgatgatgcggaagttcatgccgtgtttctcggcggcttccttcaccttgcaggtgcaaacgccttcaggcatttcgaacaacagcgtgtcgaagaagtgcttgttgagttgcttaacgccgagtttggccaactctgaagtgagttttccagcgaggcaattaatatggtgtgcgatttcaatcaaaccctcggggccatgataaagggcatagaatcctgacatgatggccaacaaagcctgtgccgtgcagatgtttgacgtggctttttcgcgcttgatgtgctgttcgcgggtttgcagggccaagcggaaagcgggattgccgagggcatccacgctgatgccgatgatacgtccgggcatttcgcgcttgtaggcttcggtggtggcgaagtaaccggcgtgaggaccgccgaatcccatcggcaggccaaaacgttggttggaaccgagaaccacgtctgcaccccattcgccaggaggcgtgatgagggtgaggctgagcaggtcggcggccacggccacttgcatgcctttggctttccattcggcaaccttggcgcggttgtcgacgatttcaccgaactggttggggcattggatgataacgccgaaatattcttcgtttgcttcaaatttgttgatgtcgtcaatcacgacttcgatgccttggaagtgggcgcgggtcttgatgacttcgatgctctgtgggaacaggtcgcaagccacgaagaacttcttcacgccggccttcacttgggcgcggctacgcgagtgccagaacatcagcatggcttcggcagcggcggtgccttcgtcgagcaggctggcgttggctaaaggcatggcggtcaggtcgctgatgacggtttggaagttcacgagggcttccaagcggccttgcgaaatctcggcctgatagggagtataagaggtgtaccagcccggattttcaaggatgttgcgcatgatgacgcccggggtgatggtgttgtagtagcccaagccaatgtaggtgcggaactgcttgttcttggcgcccaaggccttgaggtggctgatgacttcgtactcgttcatgccatcgccgatgttgaggtctttcggcagacggatttcgggagcgatgatttcgtcgacaagttgttcttgcgatttcacgccgatgaccttgagcatcttttcagcgtcggatgcggtaggtccgttgtggcgtttgatgaaattatttctgatcatatacgattgttttgattatgatttatttgtattcttcaagtttttgtttcaaagtgttgatattgttgatggacttgatttcgttagaaggcacgcgcaaaaaatcggctttccatctattgaaacctgccgtgttttccagaatggtcaaatataggtaatagaattccttgctcttgaggttgtccttcttgtatttgcggtaaagttcatgataggtacccatgctcgtttcctgacggtgaatcagttcccaaaactccttcttgaattgggcacctcggtcgttgctttcaggtttgacggtttctgccggtttggtggtttgttcttggattgttggggtagtttcggtgggttttggcttttcctcaaccttgggagtctctttcggctttggagcttcaacggcttcgggtgttgtggttgccttgggagcctcattggtttgggcttccatgttttgggcgatggccgtttgtgctatttctggttcaactgttgctgtgtcatgtgcgttgttttccatgagttccgacttgacggtgtctgtcatcacattctcaacaacaggcttgggatcgttggcgggcgttttggacttgggcttgctgaaaacggcagaataaaggatgatacccgtaacggcaaccgtaatgattccaccccaaagaatgggttgtttgctgtgtttcttctcatattgcgcgatgagccttccgtcgtagttggtatcgcgatcaggcaccaatttgaaatcaacaaaaacatagccccttggtggtatgatgtagtccacaacatcgtggccgtcttcatatctggaataagggcagttcctatatttctttcccatcccggggtcaactctaaattgcttgaaattggtcgtgttactcatggttttctgaattgtttgaaaatatttttgtttctttcatggtcgaatcagccgacactttttctgagagcttcgatggttttgatggaattaagttccttctctgggatctttttcaacttgtcataccaagccttgaaggtcacaaagtctttcaggatggtataacgcagataatcgaattcttctcctgccaccttggttttgttggcgttgtaaaggtcggtgtaggcatccatagagcctgatttttcgtgtaccaaagtccaaaaatcgcgtttgaaaacctcattggggtcggttgcggcaggcagttggcttggcgcgttggtcgtttgctcaacagtgctgatggctgctgcgggttgttcctcgacaggagcttttgcctcgggttgggcttggacaggagccttttcttcagcttgcttgggcttgtttgtggctttttcggcagtctttttctcttttttatctttattcttcttctcctttttgttgttggtgatttcagttttcggtttcacatcctttgttttgggagtgcttggttttgggtctttaaaaacactgaaagccaacaaaataacaattccaatgactaatgcgatggcaagcaccaaaaccaacatccagatgttagacttgaggcgggtgaggaatggctctttcgcatattccgctgtgagttttccgtcgtaaatctggttgctggcatcggggtcgtacttgaagccgataaacacatgtcctttgggtggaatgatataatccttgacatctcgtccgtcctcatagatggagtatggacatccgggcattttcttgccctttccagggtcgatgctatatctcttttcggtgaattccgtcatttcggagtttattgtaaggttttgtttaatgtgatgtaatttggataggcaagttgctggtttccaacggtaatgtaaggcttcacctgaagtcccatattaacgggattgctgctcgcgccggccaacttgaaggccaaattcacgatggcatccgccgattcgccgctgaacagttggaacaggtctgtagtgacgggaatcgtgaccatgctgttcgatttggcgggaacgttcacgctgttgttcatggtggtgctgacaacttgctttccgttgagggtcaatatgtaatccatcttggccatcgaagcggcgatggagttggggttgcttacatcaaggttgacattgaaagtgacgggcaggcttctgttgctgattgcgttgacgagagccaatccttgcgaaatgttgaggttctctctcgacatgcccttgctcaggttgatgccgagcatctcaatatggttgacgctgttgaaatcgaaggtgcaattggcaaagttggccatttgtgcaacttgagtgagcacgtcacacgaggccaatcctgccgtgacgaataaaattataagggttctcttaagttttgacatgtctgtaattatctaataatcaatttaataaatcataaaaatccaacaagcgttgggcttgttttctgctcgtctataattttgcaataatacgaaaaaagtcggacatacagcccgacttttggaaaatatttttcggtattattcctctccacggcgcgaagcgcgtttgcgctcaatctcgtcgaggatgattttgcgcaggcgcaggctcttgggtgtgacttccagatattcgtcgtcgcggatgtattccatgtattcctccagcgagaaccgcacgggcgggatgaggcggatggcctcgtcgctgcccgaggcgcgcacattggtcaagtgcttggttttgcacacgttgatgacgatgtcgttgctgcgggtgttctcgccaatgacctcgccggcatacacgtcttcattcggattgacgaagaaaatgccacggtcttgcagtttccaaatggcgtaggggatggcctgtccggtttccatcgaaatcaaggcacccacgttgcgagaaggcatctcgcccttccaaggctcgtagtccttgaaacggtgcgacacgatagcttcgccttcggtgacggtcaaaagcgtgtttctcagtccgataagtcctcgcgaagggatgtcgaaatcgaggcacatgcgatcgcctttgggttccatttgggtcatttcgcctttgcgtgcgctgacttgctcgatgacgcgccccgagaagtcttcaggcacgaggacggtcaaggcttcgataggctcgcatttcacgtcgtcgatgtatttcacgatgaccttgggctgtccaagttggaactcgtaaccctcacggcgcatggtttccacgaggatgctcaaatgcaggatgccgcgaccgtaaaccatcagtgaatcaggcgaatcggtgtcttccaccttcagggcgaggttcttttcggtctccttatataaacgctcgcgcaggtggcgtgaggtcacatatttgccttccttgccgaagaaaggcgagttgttgatattgaacaacatgctcatcgtcggctcgtccacgtggatgggcggcaaggcctcggggttctcgtagtcggcaacggtgtcgccaatctcgaagtcgtcgatgcccatgagcgcgataatgtcgcccgcctcgacgggtttcttggtgcgttccttgcccaagccttcaaaggtgtaaagctccttgatggtggagcgggtgacggaaccgtcgcgcttcaccaacgagacgttttgtccggcctgcaaagtgccgcgtttcaagcgacctacagcgatacggcctacgtatgaactgtaatccaacgaagtaatcagcatttgcggcgtgccttcctcgaacttcgcgggagggatggtgtcgatgatgacgtccaaaaggtaggaaacgttgtcggtgacgtggctccagtcgtccgacatccagccttgtttcgaggaaccataaaccgtcgggaagtccaattggtcttcggtcgcgccgaggttgaacatcaggtcgaagacggcctcttgcacctcgtcgggacggcaattaggcttgtccaccttgttgatgacgacgatgggtttcaaacctaattcgatggccttttgcagcacgaaacgggtctgcggcatggggccttcaaaggcatcgaccaacagcaaaacgccgtcggccatgttcagaacgcgctccacctcgccgccaaaatcggcgtggccgggagtgtcgataatgttgattttcacgtccttgtagcgcaccgacacattcttcgaaaggatggtgatgccgcgctcgcgctcaaggtcgttgttgtccaaaatgagttgcccgggagcctcatccgactccttgaagagttgggattggtaaagaatacggtccacgagggtggtcttgccgtggtccacatgggcgataattgctatatttctgatattctgcattttagtagaaattactgcgatatttgaaggtgcaaaagtacaaaaaatcgctgaattgccgaaaagtagtaattttgcgaaagaaaaaaaagaaatatcacgatttcaagaggattctacttttgcttcaaaactaaaacaacaatgctatggaacttacgaaataccttgtggataatttggaaaacagccgtgaatttacgcgccacattatcaattctttgtcgcttgtcgatttgaagcgggtgaaaagagatttggaacgtcattacactgataatccggaaacaagctatctgatgggccatgttgaaagaaggcttttcccggaacaagttgagaaagtgaaaaaaaagcccaatgccactatcaatcaactgcttcgcgatttcaaggacgaaaaaagcggccttattgctgcatctcgacttgaattgcagaaacggtttgaataccaatcgtttgaggaccaaaagagaatcatagatgcgttcatgttcaggacgacgaagcacgacgtggtttggtgttcaaagtatttgctcagtgattggttttggagggacatctattttgactctatcgtgtggtactgggagcgcgaaatggataattatcctttgctccgtgtggtttgtaaatatgcttcggatgattatctgaaggagaaagtccagcaatttgaggaagagaatgaaggagtggtcgaagtcaaggcatacatgttgtttttgtcgcggcttgcgaaagacccgaattttgtcatcaacaaggacaggttgaagccgtttcaatatgtctgtatttgttccaaaacgaaccgtcaggtcacccaagaggaggccaatacggcattgttgcaagtggtgttgaggagcctttcagagggcttgtttttcaacaagtttcggcgcaagcgcgatggcacggtggtgttcaggtcaggatgtatgatagaattcgctttgtggacaatttccaaaaccgggaacacagacgttttgattcgtttcaacgaatgggtcaaggaaatgtgctataagatagagaacatgcaagatgctgattacgatgagattgtggaagccgtttcccgcgtgttgagtgagtgaaggggggcgtttcttcgagaatgagattttgttgcaaaattgaaactttattccaacctgtatcacgttttgaaacaacgatagtgtaattttgtcgcggaaaactaaaccagtatgaacagcgacgagatttgtgcaaaaaaagacgaggcgacagaaatcgccccgaacttgatgttttcacaacggaataatccttattgtgaattgctgcatatcttgtgccgcaaaaataggggatttttcgataatgcaagtgatttatgaaaaaaatagtatttttgacaaaattttttgattcgattaaatatatgataccatgaagaaaatattaggactcgacttaggaaccaacagcattggctgggcggtggtgaatgcggaagaaacaacccgcgagaacgaaacatcttgtctgaaaccgacaggcatcagtgcggcgggtagtagaattatcccgatgtcggcagacattttgggcaattttgatgcgggcaattccgtgtcgcaaacagcggaacggactggatttagaggcgtgcgtcgcctccacgagcgcaaccttcaacggcgtgaacgcttgctgcgcgttctgagggtaatgggcttcttgccagaacattttgccagtcaaattgatgagtatggaaagtttatcaatcatagtgagccgaagttggcgtggacgaaaggaatcgatggcaaattcgagttcgttttcaaggattcgtttgaagaaatgttggaggattttgtactacatcagcctcaacttgtggcagatggcaagaaagttccctacgattggactatctactacttacgtaagaaagccctgacgcaaagacttgcaaaagaggaacttgcgtgggttttgttgcagtttaaccaaaaacgtggttattaccaactgcgtggcgaggatgaagaagagaaaacgacatctaagacgaggcaatattttgatcggcaaattattgctgatattattgatacaggacagaagtataaggagttgaaagttttgaatatagttcttcaaaatggtgatgtagggaaaattttcaagaaagaagttccgaattggataggtcaagaaaaaagtatcattgttattgtcgatattgacaaagacgggaatgataaatatgatgagaatgggcaaataagcagaaagtttaaaatcccaactgaggcagagtgggatagtgagtggaaattgataaaaatgaaaaccgaagaagacctcaataatagccacaaaaccgtcggttgttacatctatgacaatctgttgcaaaagcccaaccagaaaatcatcggcaagttggtgcgcacggttgaacgcaagtactacaaggaggaactgcggcagattctcgaaacccaagtcgccttaatagcagaattgaatgacgccactttatataataggtgcattggggaactataccccaacaacgaggcgcaccgcaacaacatcgccaagcccgacttcgtcaacctgttcatcaacgacatcctgttctaccagcgtacgctgaagagcaaaaaatcgctaatcagcgactgcccttatgagagccacttcgacaaggacggcaatgagcatcccgtaaagtgtatcgccaagtcgaatccgctgttccaagagttccgcctttggcagttcgttcagaatttgaggatttaccaacgtgagaaaagtattgatggcaagctccaaaccgatgtggatgtaaccaacgaattgctgaaaaccgaagaagattacgtaaaactcttcgattggctcaacgacagggcttccatcaaacaggaaatgttgctcagttcgtacttcgagaaaaagaaagataaggacaaatatcgttggaactacgttgaggacaaggattatccgtgcaacgaaacgagggctacaatgcttggcggattgacgaaatgcagcctcgacgctggtttccttacccgcgaaaatgaaatgtcgctttggcacatcctctattcggtggaagacaaggcggaaatcgacaaagcactgaaaaagtacgccgaaaagaacaaccttctcgaatcgtttgccgaggtgttcgccaaagtaaaaccgttcaaaaaggactacggctcctattccgaaaaggccatcaagaagttgctgccgctgatgcggatgggcaagtattggtgtgctgatgccattgatggtaagacgaaggaacgcatagaaaaaataattgttggcgaatatgatgagagtattagtgttaggacacgagagcaaattgtggcttataacgaaaagacagggaaaactcttgatgatatttcatctttcaaaggcttaccaatttggcttgtttgctatgttgtttacaatcgtcactctgaagtttcaaataataaaccttgggagaagcccgaagacatcgaccgctatttgaaggatttcaagcaacactcgttgcgcaatcccattgtggaacaggttgttacggaaaccctacgcaccgtccgcgacatctggaaacaggaaggacaaatcgatgaaatccacttggaactggggcgcgagatgaagaatcccgccgacaagcgcaagaaaatgacggagcgcatattggaaaacgaaaacaccaacctgcgcatcaaggctttgctgatggagtttgtgaacgaccctgaaattgaaaatgttcgcccatattcgccaagccaacaggatattttgcgcatttacgaggaaaacgcacttgacaatctgaccaaagacgacaaggattttgatttcgtcagcaaaatttcaaagtcggcacagccctcaaaggcagatataacaaggtataagtgttggttggagcaaaaataccgctcaccatacacaggcgagatgattccgcttgccaagttgttcacgtcggcttacgaaatagaacacgtgattccccaatcgcgctactttgacgattctttcagcaacaaggtaatctgcgaggccgaggtgaacaaactcaaagacaggcagttgggatttgagtttatcaagaaccataaaggcgaaaaggttcaaatcagccaaggcaaagtggttgagattctgtcggttgaggcatacgaaaagtttgtgaaagaccattattccagcaaccgcaccaagatgaagaaactgctgatggacgacattcccgacggtttcatcgaaaggcagttgaacgacagccgctatatcagcaaattggtgaaaggcttgctgtcgaacatcgtccgcgagaaactcgacaacggcgaatacgaacaggaagccgtatcaaagaacctgatttcgtgcaacggctccatcaccgaccgcctaaaaaaggattgggggatgaacgatgtttggaacagcattgttttgccacgtttccgccgtttgaacgaactgacgggcaaaataagtgacgatgaacttgtagccgaatttaaacgtctgtttgaagaacagttgattgtctgctccaagtcaagaaatgaatcgataaatagttcttatacagattattataaatcattaggtgaaaaagaacagaaaaaggttattgacgaggtaatgaagaaattgccaatcaaagaatcatttttgtcagtaaacaacgagggacatataattccaaatatgccgctggaattgcaaaaaggcttcaacaaaaagcgcatcgaccaccgccaccacgcgatggatgccattgtgatagcctgcgccacccgcgaccatgtgaacctgctcaacaacgaagccgcacactcgaagcataacgccaaccgataccaactgcagcgtaagttgcgccgattcgagaagatgaccatcgacggcaaggagaaggaaattgccaaagaattcctgaagccttgggattcgttcactacggatgcaaaacaggtgttggaaaacatcatcgtcagcttcaagcaaaacctgcgtgttatcaacaagacctctaaccattatcagcactacgatgagaatggcaaaaaggtgatggtgaagcagaagaaaggcgacagttgggcgattcgcaagtcgatgcacaaagacaccgtttttggtgaggtgaatctgcgcaagagcgacaaaactgtttcgttgaaagaagcgttgaaaaacccgaaagcaattgtgaacaaggaatttaagaaaaaggttatggagttgcttgaagagggacgcgatgccaaatacatcaagaaatatgtggaagacaacaaggatgtttggtcggatatagacattaagagaatacaggtctattattacaccaaagacaccaacgaccgctactttgccacacgcaagccgcttgacacatcatttgacaaaaagaaaatcgaaagcagcgtaaccgacacgggcatacagaaaatcttgttggcgcatttggaggccaaaggtggaaatccagaacttgcgttttcgcccgacggcatcgatgagatgaaccgcaacattgttgcgctcaacaaaggtaaattccatcagccgattgtgaaagtgcgtgtatatgagaaagccgaaaagttcgctgttggacaaaatgggaacaaggcttcaaaattcgttgaggccgccaaaggcaccaaccttttcttcgccattttcggaacggaaaagacgagcaaggaaactggcgaaacggaaaccgttcgttcctatctgaccattccgctcaatgtgatgattgactgccaaaagaaatacggttcgcaatggcgcaactgcatcgaaacctatctacaagagcagcaattggtcacatccgaaaccaaactcttgtttatcctttcgccaaatgatttggtgtatctgccgacgaaagaggaaattaggaacgggatttcgacgattgataggaaacgaatttataagtttgtaagttgcactggaaatgaaggacattttattcctgaaataatcgcaactccaattgtgcaaacaacagaacttggaagtaataacaaggcacagaaagcatggacaggcgaaatgattaaagaaacctgcttgcccatcaaagtggacagattaggtaataacatcgaactaaacggaaagaaactatgagcaacataaaactatttcaagacaagagaatccgttccgcatggaacgaagaagaggagcaatggtatttctctgttgtggatgtggtggaggcattgactgactctcctaatccgcgtcagtattggagaaaaatgaaagaccgcgacttaaaggaatttgaaacatacccattttgggtacagttgaaattaataagtcctgacggaaagatgcgtgcaacagactgcgccaacatcaaaggcctgtttcgcatcatccaatccatcccctcgccaaaggctgaacctttcaagcaatggttagcaacggtgggttatgaacgtatgctcgaaatcgaaaacccagaactggctcaagagcgtatgaaagaactctacgagaagtataatcgcaaaaacgaattgtacacatttctaaaatgaattgtacaacttttttcaaaatgggcgcgtcggattatttcgatgcgcccatttcattt

SEQ ID NO: 1421 - DNA, 12210 bp, synthetic construct
  source 1..12210: mol_type = other DNA
  misc_feature 1..12210: note = Synthetic
ttattctcgtttgcttttctttttcttaaccaatttgtcaatgaacttattcttttgcggggtgcaaaggtagtttatttttgctattttcctaatctttttaataaaatttttgttttattttttttcgattcgtttttaatatgtaataagaactgtgtgccaatgcgggtgcaaaagtaatacttctttttggttttgcaagctgttttttgactgtttttttgttttttgttttaaggttttggttttgtggtggttatctttggttttttttgaagcattgctaattgttgggggtttgcggtggctaaagctgttttgtggtggttctttatatagtatagtcttttggtatgtcgatgatactgttttgaatggtgtattcttttttataaatgttgtttcttggatgctgcgcgtgagggatagtagtggaaagcccacagcccgacgaaggaggtgcgaggacttgtaacggatagcccgacccgaggaggaacgacgacggggcacgcccaaaaaaaataaaaaacataccttatatatgatacttgttttatggggtttggggatctaagtttataaacttgtggggaaatattaaaagtaggatatttgtcgtttaaaaatagatagaaaggcaagattattttgtggaatttatgaagttgttattgtctgaagtgatagtgggttattttggattgatttctcataaaaaaatatttaatccttgtgcgtttcttaatttcgtatttattaattgaatttaaaagccgataaatgaaaaaagtactacttgccgaagatgattttgattttgctgatgttttaaaacaatatctggagctatataattaccatattacttgggctaaagacggggaagaagccttactcctatttgagaatgaaactttcgatatttgcgtgtttgatatcatgatgccaaaaatggacggttttacactagcccaaaaaataattgatatgaatcctgaaacaccatttgttttcttaactgccagaaaactcaaagaagacaaactaaaaggattgcaattgggtgccgatgattatattgtaaaaccttttgaagccgacgaattggtcttgagattaaacaatattttgaaaagaggcgagcaaaaaaatcaaacgactttttcaggcgatgaaataacaattggcaattatatttttgatccgaataggttagaattaaagttaggtaatcatacacaaaggcttacagcaaaggaagttgctattattttgttttttctaaaaaataaaaacaaacgcataaaacgaaatgatattttgcaacatatttggggaaatgacgatttcttttcaggaagaagtatggatgtttttataagtcgaattagaaaatatttctctagcgacaaccgaattactattgaaagtattcgcaatgtaggtttagaatttaagattataacctaaaaaaaaagcagacctataagccggattctgttctcgatattactaacgataccttatcatttatctaggcttgcaattactcacaagctccatctttctacccttcagcaacggacgagaagcccttaactaccgatatacttgaaatttcaccgcatagagtttacctggtttcactacagcattacctgtacatactttctgttgcacttgtcctaaccccaataaattggagccgacgggtgttacccgctatgcttctctctggtgtccggactttcctcccccaataaattggcgacgataaggcggtctgcgctgcaaaagtagtttttttaggagccaatcccgctatccgttgcaatcttttttcggcgaaaagcctcaaaaaggattttcactactatcggggctagggcattgcggtaataaaacaacatttttacaaaatacctaaataaaaaagcgaccctttagaggccgctttaaatgttttcacaacggaataatccttattgtgaattgcttcaaaattgtagtacaatactacaactttttttttatatataataaaaatgtatctaaataatattaattatcttacatttatagttaaaaataaatctagacaactagaataattaaaatataagcaagtacaatgaaaaaaatattaggattagatttaggaacaaatagtattggatgggctttaacaaacaatgatttcgacaataaacttggtaacattgaaggattaggaagcagaataatccctatgagccaagatgttcttggtaaatttgatagtggcgtatctatctctcaaactgccgaaagaacaaaatacagaggaaccagaagattagtacaacgctttttattacgaagagagcgacttcatagaattttaaatattcttgactttctacctaaacattattccgaagcgattgatttcgataaaaagtttgggcaatttaaacctgaaaaagaagaaaaattatctttttataaaaatgaaagtggcaaaaaccagtttatatttttagacagtcatcaagaaatgcttgccgaatttcaattaataaatcctgatttaaaacaagttccgtatgattggactatttattatttgagaaaaaaagctttaactcaaaaaatttctaaagaagaattggcttggatattactcaactttaatcaaaaaagaggctattatcaattacgtggggaggaacaagaagataacaaaaataaacttgaggagtttcatactcttacagttgtagatgtaattgaaagagagaaaggaaaatcaggaatatggtataacgtgattcttgaaaacgggtggatttataagcgtgaaagcaaaattgcattatttgattggattggcaaacaaaagaattttattgttactaccgagttaaatgatgacggaactgtaaaactaaataaagacaacgaagaaaaaagaagttttagatctccaaaagaagatgattggggattggtaaaaattagaaccgaacaaacaataaatcaaagtgaaaaatcggttggtacttttatttatgatgcacttttaaaaaatcccaatcaaaaaataaaaggcgagttggtaagaaccatcgaaagaaaattttataaggatgaattatcaaaaattctaaaagcccaaattgcatttcatcatgaaattttaagcgacaaaaatctttataaaaaatgtattgatgaattgtacagacacaatgattctcataaaaacaacattaaagacaaaggttttgattatttgtttttagacgatattattttttatcagcgtccgcttaaaagcaaaacgtcattaattagcgattgtagtttagagtttgttccaattaaagacgaaaatggtattttagtaaaagatgacaatggcaaacaagttgtaaaacctttaaaatgtattgcaaaatcaaatcctatttttcaggaatttagattgttacaatttgtaaaaaaccttaaaatttacaaaaaagaaattgtaaatgatgttgatgtaacccatgattttctaaaaaccgaagaagatgtagtagaattatttaattggctaaatgacaaagcagaaattagccaaaagcaatttttggcgtatccaaaattcaaactaaaagaagataagtatagatggaattttgtagaagacaaaatttatccttgtaacgaaacaagaaatcagtttttgaatgccgttgcaaaaattgatgtagataaatctttttttgatgccaaaaatacccaagatttatggcatattttatattcggttaatgataaaactgaattatattcaataaaaccagatacaggcgtacaatcaggagctctttcaacatttgctaaacgacataatttgtcagacgactttgtattgaatttttcaaaaataaaaccttacaaaaaagagtatggttcgttttctgaaaaatccataaaaaaattattgccattaatgcgttttgggagctattgggatgaaaaaaatatagactccaaaacattggctagaattgacaaaattcaaaccggagaatttgacgaaaatatgagaactcgtgttcgagaaaaagcaattcatttaagtaaaacaacagattttcaaggtttgcctttatggttagcatcgtatattatttatgaccgacacagcgaagcaagtgatgtttcaaaatggaaaactcctgcagatattcaaaactttttaaagtatgatttcaagcaacactcactccgaaatccaattgtcgaacaagtaattactgaaactttacgcgttgtaaaagatatttggcaacattatggcgatggaaaagaaaatttctttaccgaaattcatattgagttaggtcgtgagatgaagaatgacaaggcaactcgtgaaagaatgactaaaaaaatatcagaaaacgaaaatacaaacctacgcatcaaagccattttaacagaattgaaaaatgatggtcttaatgacattcgtccttactcgccaagtcagcaagatattttaaaaatatatgaagaaggagtgtatagcaatgaaaataaaaaagaaaagttagaagaaattgataaaatcagaaagaatgcaaaaccaaccccttctgaaattatcaaatacaaactttggttagaacaaggctatatttcgccttatactggaaagctaattccattaagcgaactgtttacaactaaatatcaaattgagcatattatcccacaatcaaggttgtttgatgattcgttatcaaataaagtgatttgtgaatctgaagtaaatgaattaaaaagcaatatgactgcttatgagtttattcagaataacgaagatagaattgtaatcttgactggaggtaaaacggttaaaatttttactaaagatgcctataaccaacacataactgcctattacagcaaaaataaaagcaaacaaaaacgattattgagcgaagaaattcctgaaaagtttatcgaaagacaattaaacgacaccaaatacatcagtaaaattgttaagaatctattaagcagaatagttagagaagagcaggagcaagaagtaacttcaaaacatattgtttccttaaatggttctatcacatcaagaatgaaacaagattggggattgaatgatgtttggaacaacatcattacaccacgttttgaacgtttaaatgcgctaacaaactcaaatgattttggacaatttgaactaaagaaagatgcttacggaaacaaagggaaacaaatatttcagaccacagtaccagatgccattgccaaaggttttactaaaaaaagaattgaccacagacatcatgctctggatgctttggtaattgcttgtgtgagtagaactcatattaattatttgaataatttaaacgcaagagatacagatgacaaagctgtaaaacatgaattgagaaataaattgtgttttaaaactaaaccagatagcaatgggaattataaatgggaattttacaaaccttggaaagacttcacgacagaggcagaagataaactaaatacgacaatcgttagctttaaacaaaacacccgagttatcaataaaacagtaaacaagtacacaaactataaagacgaaaaaggaaatttgaacattggaacaaatggattggttgaaaagaaaattattactcaaaccaaaggcgacaattgggcgattagaaaaccaatgcatgccgaaacggtaagcggaaaagtatttttaaaacgtatcaaacaaagtcctattactattgcaaatgcgattgaacaaatagaatttattgttgataaggaagttaaaaaacaattagcatctaaaatcaaacaatatccaaacaatatggtaggtttaaaaaaacacctcaaagcttttcctgtaatgattgatggcaaagcaattgacaaggttcaggtatatgaaactatagaggccacagccacaagaaaaacacttgacaattcttttgatgaaaaaacaatcaatagtattaccgacacaggaattcaaaaaattctattaaatcatctgaaacaagaaatgtatcaaaatgcgattgatgagaatggaaaaaaaatacccccacacgaatccgcttttagcgaatatggattagaaatgctaaataaaaatataaagaagctcaacaatggcaaagcacatcaaccaattaagaaagtacgtgtatttatggaggggactggtaaatttgcagttggaactaatggcaataaaaaagacaaatatgttgttgctgccaaaggaacaaacttattttttgcaatttatcaggatgaaaaagggaaacgaaattataaaacaataccattcaacgaagtaatagaaagacaaaaacaaagcttaagtgcagctcaagaaactgatgaaaacggaaatcgtcttttattcactctttctccaaatgatttagtttatttgccaacagaagatgaaaaagaaaatttaactacaattaattttgataaattatcaaaagagcaagtactaagagtgcttaaaatggtaagctttacaggaaatcaagctttttttgtttcaaataatattgctacatcaattgttgataaaatggaattttcagccttaaataagatggaaaaatctattgatggaactatgataaaatcgttatgtttaaagctagaagttgatagacttggaaaaattaaaaaaataatccgatgataaaatataaatgcaaaaatcaataggattgggctttagcctattcaacaaaaaaataggaataaacaaaaaaggctttagccaaaatatttcggctaaagcctttcttaaatcaattattatccgcctccatttaaaaatggaggcaattgaaaaaggagtatagaattctaaaatcataatagatacaattgataaaaaattaaaattgagataaattcaaattcatagaaatgggttttaatccatctaacaatataaataatcgagatttactttagccaaaatatttcataaaccatttttaaatcgcaaaatatgataaaacgcacccttttttttggcaatcccgcttatttaagcaccaaaaacgagcaaattgtaatttcttatcccaacaaggagcacgaaaccaaaaccgtggctattgaagatattggcgtaatcgttttagaaaaccaacaaataaccattaccaatggtctgttagaaaaactaaccaacaacaacgtggcgttaattaattgcgaccaataccatttgcctattgggttgttaatgccgctcaacggacatacagaacaatcggaacggtttaaaaaccaaattaacgcttctgttccacttaaaaaaaacttatggcaacaaaccattagtgctaaaatcatgaaccaagcaggattgcttaaagaaaaaggaatcccgtgccgaaaaatggagctttgggcaaaagaagttacatcgggcgatgcgctaaatcacgaatctagagcagctgtattttattggcaaagcctgattacggtaccaaattttaccagaggacaaaaaggaattccgcccaataatttattaaactatgggtatgcaatactgcgagccattactgcaagagccattgttagttcgggcatgttacccactttaggcatctttcatcgcaacaaatacaatgcctattgtttggctgatgatattatgaaaccctatcgcccttatgtagatttgatcgtgtgtcatattatagatacagaggattcatacgatgagctgaccatcgaaatcaaaaaacaattactcagcattgccacaattgatgtatgtatagatggcaaaaatagccccttgatggttgccatgagcagaacaacacattccttacaggaatgctttgcgggagccgcaagaaaaattttataccctatttatgtatgacgaacattacacccgtttaaaccagtatagaagtttgtggatattagtattttttgacctgcccaccgaaacgcggaaagagcgtaaaattgccagtgaatttcgcaagaaattattggacgatggtttttctatgtttcaattttcgatctatatgcggttttgtgccagcagagaaaatgccgaagtacacaccaaaagaataagaaatagtttgcccgaacatggcaaaattggtgtgatgcaaataaccgataaacaatttggtatgatggagcttttttatggaaaaaaacctgtagaaacagacaaaccttcgcaacaattagaacttttttgaaaaataggatttagaaatattagacctaccagaatatcaacacacaaacagaactgttttttaatttcaaaataagcatataaccaccaacatatcaaacgattaactcgcggtatgttggtaattataagctaaaatacaattttgaaagcaattcacaaccaatacatgtagccagcatttctgctgcacgttggtaattataagctaaaatacaattttgaaagcaattcacaactaaaatctgcatcaggagtacaagcctttagttggtaattataagctaaaatacaattttgaaagcaattcacaacggatatttagttggttgtgtttctttcttcgttggtaattataagctaaaatacaattttgaaagcaattcacaacagagatacaaataatgcagaaaaggcaacagttggtaattataagctaaaatacaattttgaaagcaattcacaactggaactttagggcttgtaggaaaaaaatcgttggtaattataagctaaaatacaattttgaaagcaattcacaaccacaacgacgagcaagccgaagatcgttaggttggtaattataagctaaaatacaattttgaaagcaattcacaactccaagttggatgtctttaagtttacggtcgttggtaattataagctaaaatacaattttgaaagcaattcacaacttcatcatattctgtaaaaacaataactttgttggtaattataagctaaaatacaattttgaaagcaattcacaacccatcgtttcagtttgccctactggcttgggttggtaattataagctaaaatacaattttgaaagcaattcacaactattgcgatgccatgtttaggctaatatctgttggtaattataagctaaaatacaattttgaaagcaattcacaactattttcatcatatcccaaaactttttttggttggtaattataagctaaaatacaattttgaaagcaattcacaacgggagttgttcggcggttatcgacgtatttgttggtaattataagctaaaatacaattttgaaagcaattcacaacacttgcgtgtttgaatatacattaccaccggttggtaattataagctaaaatacaattttgaaagcaattcacaaccggtggcaagtttcttatctattagcacctgttggtaattataagctaaaatacaattttgaaagcaattcacaacgtaccgtctgctctatatgctttaactgtgttggtaattataagctaaaatacaattttgaaagcaattcacaacgagttatctgttgcttctaatccgtttgcgttggtaattataagctaaaatacaattttgaaagcaattcacaactgaaagcggttttaacctggtctttaaaagttggtaattataagctaaaatacaattttgaaagcaattcacaacaggcaaagtgtcagaagtattaggcattgagttggtaattataagctaaaatacaattttgaaagcaattcacaactaaaacattcatcaaatttcaaaataccacgttggtaattataagctaaaatacaattttgaaagcaattcacaacattacatggcggttctgaatgccgttgtggttggtaattataagctaaaatacaattttgaaagcaattcacaacagtcagcgacttgtttaacccgccctcaggttggtaattataagctaaaatacaattttgaaagcaattcacaacctgaaatcacattgaacgcacctgccgccagttggtaattataagctaaaatacaattttgaaagcaattcacaactattttctgaaaatagtatttaacacatgttggtaattataagctaaaatacaattttgaaagcaattcacaaccttttcgctgtctgaaataattgggtttatgttggtaattataagctaaaatacaattttgaaagcaattcacaacctactcgatatttctttatatcagaatcaggttggtaattataagctaaaatacaattttgaaagcaattcacaacagactgatggtcgtacagatgccaatgcagttggtaattataagctaaaatacaattttgaaagcaattcacaacgcatatcgccagcgccttcacctaccaatagttggtaattataagctaaaatacaattttgaaagcaattcacaaccgtaacggtgtaagtagtatctagtttacgttggtaattataagctaaaatacaattttgaaagcaattcacaaccggattagtcgagtttattaatgaagaagggttggtaattataagctaaaatacaattttgaaagcaattcacaaccagactgatggtcgtacagaccaatcagcagttggtaattataagctaaaatacaattttgaaagcaattcacaacgcaggtatcgccagcgcttcacctactaagttggtaattataagctaaaatacaattttgaaagcaattcacaaccgaatgattacaacctaaataatcactcttgttggtaattataagctaaaatacaattttgaaagcaattcacaactcggggtcggtatcgagcaagtaatagttggttggtaattataagctaaaatacaattttgaaagcaattcacaacactcttcgcattgtttggtggtcgtatatagttggtaattataagctaaaatacaattttgaaagcaattcacaacagatgttaaatcaacaataaaagatattgagttggtaattataagctaaaatacaattttgaaagcaattcacaactggttttgtttttatccaaaagtaaccactgttggtaattataagctaaaatacaattttgaaagcaattcacaacaagatacctgttgatttgttctgccaataagttggtaattataagctaaaatacaattttgaaagcaattcacaacgcattcatggttttgtgttttttataattagttggtaattataagctaaaatacaattttgaaagcaattcacaactgcactcccccaaataaacaagtcgcctagttggtaattataagctaaaatacaattttgaaagcaattcacaacgaacatctcaacattgcaacatacaatagggttggtaattataagctaaaatacaattttgaaagcaattcacaactctaagtcctctagcagtaattgtagttgtgttggtaattataagctaaaatacaattttgaaagcaattcacaacacgataaagccactaaaatggggtttgaaggttggtaattataagctaaaatacaattttgaaagcaattcacaacatcgccccatgcgctgccatcaatttaatgttggtaattataagctaaaatacaattttgaaagcaattcacaacgagggtcaagttttgaaattgatgttgatgttggtaattataagctaaaatacaattttgaaagcaattcacaactttacaaagtcgataacgaagccgataaacgttggtaattataagctaaaatacaattttgaaagcaattcacaacactgtatggtctattgtactagggtctattgttggtaattataagctaaaatacaattttgaaagcaattcacaactgctgatattaattttagttttcataacttgttggtaattataagctaaaatacaattttgaaagcaattcacaaccattctgatgagtgctaaatgtggcttcaagttggtaattataagctaaaataggcagtataacacaaagtgtgtaagttaaaaagttattctgaaaatttgagctaattcaaaaagctcaaaaattttcggaaataactttttaacattttatatatttacatagttatgatagacaaa

SEQ ID NO: 1422 - DNA, 12180 bp, synthetic construct
  source 1..12180: mol_type = other DNA
  misc_feature 1..12180: note = Synthetic
atgtgttttacaaaaattgtatgtaatattgcacttgctggttgactctacaaatttgtaaaaaacctaataagttttgagtttgtccaaaattagttgtacttttgcaaccactttttgagaacaacaaatagattgctttttaagcatgcctgttactcatagaaatttgatgtttcaaaagtgaaaattccggatataatccggttaaataatttcggggtgtagcacagtccggttagtgtacctgctttgggagcagggggtcgcgagttcgaatcccgccaccccgacggtgaaaatcaagcacttatctgtttattcaggtaggtgcttttttttgtataaacaattaaactccaggttcctcacaatgcatacccaattgaaagcggtcaaccctaaaagaaaagttgtgaatgaattgaaaaaaccgaatcaactttctctagagataaaggcaataattagttaatctaaatcaggaaaagatatttttttcagggaagttagtcagaatgtatcgcggtattttgtaatcaaaattgggctaacagaaaaggttggttaattatgaattgaaaatataatatttataataaactgaaatttattaaaacaaaacgacccaattaatgggccgctttaaatgttttcacaacggaataatccttattgtgaattgctttcagataattttacaaatatataacattttaaagactttgaaaattgttttatgttaaatattgtttatctttgagggtcagttattgaattatctctatcttaataaaatacatatggaaaaaaaaatcttaggtcttgatttgggtacgaactcgataggatgggcgcttattgaacatagttttgacgagaaaaaaggtaaaattttgggtatgggaagtcgcatcatacctatggatgcagctaaagtaggtgaatttgaaagaggcaatccagtttcagctacagcagatagaacaaaatttagaagtgtacgccgtctctatgaaagagatgtacttcgtcgtgaaaggcttcatcgtgtgcttaatattcttgggtttttaccaacacactatgctgaaaatatcgatttcgaaaatcggccaggtcagtttaaaaaagataaagaacctaacctgccttatcaggaaatatctaataagaaatatgattttatatttaaagatagtttccaggaaatggtggatgattttaggataacccaaccgcaattattttattttaaagccaatggttcagagagcaaaataccgtatgactggaccatatattaccttagaaagaaagctttaaacgaaaaaataaaaaaagaggaactgtcttggatattgttgaatttcaatcaaaaacgcggttattatcagttaagaggcgaagatgaaaaggttgaagataacaaagaaataacttttgaaattttggaagttaataaagttgtagattccggagagaaaataaaaggttcaggagcaatactatatgatatatattttaccaatggttggaaatatgataaacggataacaaaaacggaggattgggttggtaagtcaaaagaattcatcgtgactacctctgttttggtttctggtgaaattagtcgtagctataaaactgttaattcggaaaaagattggattgcgattaaacaaaaaactgaaaaagacattgagagtacaaataaaacagtgggcgaatatatctatgacactcttctaaaaaatcccagtcaaaaaatcagaggtagactgatacgaaccattgagcgtaagttttataaaaatgaattaaagcagatacttgaaaaacaaaaagagtttcatccggaactaagagacagagatttatacaaaagcagtattgaagaattatatacgaataatgaagcacatcgaaataatatagccaaccgggattttacttatctttttcttgacgatatcattttttatcaacgtcctctaaaaagtaaaaaatcgcttgttagtaactgttctttcgaattccgatatttcaagaaagaagatggtactgttgaaaaaactggtgtgaagtgtattgcaaaaagtcatcctttgtatcaagaattccggttattgcaatggttaaaaaacttgcgaattttcagtaaggaggacataaacgaggttgatatcacaaatgaactcttaccgacaacaactgacagagagaagctcttcgaatggttaaatgataagaccgaaattgatcaaaaatcatttttgaaatatgtcccattcaatctggaggaaagaattaaaatgagattgggagaaagacaatttcaactctttaagaaggacaaggagcaaggattggatacatattatcgctggaattatgtagaagataaaaaatatcttctcaatgaaacacgcggtgaaatcctgaaaagatttaaaaaaacagggattgacgtcaacgtgttggacaaagatatagagacacatctctggcacatattatattctgtagaagataaagctgagattgatagtgctttaaattcatttgcaaagagacactatcttccagaagggttcgttaatgaattcaagaaatatccaagacttgacaaagaatatggggcgtattcagccaaagcaattaaaaaagtattaccattgatgcgttttggcaaatggtgggattgggaggcaattgacgaaagcacaagacaaaagatcgataagatattaaccggtgaatatgatgaaaaaataaaaaatcgcgtacgggaaaaagcggtcgacttaaagaaagaacaagacttccagaatcttcccttatggttagtgagttatattgtttataatcgccattccgaaacttctgatgttcaatattggaagaccgcacaagacattgaacttctaaaacaacattctttacggaatccaatagtagaacaaataatcaacgaaacattgcaaaccgttagggaaatttgggaatattatggagagggaaaagaaaagttttttgatgaaattcatgttgaactgggacgaagtctaaaagaaccagctgagaaacggaagaaggtttccgaaagaatcactgaaaatgaaaacaccaatattcggattaaatcgctactcgttgaattgtttaacgacgatgaaattgaaaatgttcgtccctactcacctatgcaacaagagatattgaaaatttacgaagaaggtgtttatcaaaatcctgatgtcacgtactcaatggtgagtgaatccgagataaataaaatccgtaagaaaaaccagcccagctcttctgacataaaaaaatataagttatggcttgaacagggatatagatcaccctacaccggagtaataatacccttgtcaaaattattcactccagcctacgagattgagcatattataccaaaagctaaattttttgatgatagcctgagtaataagattatttgtgaatcggaagtaaactccctcaaagacaatcagcttgcttattcatttataaaaaataacagagaactaaagattgaattaagtcatgggaggtttgtaaccctgctctctccggaagcatatgaagcaaatgtaaagcgctatttcggaaacaacagatccaaacaaaggaaacttttactggaagagattcctgacgattttactgaaaggcagctgaacgatacgcgttacataagcaaagtagtaaaaacgctcttatcaaatatcttacgcgaagaagacgaagaagaagccattgccaagaatgttgttgcatctacgggtagggttactgccattttgaaacaagattggggattaaatgatgtttggaacagccttataactcctcgttttgaacgattaaatagaataggaggttatgaaaagtatggctcatgggaaaataaaaatgggaaagttgtttttcaagttaacacaatagagccagacttattgaagttaaacaaaaagcgtatcgatcatcgacatcatgcattggacgcattggtggttgcatgcagtagccgcaaccacatcaattacataaataacgacaatgcaagcggaaaggataaatcaaagcccagacgttttgatttacggaatcaattaaggataattgaagaggaggaggtaaattcggtagtgaatggtgagctgcaaagaaaaagaataaaagtagcaaaagaatttcttaaaccttgggaaacattcactcagaatgcaaaagaggaactaaatcgtattgttgtcacttttaaaaagaataatcgtgtcataaacaaaacagtaaattattatcagaagtgggtaaaacaacctgatgaaacaatgaaaaaagtttttgttgaacaaactaaaggtgaccattgggctattcgaaaaccgctacataaagaaactttttctgcacttgtaaatttaaaaatgcaaaaaacagtaaatctatccgcagctttggataattcaaaggatatagtcaacagatcattacgaaaaaaaattgaagagcttatatctgagggatttgaaaaaaaacaaattcaaaaatactttaaagggttaggcaacagatgggctggagaggatatttcgaaagtcgatatctatacattcaccaacgataaagagaatacaatgttggttgcttccagggtaaaattagatgaaagtttcaatgaaaaaaatattgaaagcatcacagatacaggaatcagaaagatattgctcgcacatctcaaaaaatataaaggtttgccggatgaaaacggaaaacctgtcacaccagagtcattggccttctctccaaccggtattgaagaactaaataagaatattctcgatttaaacggagggaaaaagcatgctccaatatataaagtgaggaaatttgaaaaatttggtgcaaaattcaatgtcggagcaactggaaacaacaaacagaaatttgttgaagcggccaaagataccaatctcttttttgctatttatttgaatgaggatggtaaacgaaactatgagacactaccattgaatgaggttgttgaacatcaaaaatggagagcaactttatcaagacaggagaaagatgtcacacctttaattcctgtaaatagagagaaaggaaaataccttttctcactttctcctaatgatttggtttatattccatctgttgaagaacaggcgaatccggaaagggtagatttttgtaatttagacacaaatcaggtaaaaaggatttataaatttgttagttgcactggaggagaaggtcatttcgtccccagtacaaatgcttcagagatcataaaaaacgaaaatgggacaaacagtaagagtgaaagacagcaagactttttagatggcaataccattatcgacaaaaacaatcaaccaatacaaataaaatcagtttgttggaagcttgaaacagatcgccttgggaacataataaaaatagttggtgagggaattaaccgtatgagttttcctgaccgaaatattctcaaagaatccattgcatatttatattcaaatgaattacaggcattcacaggacaaaatgaggtaaatgagatagatgcagaaaaaattagcaagttatcgccaaaggagatcatttaagaaatgtaaccaagctaattaaacagattcagaatcaataatagttgagtcaatgatcaaaaaaactctatatttcggtaatccggcttacctgagcctgcgaaacaagcagctaatagtaaaaataccggaggtcgaaaagaatgattctattccaaatgatttaaaaaaacaagcagaaaaatcgattccgatagaagatattggcgttgtaattcttgacaataaacggattactataactcaaggtgttattgaagcattgctggataacaattccgcattaatcacttgtaaccgtgaacgaattccggtgggcttaatgttaccgctatcgggtaacaaaactcaaaccgagcgattccgcgatcagattaacgcttctctacctttaaaaaaacagttatggcagcagacagtgcaggctaagattagaaatcaatcttacgtattatcaaataaaaataaaactattattgaaaatatgaaggcttgggctacagatgtaaaaagtggcgatccagataattatgaagcacgagcagccgtatactattgggcaaatttattcaccgaaattgaatgtttctctcgttatcgtgagggaatgccaccgaataatttgctaaactacggttatgcgattttgcgagctattgttgcacgatctttggtcgcaagtggattactgcctacatttggtatccatcaccgaaataaatataatgcctattgtttggcagatgatatcatggaaccttatcgcccatttgtggataaacttgtttgtaatattgtggcagaggagactaatattgaagaactttctcaggaaataaaattcaaactgcttaacatcccggttcttgatgtaattattgatgatcagcgaagtccgctaatgattgccgttggacagacaactgcctctctgtacaaatgtttttcaggaactctccgaaaaataaaatacccttcattcgaataaactgcaaaatgaatcggtttagtgaatatagaattatgtggattttggttttttttgatttacctacagaaacaaaaaaggatagaaagatttatgctactttccgtaaaaaactcatccaggacggttttacaatgtttcaattttcaatttatcttcgacattgtgcaagtcgagaaaatgcggaagtgcatataaagcgcgtaaaaagttttttaccacctgcaggagagattggtattctttgtataacagacaagcagtttgccaatattgagttgtttattgggaaaaaagaaaaggaggttcaaacaccctaccaacaattagaattgttctaggatgacataataggaaaaaaatcctgtcaaatggcaggattttttctgttagcagcaacgtcaatttttaatcgtaaataaccgcttatcatgctgataatctatggatatacacacatccagttgttgctgataccaaaggtactaaattctgaaagcaattcacaacttttgcttcatacattcgatacattttccagttgttgctgataccaaaggtactaaattctgaaagcaattcacaacgttaacgtagttccccacccatatttgcccgttgttgctgataccaaaggtactaaattctgaaagcaattcacaaccgagtttgattaaattatcttctgtaaatggttgttgctgataccaaaggtactaaattctgaaagcaattcacaacgcttttgacttaggttaccacgtcctgctagttgttgctgataccaaaggtactaaattctgaaagcaattcacaacaccttttactgcttcatttgttcgatggcagttgttgctgataccaaaggtactaaattctgaaagcaattcacaacaggaatcttcttactgctattattgctacgttgttgctgataccaaaggtactaaattctgaaagcaattcacaactaatttcgcatctgcaccttcattttgttagttgttgctgataccaaaggtactaaattctgaaagcaattcacaacgtacaaatagcaacagacatcacagcaagagttgttgctgataccaaaggtactaaattctgaaagcaattcacaacatcaagggacatgtgtaccgcttttaaaaagttgttgctgataccaaaggtactaaattctgaaagcaattcacaactgattcagctgtttctgaataggttagcatgttgttgctgataccaaaggtactaaattctgaaagcaattcacaacgttccatatcgtgttacaataatttttttagttgttgctgataccaaaggtactaaattctgaaagcaattcacaactctttttgtgaacgaaccaactcattctagttgttgctgataccaaaggtactaaattctgaaagcaattcacaacaaggtttatccagtccgtgccgaccgaagtgttgttgctgataccaaaggtactaaattctgaaagcaattcacaacagtatgccaacttgatgggcacaatgttaagttgttgctgataccaaaggtactaaattctgaaagcaattcacaacctcgctgagagtagcgtttatcaatcttctgttgttgctgataccaaaggtactaaattctgaaagcaattcacaacatcttctgatgagaggtccgttcgctttacgttgttgctgataccaaaggtactaaattctgaaagcaattcacaactcccgtcggcctgcttttgtgtcattccgtgttgttgctgataccaaaggtactaaattctgaaagcaattcacaacatcctgtgaattgacctactgtttcagggagttgttgctgataccaaaggtactaaattctgaaagcaattcacaacccggtctccacgatatgctgtagaagatgtgttgttgctgataccaaaggtactaaattctgaaagcaattcacaacaaaaattgaagaaaataccaaaacggaaaagttgttgctgataccaaaggtactaaattctgaaagcaattcacaactttgcaaatgctatgtcggcaaactctatggttgttgctgataccaaaggtactaaattctgaaagcaattcacaactaacctcacgcctgcacattttgatatgaaggttgttgctgataccaaaggtactaaattctgaaagcaattcacaacaaatacaacttctttaatgaatatcttttcgttgttgctgataccaaaggtactaaattctgaaagcaattcacaacacctgagtcactgtaattgtgtatggttcgttgttgctgataccaaaggtactaaattctgaaagcaattcacaacaatttctcattgcataacagttccaggtctgttgttgctgataccaaaggtactaaattctgaaagcaattcacaacagtttttgcttaacccaacagctttttttggttgttgctgataccaaaggtactaaattctgaaagcaattcacaacttgaaatgagaggatgcggaaatgtttctggttgttgctgataccaaaggtactaaattctgaaagcaattcacaactgtttaatgtactgcaaccaaaggttacaggttgttgctgataccaaaggtactaaattctgaaagcaattcacaactgccatcccactttactgcattatcccaatgttgttgctgataccaaaggtactaaattctgaaagcaattcacaacggttatctcacccaacaacatgcttaatcgttgttgctgataccaaaggtactaaattctgaaagcaattcacaactataatctgttatgtctgctactgccttaggttgttgctgataccaaaggtactaaattctgaaagcaattcacaactgttcagctctattgcttgtagatgtgctagttgttgctgataccaaaggtactaaattctgaaagcaattcacaacaaaggctcaattgattgaactgaataactagttgttgctgataccaaaggtactaaattctgaaagcaattcacaactataaaggtagtgcacctgttttgtaatcgttgttgctgataccaaaggtactaaattctgaaagcaattcacaacaaggatattgacggggttatagaccacgtcgttgttgctgataccaaaggtactaaattctgaaagcaattcacaacgagtggctatatgggtacagtcaatgatatgttgttgctgataccaaaggtactaaattctgaaagcaattcacaacaggaagattttagaatgaaaaatgagtagagttgttgctgataccaaaggtactaaattctgaaagcaattcacaacgtaggggactatgcttaatgcgggatcaatggttgttgctgataccaaaggtactaaattctgaaagcaattcacaacataatcgggatttatagaatgagacaattagttgttgctgataccaaaggtactaaattctgaaagcaattcacaacatttgtgacaagtcgaattgagatcagaaggttgttgctgataccaaaggtactaaattctgaaagcaattcacaaccctctcttaatttgaacacccacgaaacacgttgttgctgataccaaaggtactaaattctgaaagcaattcacaacctatgttgatgatgttaagacaggcttacggttgttgctgataccaaaggtactaaattctgaaagcaattcacaaccttcaatccctgatatatccgtgttaacctgttgttgctgataccaaaggtactaaattctgaaagcaattcacaactgatgctccagcaccaagaggcccggttgtgttgttgctgataccaaaggtactaaattctgaaagcaattcacaactgagcggcagtgctttgagtatattgcctagttgttgctgataccaaaggtactaaattctgaaagcaattcacaacctgtcttgcctgtgcccaattactgtactgttgttgctgataccaaaggtactaaattctgaaagcaattcacaactatcatagatttttataacggcaatagttcgttgttgctgataccaaaggtactaaattctgaaagcaattcacaactgaacctaacatcataacaggtagggtagagttgttgctgataccaaaggtactaaattctgaaagcaattcacaacgcattgcctcatccaataacacagcattacgttgttgctgataccaaaggtactaaattctgaaagcaattcacaactaaacagcgtatccgcatcattcatgcaggttgttgctgataccaaaggtactaaattctgaaagcaattcacaactaagtactggccacgaatgcaccggaggaggttgttgctgataccaaaggtactaaattctgaaagcaattcacaacagggttacatagacagctctaaaatctggagttgttgctgataccaaaggtactaaattctgaaagcaattcacaacgtgtggtttattgacagtaatgaatttagagttgttgctgataccaaaggtactaaattctgaaagcaattcacaactggtggagggcatcacacttcagagatgttgttgttgctgataccaaaggtactaaattctgaaagcaattcacaactaatatctctatatctatcctcattaatacgttgttgctgataccaaaggtactaaattctgaaagcaattcacaactgccatacgtgtctgaacaaatacctccatgttgttgctgataccaaaggtactaaattctgaaagcaattcacaactaattttgttgttttaaaattgattattacgttgttgctgataccaaaggtactaaattctgaaagcaattcacaacgctctctttcgatacctttctccctttcatgttgttgctgataccaaaggtactaaattctgaaagcaattcacaactcccactcatcacctattttcaaatcgaggttgttgctgataccaaaggtactaaattctgaaagcaattcacaacaccgtttttcggtcagcgcggcctgcggaagttgttgctgataccaaaggtactaaattctgaaagcaattcacaactgctacctattgcaatgaaattcatgccgagttgttgctgataccaaaggtactaaattctgaaagcaattcacaactggcctaagcgtgagttttgacgtaaaggagttgttgctgataccaaaggtactaaattctgaaagcaattcacaacccgattaatttacataggttaacagtttgtgttgttgctgataccaaaggtactaaattctgaaagcaattcacaacgcatgtattcgagccggatgttgacgacgagttgttgctgataccaaaggtactaaattctgaaagcaattcacaactcacagggtatagtataaatattatggaaagttgttgctgatacgtaagcacccgataaagtccccgttttagtttacattttaagttttgatcttt

SEQ ID NO: 1423 - DNA, 12168 bp, synthetic construct
  misc_feature 1..12168: note = Synthetic
  source 1..12168: mol_type = other DNA
aaagagcatgccaagagcaactcttgtggatgactctgtctatgaatatgaaaaggccattatcgatgatttgaagaacctagcggagtatgacaccgtttacctaggatttcccatctggtggaatcaagccccaagactcatcaacacctttttggagaaatacgatctctcgggtaaaaccgttatcccattcgccacatcaggcagtagcagtatctcgaacgcagagagtgaattgcggaaagcctatccggatgtgaactggcaaaaagggaagttgatgaacggagcgacagaagaagatatcaagaattggactaaaaaataaatgattatgagaaagaattttggagcgaagcctttgagctatccgcaacccgtatttattatcgccacgtatggagaagatggaactcccgacgcgatgaacgccgcttggggcggtatcagtgagatgaatgagatcagcatgtgtcttagcgccggtcacaagactgttaagaatatcctgaagcgtggagctttcacggtaagcatggcagatgccgatcatgtcgtagcttgtgattatgtaggtatcgtgtcaggcaataaagttaccgacaagtttgccaaagcaggatttcacgctacaaaatcagacttcgtagatgctccgttgatcgacgaattggccgtggctatcgaatgtaaattgaaagattacgatccggatacttgcatactccgtggcgagatcgtaaatgtcagtgttgacgagcgtgtacttgatgagaacggcaaggtgaatgtagctaaagccgctcccatcatctttgatccattcaacaacgactatttgagagtgggcgaaaaggtaggaaatgccttttccgatggaaaacaattgaaataaatgacagggtaatagcaattagtatctatagaaaacgcaattagtattgatagtaacctagattaccatcaatactaattttggaaactatgtaatcaaattctgttataaaccaatttagagatatcatatcctcgtttcagtatcttgccgagcaaatcttccataaccgcttccggcaaggatttctcacgactcaaaatccagagatacttgtcagaactgcttcctaccacaacatattgataatgttcgtcgagttcgaagatataataatctgaatagaaccataaaaagaaagcgactttcaatttacccgggctattttccggttccggctgtttcgtccggcctactgcttttttatggattccatctttaaacccctcgttttccacacggattcttccatccgatcgcaatgtataagtagccgtaacatccgtcatacctttctcgaaatgattctcgtaacgggcgatctcataccaccttcccatataccggcggacatccagtgcctgcacggtacgatgatctgttatattcataagcttttctattgtcggataatcatacgtaaaaccagactccaataatttcgtgggatgaaccgtttgccccttcgttacaaacgaagccccttcaccgaacatcagtcggaaaatgaatgtaggcaaaggcataacccaacggattccatctgctctcgccagcgcatatgccagttgcttttgggtaatacattgcggagagacaagattgaccactcctctcaacgtactattttgtatcataaaatcaaaagagcggcacaaatcatgcacgctgatccacggaaaactctgttggccatcgcctatcaccacacctatccgggagagacgttgcaaatgaagcatctgtctcaatgccccgccatcctccgagagtacgaccccgaaccgggcaatcacaagccgcacatccggcaaacacgcccgcgcttccttttcccatgcgccacataaccgggccaagaaatcctcaccttgccgattgttatattcgtcatattctccggatgtgggataatagcctacggcagaagttgatataaacaactttgggagaatatcccgggtatttatggcatttaccaactgatgggttgtccggattctactatcatataattcttgcttatacgcttttgtccagcgcttattaatggaagcacccgccagattaatgaccacatcacacggttccacacgatggcatagctcatcgaaattctcctccttgaacaggttccttcctaaaggaaccacctcatcacccttctccgtgaaaaaaagagtaagatgctggcctatgtatccactcgcaccgctgatcgctattttcatgattctaaatgatctttaccttataaacaagcgcacaacctatttagttaaacactatatttgttctttcaactaataatggatcatggcagacaactatttggaaaaaaaatacgagcaatatcaagcccggaaaacctccgggacaagaaccagtcacaatacgaagacactccataaaacaagaagagtcttcattaccggtggggccgaggggatcggaaaagccatcgtgagaacgttcaggggagccggccatcgagtagcgttctgtgataaaaacgaagcatcaggaaaagagaccgcgttacaaaccggaactcaattctttctcgtggacgttagcgataagaccgcattggagaattgcctgcaaaagatcatcgaggaatggggcgatatcgatatcatcatcaataacgcgggtatcagccagttctcatccatcacggaaacgagtgtagaggattttgataagatattatccataaacctacgtcccgcgttcatcacttcccggcgattagcgctccatcggcaatctctcgagacccccaatccatacggcaggattatcaacatctgctctacccgttacttgatgagtgaacccggtagcgagggttacgccgcctctaaaggaggtatctattctttgacgcatgcgttggccttatcgctctcggaatggcatatcacggtaaactctatcgctcccggttggatacagaataacaattacgaccagcttcgtccggaggatcatgctcaacatccatccggacgggtgggcaagccggaggatatcgcccgtatgtgcttatttctctgtcaagaggaaaacgatttcattaatggcgagaatattacgattgacggtgggatgaccaagaaaatgatctatctcgactaaataaacatccgtatatgacacaaacatcgaacatagaaaccaaccgtcttgtgctccgtcctttcagcgaaagcgatgctcctgatgtttttgagagctgtaagaatccaaacctaggcaataacgccggatggaaacctctcgaaacgatcgaagagactattgatgtactaaataccatatttatcggaaaagaaggggtttgggctatcgtatcaaaagagactcaacaagtcattggctccattggcatcattcctgatcccaaaagagaaaacccacatgctcgcatgctgggttattggctaaaagaagagtgttggggacaaggcttcatgacagaagcagtgcaatccgtattgaattatgggttcactcaaatgaatttacatttgatcacggcgaattgttatcctcacaatcaacgctcacaacgtgtattagagaagaatggattcgtatacgaaggacagcttcatcaagcagagctaatgcatactggacaaatagaggatcatttgtgctattatcttgaccatcattccttttcaaacaaaaacaatagtttatgatagtagtaacaaaagatttatatacgctcaggagttgggaaggtcaagatacggaatccttaaccttgcaccttaataacaagaagatctgggataactgtcgggatggattgcctcatccttatacaaaagaaaatgcccgctgcttcatcagccaaacacgagaaaaaactgaaatatcggatttctgcattgtggttcatggtgaggcagtcggcaatataggttttgtgagaggaacggatgtggaacgtttcaatgcggaagttggttattggatcagtgagagatattggaaccaagggattacctctgaagcgttagccgatgcgatccagtattattttgagcatacggaggttattcgtatattcgccacggtgtatgaatataatctggcatccatgcgggtattagagaaagtgggattcaagaagactggcatcttccgaaaagcttgttacaaaaacgggcgattcatcgatgcgcatcattttgagatcgtagcggatgagaaattagttgggaacaaagacttataatccatttatgcaaataagacaattacaggtaaacgaatatgataaggcattaaccttgtctttggacgtgttcatccaatgtggcaagagtgacttcgacgaagagggattggaaaccttcaagagtttcatttacaataaggatctggtaaatgagctaaccatttacggagcattcgagggtgagtcattaataggtctaatcgctacaaaaaatgaaggaaagcatatttccttattcttcatcacgcctatgtatcatggaaaaggtatcggcaaacgattattcgaggccgctatccaagataagccagtctcggaaatgacagtcaactcctcttcctatgcaatcccaatctaccggaaattcgggttcgaaccaatctgcgaagaacaaactacacatgggatgaagtacaccccgatgaagcgaacgatagcccgtccctccttcgaggacttcaatgagcttcttctgctttgggaagcgtccgtacgtagtacccatcatttcctaaaagaagaggatatcttattttataaagaacttgttcccggatatttcccattggtagaactttatatcatccgaaatgagcgaggaaagatcgccgccttcatgggcttaagcgatgagcttatcgagatgcttttcgtacatccggaagagcaaggcaaaggattaggtaaacgacttatccaattcgccttgcaagagacacccatccgaaaagtcgacgtaaatgagcaaaacacaaccgcacttcatttctatcagcatctgggattccaagtgataggaagagacgagacagattcctccaacaagccattcccgatacttcatcttcaagctacacttccttaaaaatttaaggtaatcgtgtagcctatcatgactatatgcgtagcctaacgaaggcattcttatcaaaaaacaggactagttacacataaaaaaagcccaccgataaaggacgatgggctagaacctaaatgttttcacaacggaataatccttattgtgatttgcttcaaattagtatagcaaagaaataaagaatatatttataaagcaagtatttcttgataatttattttatctttgaaaaaatcgttaacacaatactagtcatgaaaaaaatagtaggattagatttaggtacaaatagtataggatgggcattaatcaatgcttatatagatgaatataataaagaacacttatatggtatagaagcttgtggcagtcgtattatacctatggacgcagccattttaggaaatttcgataagggaaattctatctcacaaactgcggatcgaacaagctatcgtggtatacgtagattgcgtgaacgccatctattaagacgtgagcgcctgcatagaattctcgatttactcggctttttaccaaagcattattctgattctctcaatcgctatggcaaattcttaaatgacatagaatgtaaattgccttgggtaaaagacgaaacaggttcttacaaatttatctttcaggaatcgttcaaagagatgttggccgatttcaccgaacatcaccccaaacttatcgcaaacaacaaaaaagtaccctacgattggacgatctattaccttagaaagaaagctttaacacaaaaaatatcaaaagaggaactcgcttggattcttttgaactttaatcagaaacgaggatactatcaacttcgaggtgaagaggaggaaactccaaataaactagtagaatatcatttctgaaagtagaaaaagtcgaagactcgggagagaaaaaaggcaaggacacctggtataacgtacatttggagaatgggatgatttaccggcgcacaagtaatataccattggattgggaaggtaaaactaaagaatttatagtcaccactgatctagaggctgatggtagtcctaagaaagataaggaaggaaatataaagcgttctttccgtgcgccaaaagatgatgattggacattaattaaaaagaagacggaagcagatatcgacaagatcaagatgactgtcggcgcttatatttatgatacacttctgcaaaaaccagaccagaaaatacgtgggaagctagtacgtactatcgaacgtaaatactataaaaacgaactctatcaaatactaaagacccaaagtgaatttcatgaggaattacgagataaacagttatatattgcttgccttaatgagctttatcccaataacgaaccacgaaggaatagtatttccacacgagatttctgtcatttatttatagaagatatcattttctatcaacgtccactgaagagcaagaaatcattgatcgacaattgtccctatgaggaaaataggtatattgataaagagagtggagaaatcaaacatgcatccattaaatgtatagccaagtctcatcctctctatcaagaatttcgcctttggcaatttattgtaaacctacgtatctacaggaaggaaacggatgttgacgtaacacaagaattactccctaccgaggctgattatgtcactttatttgagtggctgaatgaaaagaaagaaatcgatcaaaaagccttttttaaatacccgccattcggctttaagaaaacaacttcaaactatcgttggaattatgtggaagataaaccttatccctgtaatgaaacccatgcacaaataatagctcgtttaggaaaagcgcatatcccaaaagcttttctttctaaggaaaaggaagagacattatggcatatattatattccatagaagataaacaagaaatagaaaaagccttacactcttttgccaataagaataacctaagcgaagagtttattgaacaattcaagaatttccctcctttcaagaaggaatatggctcttactcggctaaggcgataaagaaattgcttccattgatgcgaatgggtaaatattggagtatcgaaaacatagataatgggacaagaatacgaattaataaaattatagatggagagtatgacgagaacattcgtgagagagttagacaaaaagctattaacctaactgatattacccattttcgagctttgcctttatggttagcttgttatctagtttacgatcgtcactccgaagtcaaggatatagttaaatggaagactcccaaggatatagatctctatttaaaatcgtttaaacaacattcgttacgcaacccaatcgtggagcaagtgataacggaaaccttgcgtaccgtacgagatatttggcaacaagtaggccatatcgatgagatacatattgaattaggacgggaaatgaaaaatccggcggacaagcgtgcccggatgtcacaacaaatgataaagaacgagaataccaatttacgcataaaagcactattgactgaatttttgaatccggaatttggaatagagaatgtacgtccatattcccccagccagcaggatttattgcgtatttatgaagaaggcgtactaaatagtatattagaattaccggaagatataggaattatattaggaaaattcaaccaaacagatactctaaaacgtccaacacgctcggaaatactacgttacaaactatggttggagcaaaaatatcgttcaccttatacaggcgaaatgataccattaagtaaattattcactcctgcttatgaaatagaacatattattcctcaatcacgttatttcgatgattcacttagcaacaaggtgatctgtgaatctgagataaataaattgaaggataggagcctcggctatgagtttattaaaaaccatcatggagaaaaggtggaattagcttttgacaagccttttgaggtactttccgtggaagcctatgaaaaacttgtgcatgaatcttattcacataacagaagtaaaatgaaaaagttactcatggaagatattccagatcaatttatagaacggcaactcaacgacagccgctatattagtaaagtagtaaaatctctgctttctaatatagtgcgtgaagaaaacgagcaagaggctatctccaagaatgtcattccttgtacaggaggtattaccgatcgattaaaaaaggattggggcatcaacgatgtttggaataagattgtacttcctcgtttcattcggttgaatgaactgactgaaagtacccgtttcacttctatcaataccaataatacaatgatcccctccatgcccttagagttacaaaagggattcaataaaaaacgtattgatcaccgccatcatgcgatggatgccattatcattgcatgcgcaaatcgtaacatcgtgaactatctcaataatgtgtcggctagtaaaaacacaaagataacacggcgagatttgcaaaccctattatgtcacaaggacaagactgataataacggtaattacaaatgggttattgacaagccttgggaaacattcactcaagatacattgacagctttgcagaaaataacggttagctttaagcaaaatttgcgtgtgatcaacaagacaacaaaccactatcagcattatgaaaatggaaagaagatagtctccaaccaatcaaaaggggatagttgggctatccgtaaatcaatgcataaggaaacggttcacggagaagtaaatttgcgtatgataaaaaccgtatcatttaatgaggccttaaagaaaccacaggcaatagtagaaatggacttgaagaagaaaatactcgctatgctcgagttaggctatgacactaaaagaataaagaactatttcgaggaaaataaagatacttggcaagatattaatccatcaaaaatcaaagtctattactttacaaaagagacgaaagaccgctattttgcggtgcggaagcctatagatactagtttcgacaaaaagaagataaaggaaagcattacagatacaggtatccaacaaattatgcttcgacatttggaaactaaagacaatgatcccacattggcattctctccagatggtattgatgaaatgaaccgtaatattcttatattgaataaaggaaaaaagcatcagcccatttataaagtgcgtgtctacgaaaaagctgaaaagtttactgtaggacaaaaagggaataagcgaactaaatttgtagaggcagcaaaaggaaccaacctgttctttgctatctatgaaacagaagagattgataaggatacgaaaaaagtaatccgtaaaagaagttatagcacgattcccttaaatgtagtgatcgaacgccaaaagcagggactttcctcggctcctgaagatgagaatggtaatctacctaaatatatactctctcctaatgatctggtatatgtaccgacacaggaggagattaataagggggaagtcgtaatgccgatagatagggatcgaatatacaaaatggttgactcaagtggcattaccgctaatttcatcccagcttcaacagccaatttgatttttgctttacctaaagctactgcagaaatctattgtaatggtgaaaattgcattcagaatgaatatggtattggtagtcctcaatctaaaaatcaaaaagctataacaggtgaaatggttaaagaaatatgttttcccattaaagttgatagattaggaaatataattcaagtaggttcatgtatactaactaattagattttatcctatgattaagaaaacattttattttggtaatccagcttacctgtcacttcgtaaccagcaattagttattaagttaccggagatagtaaagaatgatactgtgcccgaaagcttcaaacgacaatcagaaattactaaaccaattgaagatattgcagtgatagttcttgacaacaaacaaattactattacccagggtgtattggaagcattactagagaataattgcgcagttattacatgtgatggacgaagtatgccagtaggcctcatgcttccgctttatggaaacacgacacaaaatgagcgctttcgagatcaattagacgcttccttacctttaaagaaacaactttggcaacagactattcaagcgaaaatcaacaatcaagcatcagtattatgctcttgtaaaaacgaagaaataaaatgtatgcgaatatgggccaatgatgtacgtagtggagatcctgacaatttggaaggacgtgcagctgcttattattggaagtatctgttcggacacatagaaggttttacaagagatcgggaaggtatacctcctaataatttattaaattatggttatgctatccttcgtgctattgttgcacgtggactagtcacaagtggtatgttacccacattgggtattcatcaccataaccgatataatgcttattgtttagctgatgacatcatggaaccttatagaccttatgttgatgagcttgtatttggtttaataagaacaaagggtatatcacccgaaatattaacaagagaatggaaagcatcacttctttctattcctacattagaagttaagattggaggtaaacgaagtccgttaatgatcgctgtcgctcaaacaacagcctctctttacaaatgtttcagtggagagcaacgaagaatcgtgtatccagaacggtaataatcatggatcgatttagcgaatatcgtattatgtgggtgttggtattatttgacttacctacggaaacaaaaaaagaaaagaaagcttatagtgatttccgtaagaatctgcagcgtgatggctttaccatgtttcagttctctatttatgtgcgacattgcgccagccaagaaaatgcagaagtacacataaaacgagtaaaatcatttttaccagaacacgggcaaataggaataatgtgcattacagacaaacaatttgggaatattgagttgttctatgggaaaaaagtacaacctcctaatacacccggccaacaattagagcttttctagaaataataaatcccgtcataaaacgggatttattacattggaaacttttcttttttattttctaaccattctatcatctagttgatatacagcatataatacagattaagctgtttccaatggatcaaagatactaatttgaaagcaaatcacaacccggaaagacataatcttaaaactcttttggctgtttccaatggatcaaagatactaatttgaaagcaaatcacaacaacaaggaacgagatggcggacagggcaaggctgtttccaatggatcaaagatactaatttgaaagcaaatcacaacagacttaatctatttctcatcacgatatcgctgtttccaatggatcaaagatactaatttgaaagcaaatcacaactgctccgctctcaggcaacattcctattatgctgtttccaatggatcaaagatactaatttgaaagcaaatcacaacgtaccggaacatatacaggttcctttaccgctgtttccaatggatcaaagatactaatttgaaagcaaatcacaacgggcttcatccaacatgacaaaagacggatgctgtttccaatggatcaaagatactaatttgaaagcaaatcacaacgccctgtttcgcataatcatattttatcaagctgtttccaatggatcaaagatactaatttgaaagcaaatcacaacctcgtgtatggtaataatcaaatcatcgaagctgtttccaatggatcaaagatagaaatttgaaagcaaatcacaaccgctaacgagcttaggatcggtcttaatcgctgtttccaatggatcaaagatactaatttgaaagcaaaccacaacgacacgggttatgtgaacggccagcg

SEQ ID NO: 1424 - DNA, 12139 bp, synthetic construct
  source 1..12139: mol_type = other DNA
  misc_feature 1..12139: note = Synthetic
ctcggtaccttagctcagttggtagagcaacggactgaaaatccgtgtgtccctggttcgattcctggaggtaccacaaaaaaataaagagttttatactcggtaccttagctcagttggtagagcaacggactgaaaatccgtgtgtccctggttcgattcctggaggtaccacacaacaaaaaagctgaaggttttccttcagcttttttgtttatcattcttacctcctcatactattcaataccactgaaagtgcaatataaaaagcaataattaccgggattgcttcaaatctaaaaaataaaagcaacaatgcacaaatacctaaaaacagtagtgttattttgttgtcacttaaatttttattttttgtttttaatgaaaacaacggaatttcagcattcataataaaagcactgaataaactaatgcccactaacacatacggattgctaaaaactgttaataccgtatcacttgaggtagtgttcgtaatcattggaatgcttaaaataaacaaggcgttggcaggtgtgggcaaaccaataaaactatcggtttggcgggtgtcgatattaaattttgccaagcgcatacaagatcccaaggtaatgataaaaccaataaacggaactagtttcatataaaaagtttcatctgtaacagcatattgatcgtaattttcctgaatatgtgccagcatttgatacatagccacaccaggaaccacacccgatgttaccatatctgccaaagaatctaactgcacacccaacggactggatacttttaaaacgcgagctgcaaatccgtcccaaaaatctaagaaaattcccatacaaacccacaaaaaagccatttgcaggttatcgtcaaaagcgtaaaccaatgcaattaagcccgataataaatttaaaagtgtaattgcattaggaaggtgtttttttattgtcatcaattttatatttttattgtaaaaacaaaagtaaacaataagttgtaagtatttagagtttatatattgtaaaattttgtaatctttgtaaaaaataattacgtgaaaaaacgtttatatatcgtgccgttgcttttatgcacagctttaatgcaggcacaaacagcaagaaaatattccaatgagtttttaaacattggggtagatgccgctgcttttggtatggcaaatagtgttattgcgcaaacaggcgatgtaaattcgggctattggaatccggcgggattggttcatttgcaggataaacaaatcagtttaatgcacgcaagttattttgccaatatcgcgcagtatgattatgctgcttttgctatgcccattgacgaaaaaagtgcattagcggtttctgccattcgttttggagtggatgatattatgaataccaccgaattgatcgatcaaaacggaaatatcgattacaatagaatttcattattctcagctgccgattatgcttttaatatttcctatgcacgtaaattatctgtcgaaggattgtcgttaggagccaatgctaaaattgtccgcagggtaattggcgattttgcaaaatcgtggggatttggattagatgttggtttacaatatcataccgaaaattggaagtttggattaatggcacgtgatataaccacaacctataacgtttggaatattaacgaagccgaataccaaaaaattaaagatgccgtagaaggacaaaatcaaacagtgcctgaaaccaccgagcttacgttgccaaaattacaattaggtgtagcacgtgattttacactaaccgagaaatttaatctgacagcagcagccgttttacacaccgaattttacgaaaccaatgctgttatttcaacatcagcgttcagcattcaaccatcggcaggttttgagtttggatacaacaaaatggttttcgtacgtgccggagttggaaattttcaaaacgaattgcaaattgacgatactaaaaagaccacttttcaaccaaatgttggtttaggattcaagtacaaaggtattcaggtagattacgccttaaccgatattggtgatcaaagtgcttcgctttattctaatatcttttcattaaaacttgatttaggaattttcacaaaatcaaatgaataatagtatcctaaaaattaaacagcaaatcgtgttaatggtttgttgtttttcttttttatcttcttttgcacagccacaaatactgacagaaaatgccgagataagtgttttaacgtgtggaactgctaatgaaatgtatacgctttttggtcacacggctttgcgggttaaagacaacgatcaaaatttagatgtggtgtacaattggggaatgtttgattttaaaacgcccaattttttaactaaattcataaaaggtaatctgctttattatttagatgttgaccgttttgatgattttttatatgcttataccaatgataaccgagaagtttttgaacaacaattgaatttatcgtatgatcaaaaattaaaagtatggaatgaaatcaaccgtcagttaaaaagtaatgaacgtttttatacgtatggatttatcagaaacaattgcaccacaaaggtagtcgatgttataaataaggtgatcgataaaccattggcagttgattttccgtcaaacaatcattcgtatcggtatattttgaacgatggattagaaaatcattattttgaaaaattgggcatcaatttattgtttagctatccaaccaacaaaaaatctgatttaatatttctacctttaaaatttaaagatggaattgcatttaataaatcgattttaaagtcagaaaaaaaactaaatactattaacgaaaaagaagaaaaattcagttttaattccatttataccttatggattatagtgattgtttttgcgttaggaattttaaataaaaaagcccggttgttgtattttggattcacagcgatctttggtttgttcttgttagcagtaagtctttataccaatcatgccgaattacatttcaacgtattgacattgttttacaatccattgttttttgtggcattattgctgaaaaataaaaaagtgttaattgcagccgctgtattaacagccattggtttgatttttatggggatagagttaatgacggttgctgtaccgctgatcgttctgcatattttatatatattggcattgtttttgagcagagcagcgtcgaagtaaaaacttagaaaataataaaatgtttagtttttttaaaaagaaaaaaatacttgaagatataattccagatggtttggtagatatccattctcatattttatatgggttagatgacggtgcaaagtcgctaaaagaaacccaagatttaattagtgatttaaaatcgtttggttttagtaaatttatagctacaccacataccacgccgttggtttgggataacaccaaagaaggtattttaaatcaatatgaaaaagtaaaaaacgaattggattttacggataaaaacttgcgggtagcatcagagtatttaatggacgattcgtttttaaaacgtcttgaaacagagaaactcttaacacttaaagatcattttgtattggtagaaatgtcttatttaaatccgccgattaatctatatgaaattattttagagttgaattctcagggatataaaccggttttagctcatcctgagcgttacaacttttataaaaatgattatgaaagctttaaaagattaaaaaaggcaggctgtttgtttcaaatgaatttattgagcagcgtagggtattacggcagcagcgttacagaaattgctgattatcttttaaaagaaaaaatgtacgattttgtgggtagcgatgttcaccaccaaaagcacatacaggctttttctgctgaaattaaattaaaacacatcaatgaatttgaatatgtgatagaaaaaaataattttttcgcttaaattcaaaggaggttttcttagtataaggaaacctctaattttttacttctaaaataaaaagacgacttactccccttaaatgatttcgcttacaattttattgtattcattgatacaacacgtgagatctataaataaaaacgaggcaaactttcgaatgccccgtagtaaatgttttcacaacggaataatccttattgtgaattcctttcaagagcaaatgtaataataaaaaaatagcaaaacaatgcggaaatccgtaaaagcaatattttttttcttaatatatttattgaattaataaaatacactaatagcatgaaacacatacttggattggatttaggaacaaactcaattgggtgggctttaatccaacaaaactttgaaaataaacaaggagaaatacttggaatgggaagtcggattataccgatggatcaaaagatactgggagattttggagcaggaaattcaatctctcaaacagcagaacggacaggttacagaggtgttcgcaggttgagagaacgtcatttacttcgtagagaacgtttgcatcgaatacttcatatactcggatatttaccagaacattacgatgctcaaattgattttatcaaacgttttggaaaatttatccccgaagcggaacctaaattagcctattcaaaagatggcttcctgtttcaaaattcattttatgaaatgttggaagaatttaagaatttccaacctgattttctgaaagataaaaacggtaatgattgtttaatcccgtatgactggacgatttattatctgcgaaaaaaagcgttgactcaaaaaatcgaaaaagaagaattggcgtggattattctgaatttcaatcagaaacgcggatattatcagttgcgtggagaagaggaggaagaaaatccaaacaaattggttgaatttcactctttgaaagtagtagatgttgtggcggatgaaaccaaaaataataaaggtgaaatttggtattcgatgcatttggaaaatggctggatttatcggcgttcaagtaaaacggaattgtttgattggaaagacaaggttaaggagtttattgttacaacagatttgaatgatgacggaacagaaaaattagacaaggaaggaaatgtaagaagaagttttcgtgcaccaagccctgacgattggacgctcctgaaaaagaaaacggaaaaagatattaatgattctcataaaacagttggtacatacattttcgataaccttttattaaatccaaagcaaaaaattaaaggtaaattagttcggacgatagagcggaagttttataaggatgaactcaaacaaattcttgcgaaacaaaaagaatttcattctgaactacaagacgaagatttgtttatggattgtgtccgtgaattgtatcgcaataacgagcaacatcagcagatgctttctgcaaaagattttgttcatttgattttggaagatattctgttttaccaaagacctttgcgaagtcaaaaatcttctatttcaaattgttctttagaaaatagaaaatcaaaagatggcgttatttttcctataaaagttatttcaaaatccaatccttattatcaggaattcagattgttgcagtggctgcaaaatctggttatttaccgaaaggaagatgatacaaatgttactaaagaattgttacctaatcaaaacgattgggaggaattactggaatttctgaataccaaaaaagaaattgaccaaaagcagttagttgagtttttgctgaaacggaaattggagattaagaaagttcctaagactgaaacagaaagataccgttggaattatgtggaggacaaaacctatccgtgcaatgaaacccgttatttgattcagtcacgattggataaaacggaaaatgttcctgcatatttcctgaattttgaaaatgaaatggctttgtggcacattatttactccgtgaatgataaaactgaatatgaaaaagccttaaagaaatttgccgaaaaacataatttgaacgtggactctttctttgaaaactttagaaaatttccacctttcaaaagtgattacggaagtttttcagagaaagcgattaagaaattattgcctttaatgcgttttggaaaatcttgggatgaagatgaaatagtaaaaggtagcaatacatattttagaaatatagaaaaccttttaggtacgcttattcaaaaggacgaaaaaatttctgacaaagatagaaaaaaatggaacaagactgttaaccaaaaactttgggaagaattgaggaattttcagaacgctgaaatagcttcatttcaaggtttgagactacatattgcacaataccttgtttatggtagacattcggaagctgctgtttcaggtaaatggaattcggtaaaggatttggaagaatatctgaatgaatttaaacagcattcattacgaaacccgattgtggagcaggtgattaccgaaactttgcgtgtggtgaaagatatttggacaaaatacggtaacggagcaaaagattatttctctgaaatccatattgaattgggcagagaaatgaaaaatacagccgatgaacgcaaaaggttgaccagtcaggttacagaaaatgagaacaccaatttgcgtataaaagcattattggctgaattggctctggatagagatgtagaaaatgttcgtccgtattctccaatgcagcaggaaattttaaagatttacgaagacggtgcattgagttccgaagcggaaattgaagaagatattttaaaaatcagcaaaactgcacaaccaagtaaatcagaattaatacggtataagctttggttggaacagcgttaccgctcgccttataccgggcagattattccgttgaataaactgtttacacacgaatatgaaattgagcatatcattccgcaaagccgttattttgacgatggtttcaataataaagtcatttgcgaagcggaagtcaataaattaaaggataaacagcttggttttgagtttattaaaaaccatcacggatacaaggtttctgatagaatttcgattcttgaggtagcggattatgaggaatttgtaaaacagagttatgctaaaaatcgagcgaagcggaataaactcttgatggaagatattcccgaaaagatgatagaacggcagttgaacgatacacgttacatcagtaaatatatttcaaatttgttgtccaatattgtccgtgacgataaagaaggaagcaacgacgacggttttaattctaaaaatctattgcccggaaacggaagaataacttcccggttgaaacaggattggggattagaagccgtttggaacgatttgattttgccacgttttgagcgaatgaatcaattaaccaattccacagattttaccgcctggaacgaaaagcatcagaagtttttgccgactgtcccaattgaactttccaaagggttttcaaagaaaagaatcgaccaccgccatcacgctttagatgctttggttattgcgtgtgctacacgtgaccacatcaatttattgaataacgaatcggcaaaatcagaattgaaacgctatgatttgcagcataagttgagattacaggaaacgtatttggacaaagatggaaaagagagaacggcatttaaagcatttatcaaaccttggaaaaattccacaatggaagcaaaaaatgctttggaaaaaattgttgtgagctttaagcaaaatacccgtgtcatcaataaagcaaccaattattatgaaaaatttgtcgagaaaaacggcgaaaaagtaaaggggattgtaaagcaggaaggcacaaactgggcgatacgaaagccgttgcataaagaaacggtttcaggaaaagttcagttggacagaataaaaagtgccaaaggaaaaatactgactgcaacaagaaaaagcctggacagttctttcaatgaaaaaacaattggctccattaccgataccggtattcagaaaatcttattaaattatttaaaagcaaaaggaggtaagcctgaattagcattttctcctgaaggtatcgaagaaatgaaccaaaacattgctttatacaatgacggaaaacaacatcagcctattctgaaagttcgtgtatttgagcagggaagtaaatttgcattgggcgaaacaggcaataaaaaagataaatatgtggaagcggcaaaaggaactaatctgtttttcggggtttatgcagacaaagaagggaaacgcagttatgatactattccattgaacatcgttatcgaaagacaaaaacaaggtttgtcgtccgttcccgaaactaatgaaaaaggatatcgtttgctgttcagtctttctccgaatgatttggtatatgttcctgaagaaggagaaatttttgataaagttcgatttgattgtaaaagaatctataaaatggtaagtagcacaggtggtgaatgtcattttgttcacaattctatttcgtcattgattaagaattatgatgctaaaactaaaattggagagctcggaagtttgaataaactggaagttactattgacggtatatatagaataaaagaagtttgtatcaaacttaaagttgatagattaggaaatatttcaaaagcgtaaaaatgctcaaacgtaccatttacatcggcaatccaacctatttaaagctcaaagacaatcagctaaagatagaagaccctgttacaaaagaagtaaaagggtctgtacctgtggaagatatgggctttttggtgttggacaatccgcagataaccttgtcgcaccccgtgattttgtcgttacaaaagcaaaatgtggcaattatcagttgtgatgaaagtcatttgccgttaggattgatgctgccgataagtggacatgtagagcattctgaacgattaaagcatcagatcaactgttcggaacctttgcgaaaaaacttatggaaacaaacaattgaagccaagattttccagcaaaaagaagtgttacgaaagttggatttggattatgctccgctgattaaatatatgaatgaggtaaaatcgggagacagtaccaatatggaaggcattgcggcacaatattattggggtaaattgtttgatgattttacacgggaacgaaaaggcgatgcacccaataattttcttaattttggctatgccgttttgcgaagcatggtcgcacgggcgttggtaagcagtggattgcatccaaccattggaatctttcatcggaacaaatacaatgcatattgtctggcagatgatgttatggaaccgtaccgtccgtatgtggatgatttggtagttgattggatgaaccatccagaatcgaccaatattttggataaaccggcaaaggcacatttgttgcagctggctacaaaagatgtttacattaatggattgcaacgtccgttaatgaccgctttgagcattaccacaagttcgttgtgtaagtgttttacaggagaaagcagagtgattcactatccgatgatgtgatgagttttagtcgctataatgcatacagaattatgtgggttttggtattttttgatttgccgacagaaaccaaaaagcaacgaagcgttgccatacggtttcgtaagtccttgttagacgatggttttaatatgtttcagttttcgatttatctacggcattgcccaagtaaagagaatgcagaggtacatataaaacgagccaaaaaaaatcttcctgccgaagggaaagttgggattctatgcgtaaccgataaacaatttggacagatggaagtcttttttgccaaaaaagaagccgatttacccgcaatgcctcaacagttggaactgttttaacagaaataaaaaaatgcttgattcaatgatgtaatcaagcattttttacattttttctttgtagtttacatctttataatcccttgattctattgggattaaatgaggttgtaattctactatgtaaatctacaaaaatttgaaaggaattcacaacatttggaagggtgattttacacccacaccagttgtaattctactatgtaaatctacaaaaatttgaaaggaattcacaacatgcagtacctaaagctttcaaagctgtttgttgtaattctactatgtaaatctacaaaaatttgaaaggaattcacaactctaaacaaccgttaactaaatcttcgtttgttgtaattctactatgtaaatctacaaaaatttgaaaggaattcacaacataattatacttgggatttacacgaattaggttgtaattctactatgtaaatctacaaaaatttgaaaggaattcacaaccaacttcggctagtttaatttcttcttgttgttgtaattctactatgtaaatctacaaaaatttgaaaggaattcacaacaatatatctttcgattaaccttatcaactggttgtaattctactatgtaaatctacaaaaatttgaaaggaattcacaactataaacccaataatttattttaggtttatgttgtaattctactatgtaaatctacaaaaatttgaaaggaattcacaacgcttgctcgtataaaaccagcacgaccaccgttgtaattctactatgtaaatctacaaaaatttgaaaggaattcacaacgctttcgactataaggtggatttacaaaatgttgtaattctactatgtaaatctacaaaaatttgaaaggaattcacaacggaaaccactgcttttaaactgtttacgttgttgtaattctactatgtaaatctacaaaaatttgaaaggaattcacaaccgttggttgtagttttttctgacctaccgcgttgtaattctactatgtaaatctacaaaaatttgaaaggaattcacaactaaatggcttatctgttaatttccaatttagttgtaattctactatgtaaatctacaaaaatttgaaaggaattcacaactagcagctaaattattatacgtttgcgttagttgtaattctactatgtaaatctacaaaaatttgaaaggaattcacaacttgatgaatgtaatcagctttcttttaaaggttgtaattctactatgtaaatctacaaaaatttgaaaggaattcacaacattcgtcaggtaatggtcaaaaaacaggatgttgtaattctactatgtaaatctacaaaaatttgaaaggaattcacaactgtacggagaaactaaattcattttcaatagttgtaattctactatgtaaatctacaaaaatttgaaaggaattcacaacaagactgtaacgattgctatggtccaaaccgttgtaattctactatgtaaatctacaaaaatttgaaaggaattcacaaccggaacaaatctaataaaggttgaagacaagttgtaattctactatgtaaatctacaaaaatttgaaaggaattcacaacctaaaccactcaattgattaaaatcataatgttgtaattctactatgtaaatctacaaaaatttgaaaggaattcacaacggcctgactcatatctttttttgacaacttgttgtaattctactatgtaaatctacaaaaatttgaaaggaattcacaaccgttaatgttttgctattattttgtgatgagttgtaattctactatgtaaatctacaaaaatttgaaaggaattcacaacttcccggaagtcaaactttctttgatttgagttgtaattctactatgtaaatctacaaaaatttgaaaggaattcacaacctactttcttagatccttctatcatttgatgttgtaattctactatgtaaatctacaaaaatttgaaaggaattcacaacgtaagtggcgcaaaggttcttaaatcagtagttgtaattctactatgtaaatctacaaaaatttgaaaggaattcacaacggtgtaacatacggtgataagcgttggaacgttgtaattctactatgtaaatctacaaaaatttgaaaggaattcacaacattaaagactgttgagttacaccgaagtatgttgtaattctactatgtaaatctacaaaaatttgaaaggaattcacaacagaa

SEQ ID NO: 1425 - DNA, 12079 bp, synthetic construct
  misc_feature 1..12079: note = Synthetic
  source 1..12079: mol_type = other DNA
aaaaggggttttcattgatagccaatatgttgaatatcaagaaacaccatcgtcgtttaattgaaaacttcttaaattgaaaattgagaattgagaattaattgggcacggatttcacggaatttataattatccgctgagtttaaaaaatgactgtagaggcgtagcgctgctgcgcctcataccaaacgccacaggaaaaacaggcgaaaaacataataatattattcgttattgtattgattgccatttggttgtataatgccgttttgaggcgcagcagcgctgcgcctctacagtcgccctcattattaattttcaattctcaattggggaagtagaaactttatattatacaaactttaaaaatcagattattatgaataccgagaagaaattcatgctgatctcaatacgagataacaaattgaaagtcaaggtagatcagtacaacccggaaaataatgacgcttttcaaaacacctatatgaatgatgcgcccattcatgaagaattaggtcttgccatgcaaaacttgcttttccatgtagagcaactcacccatagtaaaataccaggtttatatgtcgacggcttctaccgtcagcccagcggcaattcggaaatcatcaatatctatgcctgtttccgcacggaaaccgcctgcccgatcaatctggcggtgcgcgtcaataccggcaaagactcgtatgagtggctggagcgcctgatggaagacttgtcattctgcgaacgcgaagccctgctgtatatcacgaaaggaaagcggtttgaatcggattcgttcatcacggtacaggcgaattaaatggacgacgaagtgcgggaccggcttttgcccggttgtctgatagaaacggcggcagcccgctgtttcttcaacttagtgagcggcgaacataattcacgagattaccaatattcccgaaaaacggaattcggttatttctgggactcctatcttgaaaaatggatcatgttcgataaccgcatgggtacattcttcgtaagcatctgtaatacatcggatgaagcctttaatttattaatagatggagaagaacttttcaccccttgaacgggaaatctataacctgacaggtctggaaaccaagcgcgaataccgttttcaccccacgcgcgaatggcgtttcgactttgccataccggcagctcacgtggccatcgaagtggaaggcggtgtttggaacggcgggcgtcatttccgtccggaaggttatttgcgggatatggaaaagtataacgaggcagccgcttgcggctggcttgttatacgcaccattccgtccgaattattgcgggtaaagacgatccagcagattgtccgcgcttgcagaaagaaattgaaaacggaaaattgagaatggaaaatgaccgtagagacgtggcgtgccgcgtctctattacgtaacgccgccgggtaatgcaacacgataatacaacaaataacaggatacattcatccggtattttgttggcgttcattcaattgcatgacggtatttcaagagagacgtggcacgccgcgtctctacaacaaacaacaacaaattaataaacaaacaaaaaaaacaaaaacatggcgagacctataaaattgggattagattacttcccaatggatactaatgtcctgaaaaacatgaaaatcaggagattgatgaaaaaatatgaattttctggagccatcctatacttcagtctgctatgcaacatctacgaaaattcatattacatacaaatcggccaggactatttatttgacttggccgatcaattggagacagaagatacggaaataaaagccatgttagactacatggtagaaattaacttatttgatgccgagatgtggaaacagaatatattaacctctaaatccatccaagaacgatatctgacagcaaaagggcgttatttgaatgaaaagaaactggagaaacaatatttattgatacctcttcctgaaatcaaagcaagggtttccaccgtaaaaaccccggtttgcacagagaaaaccccggttatcaccgtgcaaacccccgtttgcacagtgaaaagtgcacaaagtatagaaaataaaagtatagcagagaataataaagaaaatgaaagtataaataatcacacacacatcgcgcgcgagagcgaaaaaattcgatcactaaaagccgaatgggatcaatggaagatggaaatgctgaatgatgaagattggtgcgctacactggttcgatacagcggaaaaggtatcttgatactccataacgcttatgaaattatgaaatgcttcgatgattacattattttgcgatccagcgaaaatactattcagacaaaaaaagattaccagtccggactttttggctggtggcgatataacaattgggaaaccgatttgcaaatcctgaccggcgcaaaagctgctatgatagaaaacaaatgttccacgccgcgaacaacacaaaaaacatccaaaatagaagaagcgatggctgttgccgaacgtgcttctgaaatggcttatcaattaatgcaacaaaacccgttatgaatttagatatatttaccaacaagatgcggatggcgtttcaaacgccccgcatcattgacatgacgccgcgtgatttatcgacattcataaccagtcagatcgtacaaagctacatcatggttggttatcaaacctataacgaaaaagacatctgcgtgctgacggcaaaattaagttccgatttgcaagaatcatatccgtatttgcatcgtggcgaaatcgttatctgtttcgaactgggcgccaaaggcgagtacggcgattatacaggcgtcaatctgcgcacattttgtaaatggctgaaaggctacaaaaccagcgacttacgttatcgggtaatcaagcagatggagcaggaaaaagaagtcaaagccttgccggcggtgagccgcgaatacaacgagcaaaaaatgaaccagctgatcatcagacggtttcacgaatacaagaattgcccggacttggaaatcccgttggcaagtattctgtatcaagacttgcaaagccgcggttttatccgcaacagcctggaagaaaagctcagcgcgatggcacaattttcccgttggcggccacaaaacaacctgcacgtcagcgaagattaccgccaggccatgatcaaactcaaagcccaggaatggttattgaagcaatatttcaattcattggtgcgcctgccgtttgaaggatgaaacttcttaaattgaaaatggagaattgaaaattgaaaattaataatagaacatgactgtagaggcgcagcgctgctgcgcctcttgctggcgtccaaggaaataacggcaaaaaacattatacattcatctgttattttattgattgccattttattataaaagtccggttttattgataaatggaaggtcgagaaaaatttaatggagcaacagacgtgagaaattaatggagataaggataatgataaaaaaagaaagcgacctttttacaaagaccgctttaaatgttttcacaacggaataatccttattgtgatttgcttcaatttagtttgacaaagatatgggaaaaacgggtatttagttttattattaattcttttttatatttttgtaaatgcattaatgaatttatatcatgaaaaaaatattaggattagatttaggaacaaacagtatcggatgggctgtaataaacgcctcacaaaaagaagataacacagatagcttacaaaacatatcgtcatgtggaagtcgaattattcccatggatgctgctattttaggtgattttgataaaggaaattcaaaatcacaaacagcagaacgtacaagactcagaggtgttcgccgattattggaaagaagtttactccgtagagagcgactacatcgagtattgtctttaatgggatttttaccagaacattatgcacagcaaattgaccgatatggaaagtttattcctgattctgagcccaaacttccgtggataaaaacaaagaatgggaaatatcaatttatatttcaagattcttttcttgaaatgctgactgattttcagcttaggcatccagaattagttgccaacgggaaaaaagtaccatacgattggacaatttattatttgcgtaaaaaaggattgacacaaaaaatcagcaaagaagaattggcgtggatcatcttgaatttcaatcaaaagcgaggttattatcagcttcgtggagaagaagaggaagaagattctaaaaagcgtgtggaatattatgctctacgggttgtttctgtagaaaataccggcgaaaagaaaggcaaagatacgtggtataatgttcatttagaaaatggttggatataccgccgttcaagtaatctccctttggactggaatgggaaaatcaaagaatttgtcgtcaccacagaattagatgaaacaggtaatccgaaggttgacaaagacggaaatgtaaaaagatcatttcgggctcccaaagaagatgattggaatttgttaaagaaaaagagcgaatcaatcattgatcaaagcaaactgacggtaggtacttatatttacgaatccctgctaaatgtaccgaatcaaaagattcgcggaaaactcatccggactattgaacgcaaatattataaagatgaattgaaagctatcttagatgctcaaaaaaactttcatccggaattgaacgaccgagatttgtattatgcttgcgtgaatgaactttatccgtctaatgagtcacatcgtgagatattatcaacacatgattttacttatttattgatagaagatatgctgttttaccagcgaccattaaaaagtaaagtttcattaattgctgattgtccttacgaagctcgcatttataaagataaagaaggaaataaatgttcggttgctttaaagtgtattgctaaatcgcatcctctgtttcaagaattccgattatggcaatttatctctaatttaagaatttaccaacgagaaaaaaagattgggacatctctcaaaacggatgtggatgtgacttctgaatttttacggaatgaagatgactacgtcgctttattcgattggctctatgaacagaaagatatttcacaaaaaaaactattaggatataaaccttttcaactgaaaaagaatgaacagataaactatcggtggaattatgtagaagacaaactatatccttgcaatgaaacaagatgggccataacaagccgtttagaaaaaataggaattccttcttcattcttgactaaagaaatggaagaaagtttatggcacatcttatattcaataacagataaacaggaaatagaaaaggcattacaaacttttgccgataaacatcaattagatacagcttttgtatcggcatttgctaaaatgcctccttttgaaaaggaatatggtgcttactcacaaaaggccataaagaaattattgtcacttatgcgcatggggaaatattggagtgaaaagaatattgacccgaaaacaaaagaacgaattgaaaaaatactttctggtgtatgtgatgagacaatccgtatgcgagtccgcgatctggctttccacttacaggaaattacatcttttaaaggattacctctctggttggcctgctatgtagtttatgatcgccattcagaaagtaaagatattgataagtgggaaaaaccttctgacattgatgaatatttgaaagccttcaagcaacattctttgcgtaatcctattgtagagcaagttattacagaaacactacgtacggttcgggatatttggaaacaagaaggtaagtttgacgagattcatattgaattaggcagagaaatgaagaatccggctgataaacgggctaaaatgacggcgcaagcattagaaaatgaaaatacgaacttgcggattaaagctttgcttacagaatttatgaatccggaatttgaaatagagaatgtccgtccttattctctcagccaacaggaaatattaagaatatatgaggacttcgctttatcaaatgagccgaatattccggatgatgtagcactgatactgaaaaagtttcgtgaaagtgatgtacataaacggccgactcgatcagaagtattacgttataaattatggttggaacaaaaatatcgttcaccctatacaggtgaaattatacctttgggcaaattgtttacaccagctttcgagattgaacacatcattcctcagtcccgctattttgacgattcgctgaccaataaagtgatttgcgaatcggcggtaaataaattaaaagataatagtttaggatatgagttcatccagaaacatcatggtgaaaaagttgcattaggtaatggcaaacagacaacaatcttctcagtggaagattatgaagctttcgtgaaacaacattatgctgctaaccgggcaaaaatggaaaagctcttgcttgaagatattcctgaaaaattcattgagcggcaattaaacgatagccgatatatcagcaaagtggttaaatctcttttatcgaatatcgttcgggaagaaaacgagcaagaagcaatatccaaaaacataattgtttgtactgacggtattacagaccggttaaaacgagattggggcatcatggatatatggaataaaatcattttacctcgtttccaacggttgaataaattgcagggaacaaatgattttacaaccatcagcgcccaagggcacgaaattcctgctatgccgctttatttgcagaaaggttttaataagaagcgtattgaccatcgtcatcatgctatggatgcaattataattgcctgcgccaaccggaatattgtaaattatctgaataatgcgtcagcactgaaaggatcaacaataacacgctatgatttacagcatatattatgcgagaaaacaaagagcgatgcaaacggtaattatcagtgggttttacgcaaaccttgggaaacatttccgcaagatgtatatcaggctttaaaagaaatcgttgtcagtttcaaacagaatcaacgtgtcattaatcggacaaccaaccattatcaacattatgacgcaactggaaaaaaagttttagtcaagcaaacaaaaggtgatagttgggccatacgacaaccgatacataaagacactgtttttggagaagttaatttacggatgaaaaagacagtttctttaaatgaagcattgaaacggataacaagcattgtagataaagacctgaagcataaattacaagaattggttaagagccaatataatgtaaaacagatcaaaaaatattttgaagatcaggcggatgtctggcaagatattaatctgaaaaaaatagaaatatattattatacccaagaaacaaaggatcggtattttgctacccgcaaaccattggataccagtttcgataggaagaaaatagaggaaagtgttaccgacacgggtattcagaaaatattattgaatcatttggaacggaatcagggaaaagctgaaatagccttttctccggatggaattgatcagatgaaccaagatattatctcgttgaacgaaggtaaaaagcatcagcctatttacaaagtaagatattatgaaaaggctgataaatttgccattggcaaagcaggtaataaatctcgtaagtttgtagaagcagccaaaggaaccaatctgttttttgctgtttatgaaacaacagaagaagacaagcaaacgggaaatctgacaaagaaacgatcgtatgcaagcattcctttaaatgtggttatcagccgacaaaaaagagggttgccttctgctccagaaaatgaaaatggagattcacctgtctttgttttatcgcctaatgatctggtgtacgttcctaaacaagaagaactgaatacaggagatattcagtttccgatagaccggaatcgaatatataaaatggtaagttgtacaggaaatgaagctcactttataccagtttacattgctaatcctattattcaaacagtagaattgggcagtaataataaggcacaaaaatcttggacagaggaaatgatcaaagaggtttgtattcctttacgtgtagatcgcttgggaaatatttcattgttaaaccagagtgaataatatctgctacatgataaaaaagacgctttattttggaaatccggcctatttgtcggtaaaaaacagtcagttggtaatcaagttgccggaagtggagaagaatccttcacttccggaatctttcaggcaacaggcagttgtgacaaagccaattgaagatattggaatgagaattacgtaagataagttatccggaaatgcctgtttatggacagatttagtgaatatcgaatcatgtgggttcttgtcttttttgatttgccaacggaaacaaagaaagataaaaaagcttatgctcttttccgaaaaaatctgcaaagagatggattcacgatgtttcagttttcaatttatgtgcgtcattgtgcaagtacagaaaatgcagaagtgcatatcaggcgggtaaaatcattccttcccgaattcggacaagtaggcatattatgcattactgataaacaatttgggcaaattgaattgttttatgggaaaaagccgctttctgttaattcgccagggcagcaactggaactcttttagaaataaaaaatcccgtaaataaacgggattttttatgataagcaacttgtttttttattttcaagatcattcaataacatattgaataataaatagatataaacaatctactgttgcttatatcacaaagatactaaattcaaagcaaatcacaacacaccgtttgcatcctcatagctgcgtgttactgttgcttatatcacaaagatactaaattcaaagcaaatcacaactggtccttaccttaatagtcgactgcttggactgttgcttatatcacaaagatactaaattgaaagcaaatcacaacgaacatagagtatatgtgatgaatctatgtactgttgcttatatcacaaagatactaaattgaaagcaaatcacaacgtctatcgatcaacagatggcttatgacatactgttgcttatatcacaaagatacgcaattgaaagcaaatcacaacttctaatataaagttctttatatttgcactattgttgcttatatcgcaaagatactaaattgaaagcaaatcacaaaaacataatttttatattgtatatcccatcatcctccattcaatcataacccaacacccgaggcgtagcagcgctgcgcctctacttcgcataatgaagaatgccgttttttgtctgctctaatcggccattttcccaaagacttcccctctatttcatccacattcatccacattcatcccatttgatcccttttcgtccacattcatccacactgatccacattgatccacacggcgattttcgggcgttgtatctttgtagtgtgacaagagaggaagaggcgcggttgccgaacctgtaaaagacttgtcctgataaagttatggcaatttcttataccttagtgcagcgaaaagacatgagtaagggcgcgttggaaggcgcaaagttgtattatgcccaggcagtgagcacgcgccgggtgaatttcgacgatttgtgtgatgagatcgctgaaacctgtacgctgacttcggccgacatcaaggccgtgttagaccgtgtgatctggggcatggtgacacatctgaagaacagcgagatcgttcagttcggcgatttgggtaacttccgcatcgccgtgggcagttccggagcgtcgacacccgaagaattcacggcgaccatgctccgcaagccgaaagtggtgttccacccgggcaaacgcttgcaggagatgcgcgatgtcgccaagttcacccgcttcaccgtcgataaagacgagggcgcagatggcggcggcgtgtaagccctgccctgtaatgatccggcttccccgaagtcaggctgtcacatcagtcgcttccgggaagacagatttgtttttggatggattgatgaaagaacagacatagcccttgattttgtgtcaaaaagggaagagaggaagacggaattatccttcatcttccgcttcgaactctttccggtgtgctactatctttttcatattggtctgtgcccactccgttagctgaacaatcagaggaaccagcgtgcgccccatttccgtcagttggtattcgactttcggaggaacaacaggataagttgtacgtgaaacaagaccgtctgcttccagtgtctttaatgtacccgacaaaacacgtgacgaaatatccggtatcaaccggcataattcgctaaaacgaaccttttcgtgttcgcttaaaaccaacactaccaataaggcccatttattgccaaaacgtgcgatcacattacgaaccgggcatatttcaatgattgagtttctctcttcctttcttagcatctcttacaaatcaaaagttacttttatcgcaaagttagtcatgatatccgttatataatgcagcctactaaaaattatatttcttaacatattgctaacagactggttttgtacaaaagcgagaaataggttactatgggataaaaatgtaacgtattgttggatagctttgtaaaagctaactttgtagtattatatgcgtgaataacattgcctcttacagcctgttgcacttggtgatacgctctatgtaattagaacggagaagaatagctgccggcaaagttttttccgcaaagaaatttcatttaatcagtaaaataaccaaagaaaaatgacaaaagtaatgactatgccatcagtaaccgacgcgaacaaacaggtaatggaacagtttattcgcttcatcaatacgggcgacaagagtatcggagaagccatcatctcgcccgacgtgatattttatgctccgacttcgcctgagcccctgcacggattcaatggctatattgccgttctcgacatgatgcgtggagctatgcctgatgtacaatggaaagcggaggaattcattgcggaaggagacaaagtgatgatccgttttacgatgagcgggacacaaacacaacctttcatgggaataccggcaacaggaaaggctgtcaaagtaacagcgatgaatatttatcagttgaaagacggcaagattattcgggaacacgggttgcccgacatcttcacgatgttgcaacagctcggtgccattccggctcccgctcctcaacaataaccgggatacgcgaagtgatggagtatttctaaaattccggtgagcctcagcgggaacttggctgctcaggggaaaaaccgatgaggctcagcggaattcatcttatattactactcgtttcttctctctcaataagaaatcttacagcctacgaaataactccgcggcatgccgggaccatatatataacccgcatcgcgtttctcgccctggtcgaaatcattctgataggcattgaagatatttttcacgccggcattcacctgcagggttacggtcttaaacaacggaatatcatagcccaccttcaggttcaggtcgaagaaatcgggcgtcgtcacatccttatccgagatattgtatccttcccgcaggttgtgctgcaccagcatgctgcccgtatacgttcccgtcagggcaagcgacagacgcttcaccggcgtaaaggtggatgtcaggtaaccatacaaatcgggtgtgcgatacatctttttctgcggagtcacatcgtcgctccactgcatggcctccttatagcggctccgctgcaaggtggctcctgcctgaatctgcatccacgaataggccatctttccttccaggttcaatcccatcacccgtgcgccggaagcattataacgcaccatcacgatatcgccatgctcgtcgaggcccgtcttcttcaggtcaaacacat
